United States Patent Application Publication US 2005/0208558 A1 - sequence listing, part 19

SEQ ID NO: 18523 - DNA, 27329 bp, DROSOPHILA
caaggacaagcgtaccatatacggtcgtttggccaagaagtggaaaccgattcgcaataagaaatccaaatactatgtgtccgtcgatcagttcgcggcgggagtattcccgtccttcaccactggacccgcctacgtactcaccggagacattgtgcacgaactctacgtgcgatctctgaagaccgtttatctgaagctggaggacgtgttcaccacgggcatagtagccaagagccttaatgttaagcgggtgcaggcgaacgagttcgttaaccgacgcatctcatttaacccgtgcaacatccgcaacgcaatcagcgtgcacatgatcaagtcgaacgaacaattcgatttgtggaaaaagctgctggatcagaccaccaagtgtaaatagtattttaagtttagggtgtagtttttccggtatgaagaacacagtgtggtctttcgagaaaaaaggggcgaacatatatgtaatatggtaggagtagagaatgattagcaaaggcagctatataggattataaaattagactagtctctaagtcctagaaatatcacaaattctgttgtcgatctctgcatccgcctatatgcatgcgatccaacaacgattcgagtacattttaaaacatctgtagtttaattttagcattctgaatgccattatttaaatgataattactgagcgataactgtggttatatattaacactaaatacattaatgtatattgaaagaatcacatagtgccttttcatttcgaagcgcttcccaaataatacctctttctggaagtctaatggttttggatatttgaagccttcggtattattcaaaaaataaataattctttttcatcgttccatattgttgatttctgaatgttggtatttttccaggccttagaccgcaacaaaaaataccgcaacggagcagttatcgactattcgataagctgaaacagtaattcgatttatgaaaacccgccaaacttgaaaacaatggtagttatttattttaaaatttgttagacatacacttcgtttaacataaatgttacaaagttagttgttacacaggcgatattacaaaaataacaaataggtctcatgggtgccaatccgatcaatacataggtaattttgtaaagctcaagaacttgctacggttttgtcactcaaacgataaagacttcttattttgataataccttttaccatgttggagttgcacatatggaaaattctttgcatgattcggctaacaaataacatatctaaataaattggtactaaatttatatatagttatggtgtatacggtacgtgggatcgttggatccaacagagctctcgtgtggttttgtggactcacatcggcaacagcgagtggctaacactgctctcatgcgaaacgggtcgctcgatggtcattgaggactgcggcacctggctgtctgtgctgattcccaggctggcataaatctccttcatcacgaaaaggatcgtatcttcggagcccctgcgtttgagaagtcataattggtaagtaaatctatatttaaggagtaactcaaggtgataacttaccagtagcacacatggctgctcagggcgaaaatatattcgttgatgaattctagtggagcttcctgaagcacgtagtccacacgttttgagtcgttcagcttacccagtgggaaatcaagttctataaactcagggtcagaagccgtcgtcgaattggaatcggtgcgatttcgtagtttgcaagatgaactggcaactgaactctcgtcctgatcctcggtttgcttttgaaaagcttgcgatgaagtctggcttgtctccttctccagcgactcctccgcttccttcttaaccttcgttaccgtggtcaaaaagtttacgctgtccagcgtggtcttgaatgtgtccataaatcgctgcttgatgtccgcacccacacgtgtcatcgtctccttcagctccaggtgcattcgttttcgtcccttgtgatggggaattaacaccggtcgaatgccgttcatgtccggattgacaagcgcctcgatccgataggctaccggatcgaagggatggaatatgttgtagaaacccggacacgtgggcaggtgaaagtcgagaccaagcttatcaatccccctgatggttacaaacattccgatgggtgagcccagagcaaagaattttttggggtggaatatcagctgtgtatatgtaatcacgggctgtcccgtgccctccggacccatcgcatagctgacttgtttcggcaaaggatcgctggttggaagctgtaccttttgactcgattgcttttggggaagttggtcgggattctccttaatagataaaatgcttttaaaatggttttattaatcgctaaagttttactcactttattctcttcctcgctttccttgagcggttcctgatggcacaataaatcgaataggattagggagccgagactgtgacctgccagcgaaactcccccattgaattcagggtgccgcattcggtacttcaggtagacatcgttaagcgcatctgccaccgtgttcatgatcttttgacagtatttcggactggtgtagaacagcacgtcgagcagcgtgtcattggtgaagtttcgcaagcgaggaatagactccaaagtgatggatttcagcttttcgtcgatgcctaactcctcggagtgcaggtgtccgtgccacgagatgggcaaaacttcaacgcgacccaccaggcccatatctgttgagtttttgtagtgcgactgaactagttgctgggcaataacccggaagtcatccactaaaaatgattacaaattggttatttgccagaaaactaagagactcatgtatataactcacccacttcctccacggaacgcattttcaaatcgcaggctgagccaatgccatggaccatgaaaagcaggtgatcgactcgctgcgattcgccttgctcgatggtgaaatcatccagatccctcttgacaactctcggacgcatggaaccctgtgtgctggctccccaagtgtctgcattctgttgcggcaggaagtgaacgatgactgtaggtccgtggaagaccacctgttcgccattggccagcataatcttctgatgccattcaccagtctccgcagatcgcttgtattccgcttcaagtagtgcagccgtatcctcggtgtatggaacatacttggagtcaactcccttgtagaaccaggagcagcgtcgcacttcgatggcctttccctcccagtaaacgggagtcttggtacgttccttgatgtttacatcgtagcggccaccctcaacgggaataatcaatgtggaatcgtctggaattgagattaagtcgtaagatgattttgtttgaaaagtttcagtagctaaataaaagaaagtgcttaccaagatttaggctggtttctaacaaggccgaatcatagtggctgaatggtgtccagatgaactttgtgtccacgctgcgcttgtagaaccaatgggccaccactggtgagtaaggctaaacgaaaaattgttaattagtatgataaaaacaatattcagctactgtttaacgtactatagccacgggaggcgtcgccacctggcccttttcgctgctggcacttgccattctaagctctctgaggatatcctcgggcaattcgcccagatgctgttggagtagatcgtcgcccgattggcgatcggtttgtgttggtgctggagcaagggtcgagaattccgaacaggcagacgaaggtggctcgacaagatttgaaacgggcgtctgtgagcgctcttgcagctgcttaacagccactccgctgtggacaatgtcgtatttgagttcacctggtacagcgggttgatcctgcaacggtggattgttgaagaagttctgaatgcgctgatcctcgtttgcttgctggatttgcgactgggtttgaggaacctgatcgaagaaattgacgggatcgcagtttatagctggagcaacaagtgcattagttgtctcgtttgcgaatgtttgtgccgcagatgcactaggaccaccaaaatagccgtcgaaagagttgacacttgaattttgatttgagttttcgactaaacttgaagcttgctgagtctggtttaacaaatcgaatcctatagcagatgtggctatattggacacactattctgtggcggtgactcaagtgccaatggtggcggtgcgattccctgctgcactggcaaatcaggaaacacgctgccgggtgctgggcttccgaagaaattgaagtcggtggttgttgctgtttctggtgctgtgctgaagaagctttgcagtggcgagggagcaagtggtggctggctaagaacttccgactcgcttttcggcgcaaagaatccaattggaggtggaaccaattcgggttttgtttcctgaaccaaaggtgtagccttagtttgtgcaaatggactaaaaactgtttgggtttcggtgtttccctgaaatagattggttgcggtgtcgtctgatgatccctggaaaccaggaggtgcgtcaaccagctcagccgatgtagttggaactatatctggtatggatggtgttgttgttggtatgttgttggcaaacaacgtagaagtcgtatccggagccggtgttagtattgttgtatttgcagatgttggtggcggagcaaataacgaagaagtagaatccacttgagagggggaaaataacgatgaaaccgacggaggaccaggaacaggaacaaaaagtggagcacttgaagccactggtggcgcagcaaaaatcgagctggcagtggtggaaccagttggtggtggtggatatagtggtatgtcctgacttagtcccggcaaacctggcactggaacgaataatggaatctcttgttccaccggcgcagatggttctgggtagactatatcttcttgatctaccttacttgcgggcggaacactcgattccgagctacttgctggggtttcttccaaaacgggttcgattacgggtggaccagtgtgtgtatcttctctaagttcggttgatagattagattcttgtggtggtgctgataagaattcttcttgaatctcggatcgcttggaatcctctgctggtgctatgaactcttgctgaagctgtggtgtaaaaatattcgtttgcggcggcgcaaagaatggaattccttggttcgatattggctcctgtacaagattttctctttccgaggaaacacttgctacttgattctccggttgggttcctgttggcaagggcgtatcaaagaattgacttgcagagagtgttggagcaggtccttgcactagaccttccaaagttgtcgatgctgtagcttcgttttcctgttggctcaaaccagttgttacttctgctcctgttggttgaggattgaagaaaggaataggcgttgaggatattgttggtgcagcgaagaggggtacacttgcaaagccagatgttggaggaggattggctatagatgctgttagcggaggagcaacacttgtgcttgatgtccctggtggaggggcaataggtgctgattgcggaacagcaacagttggagccgctacttgtcctggtggattctgcactggcggcgtaaagaaaggaactccttggctggattgaccctctagatggcctactgaattgaaagatcctggtgccggtgctccgaatggattaaaaattgctggagttacagatgtggggggcagaggagcggcgaatcccgaagatgttgcggtttcctggggcgtcaatggactcttgtaaagacgagttcccttctggagacgatatgaagcttgcccagcggctggtggcggtgcagctgctcctggcaagggattcggatttgaagcagtttggacaccaggctgtgccggtgctggaggaaataatcctataggtggaacacctgatgatgtaatcggtatagttggaacaggttcggctaacgggacattaggacgaacttctcctggattaaagaatcctgcagattgtgttgctggtgacgcttgtgttccaaatggcgcaacaacaggtgcaacttcacctgtggtaaagaatcctccaagtgtcgatgttggaggaggattgcctggtggaactgttaaaggtattgttggaacagcttgtgtgtcaacaaatggaactgcaggtgaagttccttgggcgattgtcgttggtgctggaacaaagagttctcctactgcagatgcggtcggcggattgtttggtggcaatgcagattggtttacagttgctgactgaaaaggctgcggtgcaagaggtggaactgttcctggagtaaaaactgaaggcgtaacacttggggcagcagatgtgaagaaggctccgacagctggtggagcagctgtttgtgctactggcaatggagcagccggcgcgaagaagtttccgaccgaaggggggcctactacccctgttgagggtaatgatggaggtgctcccggtacgaaataatttcctcccggcggaaaggttgaattcggtccaccaaataagttggtcgatggagctggtgctgatgctgttgtaatgtctaggtagcctcctgcttgctggacgttagtgtgttctggttcactgcttcgcccagtggctgattgaacaattcctgtgatattttgaagcactcctgtgggcacgagactggtcaaagagaagagtcctccaccagatttgcgttcctctgcgggaattgcagctggctgcgctgatatgtcaaagggagcagggtttgctgcgtacgttagctgtggtggatatggtggcgtctggaatgatggagccgcttggggagcctgaggaacctgtggctgttgtgcaggttgtccggactgctcggataatccaggaatgggagcgtatagcttcttcctggcggtgaatctgtatgtgtttggatttcccgatgtaggcggtggtgcagggactcctacattcggtggcggaacctcagtaggtgcgtagaacttgggtggttcgggggcgaccacttcgtttgcggccgctggcggtgctgcataaaagggagctggcactggagctactggctgaacgtagctggcctgctgaatgtaagagggctgtatgtctagtttgggctcctccgaggtctccctgctgccggcgtagatccgcttcgagaaggtggaaaacacattggatgccaccgcaggcagggcagtaaaggaggaggccgcctggctcagcaacgaatcgtttccagcttccgttggtggttccaacagaggattggcgttttgatcgcctgctcctagatatggactcgatccacctgcgccaacggaatcctcgctgctggtattcaagttaatctcgtcgagcgcctcgctatcgtcaatgctcgatggctgaccaacggtgaccaatgatttcggttctgaaatgtagacaaaataaaaacccattggtcagaatgatgcctaattgtttatagttggagatcataggaagttattacttaaaagtggccaattccccacaaataagaaacgtatgctcgtcaagaagttatgggttgtgatgaatgctaattaatatcggcagaattgaaaacggaaccgccataaacgggtttgcaaattcgcacttggaatcgaaggtggaactggacttgaagatgtagattgagttgtcgaactaaacaagcgatagccgcaatcaaacatgcaacagcattattaattattagtgataaaaaagatgtttttgaatgtttaccacaaatgtcctttcattaaatcagtgttagtttaaaaaaaaccagtgctatttaagaaactactggagaaggtaagccgtggcttataaattgtaattgcaccgactgattgctctcaaatggtttccgcctttaatttggctagatatagttttaatggttcaaccgtttgattaacccataataaacggcaacagccatgtggggaactggcaaacaaacaggtcagttaacgatttttttttagcgaacttaatccacactctaaatccgaatcgggttttttttctgcgctgcataggggggtgtcataaaaagccaaatcttgacattagccgcagtataaatgccatggcatttgtagaagaagcgccgcgaagttcccgatgaatgtgaaatgtgaaatgaaagcacttggccgcaaaacatggcgaacgtgtcatttggccagcgaatacgtcaaagaattcacctcgatcttgaaacgtgattggatccgaggcgtattcgctggccaaaaggttttcacacctcgagcgaagttgagactattttaagaactgcattgttcacatgctcaaaagcgagtttggaattcttgtcgcagctgcataaccagattccaaagccaggccaatgatttagaattatgattatggcaaattatgggattctaaatgcgatctttggatcaaacgggcttgcttctaagctagtctacctggtctgaagtccacgtacagatgcgcgtccgtaatggtcaggtttcatatgcatatcagtgtgagtactttttattcactacgatagtttgcaatccagtctattaatcacattcatggataagttattaaggcataaaattgctgcccataaatatgctaatattgtaattgataataatatttcgatggaaatatggtaagagtttaatttaatttattattatttcttcatttcgcttttatgtaatatttaaactaacacataaataaatataaaaatacagtctcttcgagagctaagtaatttgattgatagcaaataattaatgtatacttgtggcttcaattactggttggaaaaatatgatttatattgccatttttccaataaatgtcaagtaaaaccgcttaaatcacgcgcaaaactattttttgccatatattttcgccactttgaggcacttgacattgtcgactttgtgttgtcacttttagggtcgtcatttgtaacggctaggcaaagattagctatagcaactggccgaggtggggctcggaaaatattgaataacgacgaaaaatttccagtttaagtttttcagttttgagcttgaggtggtttttgttttaatatttacaaatgcccgcaatgacaatgacgcattacgacaaatgtgttaaaataaataaagatgctcgcgttcgtctaaccgcaaaagtttgaaaaaagtagaacagcataattccatacaaattgtgaccctacacaaaagagaaacacgcacacatcaaaatgtggaagaattttataccttacttaggagcatgacatcataaccagatttcggtcactttcggccactcgaaagaagcagcatctgaaagatcttcagcttcagctccagctccgtcttgctgtcccaagtgctgcctgcacataatggcactcaaataaaacaattaaggcccacatgagcacgtcaagcacgatgaaatcatttgcaggatacccgagcgagcatataatatgtattcgggccacaacaatgccactaagcaagagctgccccaaaaaaaaaaaagattgccatcaatttgggaatttaaacgctggccaaaaggctcgtgcaggtcgcatgccaaaaacgcgatcagaaaaaacaaccgagaaaacaaaggatggcaaaaatgtttggcattgaacccccgggccaaataaataagcaaaaagaaaacacacacacataggaaaaaaagagaccgaaattaaatcaaaataaatctcaaaatgatgctgaagaagctcctcgagacgtcggccagtctgcggctgccagcggctaaatggtataaataaaccgggcacgactttcaatactctatcccaaaaagttttacaccaaatatgcgaaacgtcttgtagctcggtaatattgctaaagaaaaattacagaattcttatgtcaatggagctaaagtcggttggatccgtttcattatctctgatttctataaatactctaagaaaatgtaatttctagtaaacaaagaaattatttattgttttgcataagaaagaaagcactatcagcacatttattaattgttataaagaaaatcattgctctgttttataaaaccttcaagtttcttggccaaaaagtaatttcctacttttgtcaattgttttgctcaatctctcatcaattttttccgacactttaattagttttttgctcagctgcgtaagtttgtcgacagttttcttgaataaatgtatcatgttctttccaaaataggtatttgtgcgtgtaggttcatttttggaatgcatttcctggtagccaatgaattcaacaacgtactgcatttgttcctttggggaattaaccctattggcgcgatccagacagctttgaagaaattcgacttgggatttgcacttttccaaattcgatgcccgtttgatggcatcttccagagatctcctaacattatcaaatatatttgaccacaaatcgtcggtatcaacatgttccaaaagttcgcaatcatttccctgttccatgggaaatccactggagagactctaggacggcacacggaataagcctaatggttacttctactaccaaattcttaccaataaattgagtgatagaattattacagagaaacgcatattacgcttgctttaaaaagactgattgttcaaggaaaaaacggagctccttttatattgctttaaaggaatttgttcttcaaaaagtatacttaactacctgctgatttttctgagcaataggctcaactgtcgacaaatttacgttaccctttagtggaagtgtgttatggaggttcaaagaacagacaaactcaggtagcaccaaacgagatatggggactcccatattttcaaaggaattcaaatacccaaaacgactttatggttatcattttgatgtcaataacccactgcctagatcccttgctatactatgcattacaatcgtaacgacattcaacacaaaataccatttgtagtcaaaattacatgtcaatttattctcttggatttattttagacagcattataaaatgggtttttcgtcaattgggcagagtacactttgccgaaggaaaccgtgttaaatacttcaatatcggaatagagaaaccagataatgtatttatgatcgtattgacattcgtatcaatatgtgccaccaaattatgatattcgatttgatctttcacatgttgactcaattcgcgtatatcgtttttcatgtttttaatgttacttgaatatatataactgtagggttcctcatcagtacacggaccaccttcatattcctgtgaggatgcgttaagatattcaattatttgtgcccaaggactggatgcatttaattcatttccacgattttttagattttgtagggtagcaacatattggttacaggaacggtatgatcctttataattgattttggtctccaaaatggaattggctaaacttttactcttttcccaccaagcattctcatcgtctggaaatcgcgcaacgttcctgataaattcgcatgcattttccgcatttggctccaggggataactattcgctggtaactgcggtcaatggaaactttaatattttcttttcgaatttaatcctgagtatcgtaccagtacagccagcgaaacaatgacgagttggaagtatatttccttaatcattttatagaactgcacttctccgacgcaaacacgctgatttatagaattccgttgcgattgtcgcagtatggctgacttctataaaatagctcagataatctcgacgaccagcaaaaacaaagaaccgtttatatatagttcgatctgattttttttatttctacagtagaaaataagcacctgaatatacaccaaacattcagtaaaatcgttatacccgtttcacggaaagtgcattatttcaggacggactaacgaaagacttaggcaacaaactcaggtagccgcaagttcaggtgaaaaaggtgatatgatatgggactcgcatattttcaaaaggtattttcggggttttttcccccgagcacatgagtaaacccttcgtagtagcggtatgctaattgtgtcagccacccattgccacacccactgacccgtgacgcatatgccacaatctcgcttcctccggaataacccgatagcggattcctatgactctatatatcttatcaatggggtgtgccaatccgtttcaacgcttagctacatacatccatttgcagccaattgttcaatatttaaacaatttatgaggcacaaaagcatacaaaatatacgtgtgcgacaagtacaaaaaggtcagtaattagaggagtttgttttagtcgatcgacagtcgtgctgtgttccacagatgcctcagtgaatcgagtgaatattgtgaaagtgaaataacaccgaaaggattaaggatattagtgtattcgataaggctgtggcatcaaccactgtgttagctaattattaacacaaagctgacaccgccttgcaccagttcttctcgttcttctcgaggggctcgtttggctgccactgcgaaaacaagttggtaatttttgattaacactcttgggacatgcgtacgtgtttatatattcatcataaaattaaaccagcctcggcatccatatgggagccacaaacaaaatcacaggccgagcgagaggctagcaagcggcaaatggaacgataatcaaaaaaatcgacacaaaacgattgccaaatatttaatttgttttattgaaagggtttttcttttgcgttcgttgccgcaaagttgttaattgaagcaatgcccgaaagcaggagcaactgccgaagaaggcgagcaacaaaaattgattgcataattattaacgaaagcacgacaacagcgtaatattcgcaaagtgaaaattgcgtgagctgcataaattctggatgcaataaatttgctttcaaaatgtgcgaagatatctccgtgccatcgactcttttatacccttgctgcgattatcgagatctttagctaatgaaaatatagtaagctcatatggtatatggtatatttatttattaaatgaaactcttacctaatgagagctttgaccacatacccatgtctcctcgctggaaccacacaattagtacttaatatttcaacgaagtgttgctattcaaatcgcaatacaaagtggttcaatggttgctgccaaagactttagtattgggcggttttcgagataggcacgtaggtcaagatgggcacgatttcgcatggaaaataagtcatgtcaagctcaagatgctcaacaatttgtcatacaagctaaaaaggcagccgaatcattgtgcctaaacgtcgtggttgtgtttacatattttttcctaaacaatctaaggttctgctggaataacaataaaatgtgtttttacaacagagccattcttgtttgtgtcacacacattattcatagccaaaagaatggaataacatcactttattcaacattctcgggtcttacaggtactgtttaagtgacaagcccacactaaactaatttctatggaatttctatggctcaggtaaagaaagccggctaaaccctttgttaataccttaagaaattgaggaaacctcaacgtttccgcatacaatatttaaatgaacaaatatacgtattcgatggcccactatatatgtacgcgcttgtatttattatgattttattgatgctatcagcgactgccagtcggagttgtcatattaaattcatttcacgctccattttaatgcgccggccagtcgggcagtcgaacttcctacacaagttcagcgtcggtctgttttggatgaattttgacgaccaccaagccgattacatattcacattgcatgccaccaatgcggttattatttgccataatgattgcaaagcaaaaaaaaaaaaaggtcaacatgcaaagaactctgccagaaagttgcaaagttttattactctgaacttgaaaaagtgttattcgctttgtttctgctttgattggttcgagggcattgtgattcctagagtaagatcattccagcgactcattaagcacagattggtgaatagtatttaatagataaggagtataaatataattaaaaagctgataagaaaactactataaaaccaggagagtgcattaaaagaaatgcagtcatttgctaagatttgcaaaatgtcatttcctcggatcatttttttccttgtgttgctggtgagtttggccaagagaaaattctcttttagaatgtaatccttgttgcttcccaggcatttgccaggagtgatcctgttgaaaggaatacggaagccatttgccagtttttccaacacgttcgagcgtttcaagcagactggtgggaggactcagttatcctgatgaagagaatgttggaggaaatggtcaatgccctagagccctatatcgaatatgcagagtacaggaaaaccatgcaggactatctcgagcatggaaagaccatagttacgtccagtcgtttggaagataagatggcatttgttcaaggattcaatgaacacggtgaccagccaactctagtcggatcaccctccaagaggcaggcgctcaccagacctctaaaccatttccaatcgaatatgatttccaaagtgttcactgagttccataaaaaactgatcaaagctgctgacgacttggagcgagtagtgcgattcccggataactctgctaggggggaactttttgggcttctcgagcaatatcgggccagtggtattggaagtatgactgaagagatagcttctcgaatcctggcgctaaaggataattaccagtgtgcctagacgagtaatcaaggcaatatctttggtactaaatatttgctcaataataaattgcttatgtttggcagttcatttttaattaacatgcgtatttgttgctgattaattaagcaaaatcttgtaattgtaaacttgtattatagaatctttgcttatttgaatgacaacttattcaagccactaattgtgacatattacaacgataagatctaaacatttcagctgcggtatcagcatgttgagtgttgagaatgatatagcgcagtgattgcataacaggttgatgataccatgggaacagaattgccatccgagcgaagatatttccatggcgctgccaccaaacattcgtgtcatgaacatatccaattgtggcatcagctcagctgctccagcacgttgcctcggtttatcagtggcacgctcttctagattccaacctctgtggccatacagccagctatagcagcgggtatacgtacacccatacccctatctatatacctgctgcttcggccgagtaaagagagccaagccaagccaagccaaccaagccaaccaaaccgagccgagctgagctgatctgatcggatcggtttggagtggagtggattggagtgaatatgagcaacgaactgctccgctggtcgcagcttgtgtttctgctttcagtttcatttgagacgttgacgcgatcgccagcaaaaagcaaaggcagctgccaaaatcgcagtgagctataagctacaactacaagtcgcgcatgagaaatatatttaaacgggttaatccaatacacggccgcaaatcgaacgctcttaattttgtagattttttgtttcggtcgcttgcaatttgctgagcgtgaaatattgcagcaagtgaatatttctgaaatatcagtgcgctcgtgtttattgttgttgtcgtgatttgcataatctgcaagttaataaacaatgcaaagaagtgggcaaaactcataaataaagtgtaccgcttaaggtgtaattaaaattcattgagattttttcgtgcgcacagcaaggagaaaacaagtttgttgcctaagttatttgttttgaatttcgaaaattcacaaaacatttaataataaatattaaaaaaaaaaacaaaaacaagctagaaagcaaaattgagtgcagaccacgtcgacaagaagtttcacaaaaggcaagtgaatgaaaagcaggtttaataaaaacattttaagcaaattgaagtacataggaaatacctaaatgcaaagtagcgaaataaaaagcaagtcaagtcggagcacatgaagttaagcacagaaaaaaatgcaaaacaattcaaaaaaatatttccgaatcatagtttacacttcgcccacgccgccgtttagttctacaaacagaatgccattagttttgttatttctaggcccaacagaacccttcaaagctctgaaaatcaacaaatcaattggcttttcaatgtcaggaaagtaaacaatataaatgcgcgtgggttcgttgaagggtttgatccccccgatgctctcccccctccgatccacaaccacaagtatattcatcactgatgatcgccgagcaaagctgccacaattagagtgcatttttaagtcgattcagctgacacgaaggggttggtcgaagggaaagaagagtgggaagggggaactaggaacgcaatttgaatttataattttcgcaattatttttcattaatttgttggagccataaaaacggcagaataacgttcgagtgatataaaaatcatggcgaaaataaatgcttacgcgtctgttaatcacatctcggcgactgactccacgtaattgcaaaagcaaaaatacaacaatgaaaagaaatatgtaaataaataaaaaccgacaacgtgctcgcctctctaatttgtttatagaaccatttggttgccgctgtgtgttttttatgagccgcaccgcagcaaatcagctgatgacggctgttgtgcctgattgatgaactgcctcagcgggtttcggtttttcggtctttattcgaacacttttccctgatcataaaatagagtggctatagatcacgaagaatatcattgaaatgttgtttttttttatgtatgggggcccttctaatcgcttttggtttgtaatcatctttacgttaaaagcatttggtttctctaggaatttgtaaattaagtaattgattaagtacttcctagtaagatttatcttatcaacatgctaaaatgttgttttttaatcaaaaggttatttgccgaaatgtaaattaagaatattatttacataaacagacacaacgttgttctttctagaactttatatccccaaaacacaactttctttcctcaaaaactttcaacttcttggaactgaggagttcccctaaacctcaaagggcaatctatcaaagaattacgtgacctgctgaggctgagaatctgaaatgaatagaagccaaccagcatttggccaaagatgtcttatgaatgggaattgtgcaatggattataacattttaaaacgataataaacaagtatgaagacgacagacgaacgtgtctttcacacatttatcttgacaagtttaaacaaaaaagaaaaagaaaacgcgctcggggagaccccaagagaggcctaagctctggctattaaattgcatgttccatgatcccccgctgacccccaattcgatgaccttgcaacgcacgaaaatgtacaaatcgatttggagttgattcgggcggccagccaaacaagaaaaacgaacgcagaatattttaacttaatttatttccattttacgcatcaatgcgatacttttggatttcaacttgaatgtatatttcatttcgtttcattttgttttatttatttgtattttcgtttcaattttttttttttttttgcggctttgcatattgttaattaatggcaactgctcgtttctgagtttttacactgcaaatcacggggcgagagccaagaaatcaatcactcaaattgatttgtgggtaatttgttattcaaacaagtcgcagaagaaacggctgcaaaaatgcaacaaaaagtataaacaacaaatggcgagtgcaaaggaaaatagcgtatcataaaaacgttttgcatgttgtcttaaccaatgtgttaattgcatttgcttaattaaatattataaattgatcaaattgaagccacaaagttagcgtgttcctccggctttaatcaagtttaaacatttatttatttatttttttttttgattcacaaatggattcacatgtgtgagtttacacaaccacgagaagtcgtttgtttcttttttatggcaaatttgttttattgtcaacgtcgtcttcgctttctgtgtttctattttcctcacctgcagcaggtttaacaaaaccttgaccatatctctgtatatatatgtatgtttttaataccctacccggtttttttccgacgagctacttgggcttttagtttaatttggccaaacttttcatcacacgctactgttttaccagcccttaagtgatttgaataagttcgtgcatcaaggcctatttttactttattgcatgctcatgaacatgactttggcaaagtatttttggctccataaaatcttttttatgtttatttaagccaagttacattggataactttatttgcttttatggctaggatcaaaagttaagctatcaattacgcttatgcgaactagtaaaacgtcatgtttaatcaaggttagcagcagattaaattaaaatcggatttagtacaattatagaatattagtattagtatttcctgatggttctagctttgagatcgcagcattcaaattaaactttcaaattaaaaaaaacaacaaattccccagaatttcgtagttaaatggaaatttcctcaaatctctgcaccgccaatttgctataaatgttcgatttgtcagccataattatttaaaatgattttaataacaaaccaaatgattatcacaatgagcagtcataacatttcactttttcacattgcgaaagtgttgaaaagaagacaaatagtcgaaaaaaaaacggacaaaatctatagaaaaactaaaaataacggttcagcaaaagtgaactcgaaataataataaataattgcgtcaatttagtaagcgaaagaagtcagtcaatcaatcaatcaatcaatcattgaactccgaaaagctttccaaaatcgtattttgacatttttctttgctccatcattttttgcagacttttatgctgacaactgaggatagctaagatcatatatcaatcgaaatgattttgagaacgcacctctggctgggagtgctcctggcggcgttgctactaaataccgtagtttctggagaggatgaagactatggcggcgaaatgattggctctagcctcggaggcaacgatgagatctacgatcctgctcaactggaggccgaggtagaaaaagagatggagcagcatcgcaatagcttggaggaggaccaaaccgaaagttctcaagtcatggagctggaagtgagcaccatgaggcccatggagagcagaatgaacaccatggctccgtattccggggaaaactcatccgccgaaatgatagacgatgcttccacccaaaaacgtgtatcaaaggtggacaaacccgcgcgagattattattacgaagatgcgcccgaggatgagatggttgccagcacaacagcaaaagtggctaccaccatgataccggaatatgtgcgtcaggccaaggcagaaagattcccccagcgagatcaggagcatacttcaactgactacatcgaggaggatgccaccaagtcggtggatgaggagcctccagctgatcagttctaccgagttgagcaacacgaacccattccccaggctcaagtccaacagctgcccagtcgggacaaacccaaaccgtttgagtactcctctgaggatgattactacgatgagcatgcagaagctaagacgaccacaacaagcacttccaccacacaggcacctttgcccatactaagggctcgtttcggtggatttccctgggccaccacccaggcacccagtcctcctaccaccagttcaacaagctcaacgacaactacatcgacgacgacgacaacgaccaccacatcaaccacaacaactcccagtcctagaaaacagcccaagcacatccaagtgaccggtggcttaaagccggaattgttgcccgcggatcagctgcgcaactacatcaaggatgtgtacattcgcatgcctctggctgtgattgtggatccttcttccgcatccttggagcaggcaaagcgtctctatatcgatgctttgcaggacaagaacatcgatatcaaaatagttttggtaacacttaatgcagccggtaagttaacttgtcattctttcaaacattctttcttgcgtaaatatgagtttcgataagaaaaaactgaaacgaatttcccttccatttaggtgctccttctgccttcagcttcaacaacacccgggagttcatcgctggcttgaatagcaccaaggagcacgagggcggcaactcgtttgtgggcgttttgcatgccgccgagctggttccctacgacagtgctgttttcatctcgaccgcagtcatcccaccacacacggaactggtccaagatgcggccattactcttctaaagaagaggatcagggtaagttaatcaacaagaagctctaatcaagctctataaaagaagctctaaacaaacacgatgaacgatctaaatgctcattgtaatctgtcgcattttcttgtagttattccttttgtggtacggagagcgatcgggcagcgaaaacgaaacggaggacgcagtgggcggcattctgggtgaggtggccatccgatccggtggcgagatcatccacattgtgagcaccgagcacggacagcatatagctggcaatacggtgagatatgagcgcgatgatagcaacgagcaaacccgaccagcaattggggtaattaaagtgtgcgggccagagacagatttggcggggaaggcctaagtgttgagaaactgaaagtggcaaccagatccagccgactgttgcccaagcagccaactgagacggagccacttggattacctctccagtggccaggcggcagcgacagcgccagcacaacgacaggtggtgctcaagaccccgcgacttgttgtcgatgatggtgcatcttttgtggctgtgcggccactgcaaaactaggttatggaaagaaaagtgaagggcaaatctgttggtagaaaggaagcctagacaataatgccgaaactaacccacacagcgaaaatggcaatttgagtattttgtactcaaattctgcggaatgcggaataagaaattagcataatttcaatttcctgtgcttaaagttttgggaaacccagaagcaagggtacttttttatagtgtttttctattaactaaactgccttttaataggattatcaactgggttttaattgagaatgggccttcaagcatggtgtatttaattcaaacttaaataatcggatataatccatcgagtcggattaatttggccaacacatttgacatttattgttcttttcagctcaccctagtagcggacgcgtatcaaggtagtcaagagctggatctgccagttgacacgacgttgtccagtcttcatgtgcgaatcgatgcgaatatgagacgggccacgatggagacgccgaatggtggttagtgattctcgtaaagcgagttaccaagcaccgactccgtttgctctatcgcacttactaacgcagggttgtattttagtgtttagcgacttaaatgtgtaggagtctgtgtgccaaacctacgtagattctaagtctaatccttttgataatggcacaagcttccaataacttcccagatgtattgacaactgtactactgtgtaatttatgtccttagctcgtaagatcattgactaacacccgaccaatcgctgctctctaatcccaagtcagctatgctgatccttgtatatagccgatgtcccaacgctttccttaaccaaaacgctagtataataataatgctcaacaaaaccacacttgacactaaactgtagtacaaaggaaattttctatatacatatatgtttactgttttacagttataaagtaataaatgttttagctttttaagggtacacaaataaaacgaaaacgataaaaatcaaacctttttaacactaagccacacaaatgataacgattttaaatggtgactgttaatggtcataagctaattagccaagcagctatcttacaaacattaaaatgcaacttagccatttaaaatcgaatattttgcgtgtgcagctaaattatgtttttcgaacttcaccttaactttgtatcagcactttgtgttctagtcctttctgtgtttcgtcctttaaggtgagtatgtttaatatatatctattttgatttaattatggagcactttcaactgtccggcacaaaatgttattgttaactaacttaaaacgtagaatggttggaagaatggatcaattataacgagcgttcccccagattaatcatacgccacgtcgaacgagtggacaaagtccaagtttgtattgtatagctaataaaatgaagattgcacgggtcagacagaaaataattatgactcaaaaacggcggaacataacatttgtagtcaaaacagcgacttatcgcacaaaactgaaaatactcggtgaaagtattgcaatctttttataacttatggaaccgccgattataaacaaagttatcacccggaagttaccaacacaaaaacgtacttcacatgtaaaccctgaacaaaaaaatcaattttttggggatgttttttttttgcactgcctgcctcaactcccaatgaattgtgaccttttcaaaagagtactttaaaactcaaacaaaaataacccttttgcacagtatttatcgtaaatttataaacattaacatactttgaggtatgtgaaagatgtcaacatttttgaatattcgaggtagcttttttttcctctaatggttaaatatctttctcagcttttgtgaatgtggtattttcttaaaataacatacatacatacgttttttaacaacaaaattaggcaaatcacatcactgtcaagggcaaatttagaatgcgaccagtttttggtgatgtattgcactggctggctatgtcgtcagcactgatctagactggcaattaatatccgtctttgtcaccactttagcggccaaaaatcgtaggttatttgctaattttacaaggaaaaacaattgtttttttcgcggatttttgtagacgtgtttttctttcacaacaactacggcgcagctgcggggttagggttgccaaggtcccgcaaatggctaaagattaccgcaaaatgtctttatttaatgtttgtccattaattataattattttggctataaaaaacaagtttgatggcttacagattgaatgtttattgcacaactatgatgttttaattaaaagtggtacgcaatgctatggtctggcaacgccgcgcaaacacctgtaacagctgtccgcgttgcgttgtgaatggtcaacagctgttagacttttgtttatttttgtgcttttctaatttttagagatcaatttgaagaaactagcgaaattcggcggagttaatgtcacggaaacgttaaataaccaagaacttgatgcctacgtaccgctaaacaagctgcgacgcgcgtcgattttcaaactgaagttacagcccgagctgcacgacaagtacaatgtgtttgttcgcgccgaaagaaaagcggatgtgtttctgggtgagttatagtaacaaaataacaaacaacctggcggtattgattgccacacagtactgagtccccgttagctaattaaatgctctgagactgggtttcggactgataagggcccgtgatctgtttcgtttgccccaatgaatacgaatctctactgataaccgcgcttcaaccttggatggaatcgtcagcgttgacgccatcatcgatacatttccatagggcaagaaaaacacgtgtgcgcaattgatttagaaattgttttctatttccctcacaggcgacatcatcaaacgcatcgacagctactacaaaaccggacaaacaaaggccaaatcagccaaacttcagtttcccgacaaggaaaaggacacggaaaagctagaggaagatgtggactccccgaagaacgaaatcgaaaccttttcggagcaggaaatccaaagttctcctaatctgaatcaaacgcttttagctcccagcactgggcagtcgagaagcaccctaaatgccatgcttctccagcgatgtggcacaaaaattgagttgggcattgaatcgaaactgctggtgatggctggtcaaacagctacgctactctttgaggtcaccaacatgaaaacggaaacggtttactccaccattcaagtcaccgacgagcggcgcttcttggttcaactgaatcctaccaggttggagcgcttaagagcgaagtctttggtttacacattatatatcttacgtacttctgcctttgtagattaagcctgcgcgcccaggagacggctacagtgcgtctgactgttctggtgcccactggcacagctcagggcaccacagaccggattaccttcaccaattacggtcgcgaaacatctactctggcggtaaatcttaaagtggtgactagcatagatgctcaggtatgtgaacagccgataacctgattatgaaagcataattgaaatgtttaaatataatttccaggactcaactggacctacactatcctgggagtttggcagccgctgtgattacctgacgcccgaatcccagaattgtggtgaacgtttttggactgtggatgtgaccgctcaggactggcagtcaggcatgatgcgtttgcaggcctcgccgccagagggtcttttctacagaaactattatactgctggtagcacagagcccctgaaggcaacctacatggcctcttgctgcgaaccaaaggtatcactcatcgctttcgatgcggccgggaaccagagaagcctcaccatcgatgtcagagatgtgtatttgaacgaggccgccattgcagccatttgccttggagtcattctcctgatcctgcttattgcagccctcatatggagcattgtgtggtgttgcagacggaggaagacaacgctggagctgcccacatatagatcccactccactaggagcatggagtagattgttgttatgttattgtgccaagttagaacctatgtggtctcgaagtctaataaaatgccatagaagtaccagatatacaatatggcaccgttttactaaatgtatgcaaatatttaggatacaattgtttgtccctgcataaactactgaaacgaagtgcaacttaaaaaaagtagtataaacaatgtcggtgatttcaaacgattaaatggacttaactaatgtcttatttaggaaaactattataatatatctatatatttgttcagctagtagtaggtatacatatttgtttaagccaaaataagtgctgacctgacccattcctctatacactgaaagtagtttatattaacttgatccgtgataaagtcaaccccagtttatgaagagggtaagaaggtcaagtgccttgccaggcttatcagcttatcattatagcagccgagcaacaggtgacccccactccgcgttagattcacgaacgtacggtgacccacttaccgcgattcaagatgccagcgatgaggacgggcgccgctggaggcgtggcatggaccacgggcggggcggctggcaggagctgcggcttgttggggaagtcgtcgaaactcaggccggtcacggaggcgctcagaagcggatttttaacgacacgcgtctggtttgcgttgttgtttacgcgagcggacacgtcacctttcgatctttccgacatattagcggccgatctggagctttaaattgggctaactcgatatgaagatgtgtgccaagtgcacagttgccttaggaattatttttatacacaggatattgacacccacgacggattaaaagcgttaaacccgagaaaacttccaggcaggcaatattctgcttctttccgcgcattggccattcgccatggaaagcttttaccagggctgcagcggatccagaaatggataggcaaaagctggtaatcaaaatatgcttataacatatatattcctagctagttttaactgggaaagagtatgaaatctccgtgactaccataaacaaattttcaaaaatccaaataaacagcaaaaatagccaaatattgcttttgctgcagccctaattctcggatattatttcgaattgcaatttgggaagaagaagagtgaagtagataaatcttgatgatttctgcaaatattagtttttaaataaaattaatggatttgtagaaactctgaccgtattaatcgagtttaggactacaagtgccgtaagccccgtcatgccactgttttaaaacaagtggaaaaccttagggtcaattttttttggggaggagaccacaacaaataacacccaccgaattaactacgattactcatcgccggaatgtctggaaatcctttcgacagcgacgaagatcaaagctcggccagtggagagatactagagggcttcctatgtcccatttgccgtgcggatctcaagtccatcgatgtgctcacggatcattttgcccgccagcatgcggaagaggaggatgccctaaaatcctttaaagatatctttaccaaggcgaaaaagaagatcctaaacccctttgaggatgaaaaaggtgcatctgtatcgtcgcccgcaggttcctcctcttcagcggctggcaagaatcccaatggcaacggagatcgcaatggacccagtaatgcccgctcccgtctaaatgtatttaactatatggccaggcagcagcctggtgctgagtgctcccacttcgagtactttcagtccattcgcaatcctcgcctggagcgatatgccagcgaaacaaacaaactaatcattcgtttgcaccgcctgcttaaggatctgccag

SEQ ID NO: 18524 - DNA, 6570 bp, DROSOPHILA
gaagttttctcgggtttaacgcttttaatccgtcgtgggtgtcaatatcctgtgtataaaaataattcctaaggcaactgtgcacttggcacacatcttcatatcgagttagcccaatttaaagctccagatcggccgctaatatgtcggaaagatcgaaaggtgacgtgtccgctcgcgtaaacaacaacgcaaaccagacgcgtgtcgttaaaaatccgcttctgagcgcctccgtgaccggcctgagtttcgacgacttccccaacaagccgcagctcctgccagccgccccgcccgtggtccatgccacgcctccagcggcgcccgtcctcatcgctggcatcttgaatcgcgaaccgaaatcattggtcaccgttggtcagccatcgagcattgacgatagcgaggcgctcgacgagattaacttgaataccagcagcgaggattccgttggcgcaggtggatcgagtccatatctaggagcaggcgatcaaaacgccaatcctctgttggaaccaccaacggaagctggaaacgattcgttgctgagccaggcggcctcctcctttactgccctgcctgcggtggcatccaatgtgttttccaccttctcgaagcggatctacgccggcagcagggagacctcggaggagcccaaactagacatacagccctcttacattcagcaggccagctacgttcagccagtagctccagtgccagctcccttttatgcagcaccgccagcggccgcaaacgaagtggtcgcccccgaaccacccaagttctacgcacctactgaggttccgccaccgaatgtaggagtccctgcaccaccgcctacatcgggaaatccaaacacatacagattcaccgccaggaagaagctatacgctcccattcctggattatccgagcagtccggacaacctgcacaacagccacaggttcctcaggctccccaagcggctccatcattccagacgccaccatatccaccacagctaacgtacgcagcaaaccctgctccctttgacatatcagcgcagccagctgcaattcccgcagaggaacgcaaatctggtggaggactcttctctttgaccagtctcgtgcccacaggagtgcttcaaaatatcacaggaattgttcaatcagccactgggcgaagcagtgaaccagaacacactaacgtccagcaagcaggaggctacctagacattacaacagcatcagcaccagctccatcgaccaacttatttggtggaccgaattcaacctttccgccgggaggaaattatttcgtaccgggagcacctccatcattaccctcaacaggggtagtaggccccccttcggtcggaaacttcttcgcgccggctgctccattgccagtagcacaaacagctgctccaccagctgtcggagccttcttcacatctgctgccccaagtgttacgccttcagtttttactccaggaacagttccacctcttgcaccgcagccttttcagtcagcaactgtaaaccaatctgcattgccaccaaacaatccgccgaccgcatctgcagtaggagaactctttgttccagcaccaacgacaatcgcccaaggaacttcacctgcagttccatttgttgacacacaagctgttccaacaatacctttaacagttccaccaggcaatcctcctccaacatcgacacttggaggattctttaccacaggtgaagttgcacctgttgttgcgccatttggaacacaagcgtcaccagcaacacaatctgcaggattctttaatccaggagaagttcgtcctaatgtcccgttagccgaacctgttccaactataccgattacatcatcaggtgttccacctataggattatttcctccagcaccggcacagcctggtgtccaaactgcttcaaatccgaatcccttgccaggagcagctgcaccgccaccagccgctgggcaagcttcatatcgtctccagaagggaactcgtctttacaagagtccattgacgccccaggaaaccgcaacatcttcgggattcgccgctcctctgccccccacatctgtaactccagcaatttttaatccattcggagcaccggcaccaggatctttcaattcagtaggccatctagagggtcaatccagccaaggagttcctttctttacgccgccagtgcagaatccaccaggacaagtagcggctccaactgttgctgttccgcaatcagcacctattgcccctccaccagggacatcaagcacaagtgttgctcctccgctaacagcatctatagccaatcctcctccaacatctggctttgcaagtgtacccctcttcgctgcaccaacaatatcctcaacgcctattcctttcttcaatcctcaaccaacaggagcagaagtaacaactggtttgagccaacaggaaaacgaagctacagcatcgacaactttggaaggtctagtgcaaggacctgctccaacactctctgcaagtcaattctttgatacgcccttgccaacaggaacccaaccggagaatcaagtagcaagtgtttcctcggaaagagaaaatcttgtacaggagccaatatcgaaccaaggaattccattctttgcgccgccgcaaacgaatatttttacaccacagcttcagcaagagttcatagcaccagcagaggattccaagcgatccgagattcaagaagaattcttatcagcaccaccacaagaatctaatctatcaaccgaacttagagaagatacacacactggtccacccgtaatcgaacccgttttggaagaaaccccagcaagtagctcggaatcgagtgttccgcccgcaagtaaggtagatcaagaagatatagtctacccagaaccatctgcgccggtggaacaagagattccattattcgttccagtgccaggtttgccgggactaagtcaggacataccactatatccaccaccaccaactggttccaccactgccagctcgatttttgctgcgccaccagtggcttcaagtgctccactttttgttcctgttcctggtcctccgtcggtttcatcgttattttccccctctcaagtggattctacttcttcgttatttgctccgccaccaacatctgcaaatacaacaatactaacaccggctccggatacgacttctacgttgtttgccaacaacataccaacaacaacaccatccataccagatatagttccaactacatcggctgagctggttgacgcacctcctggtttccagggatcatcagacgacaccgcaaccaatctatttcagggaaacaccgaaacccaaacagtttttagtccatttgcacaaactaaggctacacctttggttcaggaaacaaaacccgaattggttccacctccaattggattctttgcgccgaaaagcgagtcggaagttcttagccagccaccacttgctccctcgccactgcaaagcttcttcagcacagcaccagaaacagcaacaaccaccgacttcaatttcttcggaagcccagcacccggcagcgtgtttcctgatttgccagtgcagcagggaatcgcaccgccaccattggcacttgagtcaccgccacagaatagtgtgtccaatatagccacatctgctataggattcgatttgttaaaccagactcagcaagcttcaagtttagtcgaaaactcaaatcaaaattcaagtgtcaactctttcgacggctattttggtggtcctagtgcatctgcggcacaaacattcgcaaacgagacaactaatgcacttgttgctccagctataaactgcgatcccgtcaatttcttcgatcaggttcctcaaacccagtcgcaaatccagcaagcaaacgaggatcagcgcattcagaacttcttcaacaatccaccgttgcaggatcaacccgctgtaccaggtgaactcaaatacgacattgtccacagcggagtggctgttaagcagctgcaagagcgctcacagacgcccgtttcaaatcttgtcgagccaccttcgtctgcctgttcggaattctcgacccttgctccagcaccaacacaaaccgatcgccaatcgggcgacgatctactccaacagcatctgggcgaattgcccgaggatatcctcagagagcttagaatggcaagtgccagcagcgaaaagggccaggtggcgacgcctcccgtggctataccttactcaccagtggtggcccattggttctacaagcgcagcgtggacacaaagttcatctggacaccattcagccactatgattcggccttgttagaaaccagcctaaatcttgacgattccacattgattattcccgttgagggtggccgctacgatgtaaacatcaaggaacgtaccaagactcccgtttactgggagggaaaggccatcgaagtgcgacgctgctcctggttctacaagggagttgactccaagtatgttccatacaccgaggatacggctgcactacttgaagcggaatacaagcgatctgcggagactggtgaatggcatcagaagattatgctggccaatggcgaacaggtggtcttccacggacctacagtcatcgttcacttcctgccgcaacagaatgcagacacttggggagccagcacacagggttccatgcgtccgagagttgtcaagagggatctggatgatttcaccatcgagcaaggcgaatcgcagcgagtcgatcacctgcttttcatggtccatggcattggctcagcctgcgatttgaaaatgcgttccgtggaggaagtggtggatgacttccgggttattgcccagcaactagttcagtcgcactacaaaaactcaacagatatgggcctggtgggtcgcgttgaagttttgcccatctcgtggcacggacacctgcactccgaggagttaggcatcgacgaaaagctgaaatccatcactttggagtctattcctcgcttgcgaaacttcaccaatgacacgctgctcgacgtgctgttctacaccagtccgaaatactgtcaaaagatcatgaacacggtggcagatgcgcttaacgatgtctacctgaagtaccgaatgcggcaccctgaattcaatgggggagtttcgctggcaggtcacagtctcggctccctaatcctattcgatttattgtgccatcaggaaccgctcaaggaaagcgaggaagagaataaagagaatcccgaccaacttccccaaaagcaatcgagtcaaaaggtacagcttccaaccagcgatcctttgccgaaacaagtcagctatgcgatgggtccggagggcacgggacagcccgtgattacatatacacagctgatattccaccccaaaaaattctttgctctgggctcacccatcggaatgtttgtaaccatcagggggattgataagcttggtctcgactttcacctgcccacgtgtccgggtttctacaacatattccatcccttcgatccggtagcctatcggatcgaggcgcttgtcaatccggacatgaacggcattcgaccggtgttaattccccatcacaagggacgaaaacgaatgcacctggagctgaaggagacgatgacacgtgtgggtgcggacatcaagcagcgatttatggacacattcaagaccacgctggacagcgtaaactttttgaccacggtaacgaaggttaagaaggaagcggaggagtcgctggagaaggagacaagccagacttcatcgcaagcttttcaaaagcaaaccgaggatcaggacgagagttcagttgccagttcatcttgcaaactacgaaatcgcaccgattccaattcgacgacggcttctgaccctgagtttatagaacttgatttcccactgggtaagctgaacgactcaaaacgtgtggactacgtgcttcaggaagctccactagaattcatcaacgaatatattttcgccctgagcagccatgtgtgctactggggctccgaagatacgatccttttcgtgatgaaggagatttatgccagcctgggaatcagcacagacagccaggtgccgcagtcctcaatgaccatcgagcgacccgtttcgcatgagagcagtgttagccactcgctgttgccgatgtgagtccacaaaaccacacgagagctctgttggatccaacgatcccacgtaccgtatacaccataactatatataaatttagtaccaatttatttagatatgttatttgttagccgaatcatgcaaagaattttccatatgtgcaactccaacatggtaaaaggtattatcaaaataagaagtctttatcgtttgagtgacaaaaccgtagcaagttcttgagctttacaaaattacctatgtattgatcggattggcacccatgagacctatttgttatttttgtaatatcgcctgtgtaacaactaactttgtaacatttatgttaaacgaagtgtatgtctaacaaattttaaaataaataactaccattgttttc

SEQ ID NO: 18525 - protein, 2016 aa, DROSOPHILA
MSERSKGDVSARVNNNANQTRVVKNPLLSASVTGLSFDDFPNKPQLLPAAPPVVHATPPAAPVLIAGILNREPKSLVTVGQPSSIDDSEALDEINLNTSSEDSVGAGGSSPYLGAGDQNANPLLEPPTEAGNDSLLSQAASSFTALPAVASNVFSTFSKRIYAGSRETSEEPKLDIQPSYIQQASYVQPVAPVPAPFYAAPPAAANEVVAPEPPKFYAPTEVPPPNVGVPAPPPTSGNPNTYRFTARKKLYAPIPGLSEQSGQPAQQPQVPQAPQAAPSFQTPPYPPQLTYAANPAPFDISAQPAAIPAEERKSGGGLFSLTSLVPTGVLQNITGIVQSATGRSSEPEHTNVQQAGGYLDITTASAPAPSTNLFGGPNSTFPPGGNYFVPGAPPSLPSTGVVGPPSVGNFFAPAAPLPVAQTAAPPAVGAFFTSAAPSVTPSVFTPGTVPPLAPQPFQSATVNQSALPPNNPPTASAVGELFVPAPTTIAQGTSPAVPFVDTQAVPTIPLTVPPGNPPPTSTLGGFFTTGEVAPVVAPFGTQASPATQSAGFFNPGEVRPNVPLAEPVPTIPITSSGVPPIGLFPPAPAQPGVQTASNPNPLPGAAAPPPAAGQASYRLQKGTRLYKSPLTPQETATSSGFAAPLPPTSVTPAIFNPFGAPAPGSFNSVGHLEGQSSQGVPFFTPPVQNPPGQVAAPTVAVPQSAPIAPPPGTSSTSVAPPLTASIANPPPTSGFASVPLFAAPTISSTPIPFFNPQPTGAEVTTGLSQQENEATASTTLEGLVQGPAPTLSASQFFDTPLPTGTQPENQVASVSSERENLVQEPISNQGIPFFAPPQTNIFTPQLQQEFIAPAEDSKRSEIQEEFLSAPPQESNLSTELREDTHTGPPVIEPVLEETPASSSESSVPPASKVDQEDIVYPEPSAPVEQEIPLFVPVPGLPGLSQDIPLYPPPPTGSTTASSIFAAPPVASSAPLFVPVPGPPSVSSLFSPSQVDSTSSLFAPPPTSANTTILTPAPDTTSTLFANNIPTTTPSIPDIVPTTSAELVDAPPGFQGSSDDTATNLFQGNTETQTVFSPFAQTKATPLVQETKPELVPPPIGFFAPKSESEVLSQPPLAPSPLQSFFSTAPETATTTDFNFFGSPAPGSVFPDLPVQQGIAPPPLALESPPQNSVSNIATSAIGFDLLNQTQQASSLVENSNQNSSVNSFDGYFGGPSASAAQTFANETTNALVAPAINCDPVNFFDQVPQTQSQIQQANEDQRIQNFFNNPPLQDQPAVPGELKYDIVHSGVAVKQLQERSQTPVSNLVEPPSSACSEFSTLAPAPTQTDRQSGDDLLQQHLGELPEDILRELRMASASSEKGQVATPPVAIPYSPVVAHWFYKRSVDTKFIWTPFSHYDSALLETSLNLDDSTLIIPVEGGRYDVNIKERTKTPVYWEGKAIEVRRCSWFYKGVDSKYVPYTEDTAALLEAEYKRSAETGEWHQKIMLANGEQVVFHGPTVIVHFLPQQNADTWGASTQGSMRPRVVKRDLDDFTIEQGESQRVDHLLFMVHGIGSACDLKMRSVEEVVDDFRVIAQQLVQSHYKNSTDMGLVGRVEVLPISWHGHLHSEELGIDEKLKSITLESIPRLRNFTNDTLLDVLFYTSPKYCQKIMNTVADALNDVYLKYRMRHPEFNGGVSLAGHSLGSLILFDLLCHQEPLKESEEENKENPDQLPQKQSSQKVQLPTSDPLPKQVSYAMGPEGTGQPVITYTQLIFHPKKFFALGSPIGMFVTIRGIDKLGLDFHLPTCPGFYNIFHPFDPVAYRIEALVNPDMNGIRPVLIPHHKGRKRMHLELKETMTRVGADIKQRFMDTFKTTLDSVNFLTTVTKVKKEAEESLEKETSQTSSQAFQKQTEDQDESSVASSSCKLRNRTDSNSTTASDPEFIELDFPLGKLNDSKRVDYVLQEAPLEFINEYIFALSSHVCYWGSEDTILFVMKEIYASLGISTDSQVPQSSMTIERPVSHESSVSHSLLPM

SEQ ID NO: 18526 - DNA, 3875 bp, DROSOPHILA
aaagaaattaatggatttgaatggtattttagtatagggattaggcgatattgatctcacattatccatggtgcccagctccccgatggccagaattgtttttaggtgagccctttgtccacaggcactgcgcataaggaccacctcgttgtacatggcctcccagtcgccaacgagggccaactggcgattgatcacaatgtcgatctctgtggctccagcaagaatggcgtggctgatctcctgcaggcgggtctgcaggccgtactggcccgtgggaaatcccgtggccaccgctgcaatagccaccttatccagtttgtcgtactgttggatagctaaataggcgtcctttaccctggcgggataaacgcaaacggcggccgtgtgcatctctgggatgagagcccggtcgaagaacttgtcaaagaactgcggctcgaagggatagcaggcgcgtaggcatagtctccgcacattggcagccgtatcatcgcccgccaaggtggtaagatctgtcagcatcagagccctcagcgcccaggcgatttcgttggctccggtgacatggcatcgctgggacaccgtcaaagcgatctcctcgacctgccgcagcgagatgtttaccttaagcagggagggatctgcgaaatatatatgtatatatttaaattcgtactattgtgcgaattcttaccatagggcagggttttgtttacttccaattccttcacatccatgctgctcattgctgtcaaacgaaaatttagctgactaaattccacttgaagataaaatcgttcgatcgccgatcttgacctctaatcttctactcaacctcaaccgaagaacatggagagtcttatcaatttgcttgttggacagctgatgacgacgttgccagaccgttcgcattaactgataatttatgagatggattccgttaaaagatcaccgatattaacaataagtaaatttgttatgtaaaactccacagcttgctgtttaataaagccaatcgcttaggtaactttgtctattttttattgtcttaatacttgcgaaatacacctaattttaatattgcattttcgatatgaaatttgtaagtacaagatattgtgaattttaaaataccgcgtcagcgaggtagaaaacatgtaatttttatagcgctaattgaactactgctttgtgacaaggggttttcatcgatgtttggcccactgctcccagtactccctcttctgcatttcatagagtcgagatagtgtgcgatcaaaggcgaacagctcttcctcgccggtgaaaaaactggctttggattctttctgtaaacaaaaacgtgttgattttaatggtagaagaatgagttactaacttactatatttagatcgtccattagggttcgctcagaatcggacagagttttggaacctccagtaaagctgaacaagttttccagcgcaacgtcggatgatatcaccacacgcactcggttattgtaaagggtatctatgagcgtgataaatcgtcgcatctgtgccttcacatcaagggtcagctggggcacatctcggatgaggacggtgtgaaagaattgcgatatctgtaagaaatcactgccagccaaaggctaatgcggaatatgttgagtatgggtaagattatgtattaatactttgcttacgcgatcacagagttccgagaaggtgctgtccagtacctggccacacgtgcgattgaaggtcagatctcttccgaaatgagtcagggttcgcggccggataatatcgttttcttcggcgcacaggatcttgaacatgcgattcatactgccgtccgcatccgtttggcctttgacgaagtagttggtgtcaccagattgggctatacgtcggtagtcaatagaatccaactgggacaccttacagcgacgctgaagtaacgcaatgaagggcagaaagttcgtgcgctgcagtccgttcttgtacagatcctctggatgccgattgctggtggccacaaccacaatgccatggcggaaaaggtgcgtaaacaatctctttagcaccatggcgtcggctatgtccgtcacctgaaattcatcgaagcaaatcaaccaggactcactggcaatcaggtcagcaaccggttttgtgggatcaaatggtgctggtttttcagaattaaaggcacggtcaacaggtccttgtctctgcttggcctcgtggatgcgggtgtgcacggtgttcatgaacgaagtaaaatggacgcgctgctttcgatgaatctgaaagtcacaagtcatgtgaatatgggcctcgagaaatactcattcatcacttacttgggtacagcagtcgaagaacaggtccatcagagtggtcttgcccacacccacgctgccgtacaggtacagaccctgaggagcgtgactgccagcgttaggatcatcctgatcgtcatcttcggtggaagatttcctaccaaagattgaactgaagaatcctccgccgccaccgcccgccctgtagctgggtttatacccctgaatcttgtggtacagcgcatccagctccttcatcgtctgcagctgcctgttgtcggtcatcagttggccagaactaacacgcttctcatattccttcagcggactgagaccgctcatgtggcaggcgggcgcccataggagcagcggcttctgccgcgcacagcggaccacaagccccagttggtaggtgaacatagcagagtgccacaattagcgcttaactaggagctaaatccgcgtcatctagacattacataaaactagagacctcacttccgcgaattttgaccgcgaatttcggttgttggccgtgaaattttcccaaaccagggctggaaacaacaacagctgatctgacagctgttcgcacggatgccataaggttgcaagagctgccagattattttgagcaaccgcattttaaaatttaaaattgctaaaatttgctaacaaaaaatggacagtaagaaattaatactttagggcttattttaaaacggttttttgaaagattttcgaatcaatagaataaaatttaattccacagagcaaaaatatttcttaagcctttgaaaaaattttagattgttttctaatagaataaaagataaacaagaacacaataaatatgaactcctaccgatttaacaattaaccgtgaacgacaataacaaaccttgggctacgtaaacctctaatcaggaatgcgaggtaacaaaaggatttacagcccgtaaatcttgttatggcacgttttaaatctgatgagtaatagaaacaggcgataatcgaattactgtggcacttcctgcacttttgtttagattgcgtgatttgtgttacagataccagtcaggtgctttgtattggcagaattttcctattacgacatatacatatatatgttttacagtggtaactagggattctcatttgcttcgatttagcagtgaacgatgaagattagataggtgcatttttgaatgccacttacatatttactccacttttaattattccctaattccctataaatgcagttaagtggattaagtatgtggtattagcgggaaaatctgtttcaaagctggttttagtctactgttaaactttcaaaacaaagcattggattgatgtatttttatggtaattgatgtattttgaaggtatggggatcctctacactttaaagcaggttataaaatagtcatgcccagggtaaatctatttgtgcactatctttagcagtcacagataagatggtacaggtgttagccacttgcattgaatccactcaaggtgtctatcgaaactggaatc

SEQ ID NO: 18527 - DNA, 1710 bp, DROSOPHILA
aaaatttcacggccaacaaccgaaattcgcggtcaaaattcgcggaagtgaggtctctagttttatgtaatgtctagatgacgcggatttagctcctagttaagcgctaattgtggcactctgctatgttcacctaccaactggggcttgtggtccgctgtgcgcggcagaagccgctgctcctatgggcgcccgcctgccacatgagcggtctcagtccgctgaaggaatatgagaagcgtgttagttctggccaactgatgaccgacaacaggcagctgcagacgatgaaggagctggatgcgctgtaccacaagattcaggggtataaacccagctacagggcgggcggtggcggcggaggattcttcagttcaatctttggtaggaaatcttccaccgaagatgacgatcaggatgatcctaacgctggcagtcacgctcctcagggtctgtacctgtacggcagcgtgggtgtgggcaagaccactctgatggacctgttcttcgactgctgtacccaaattcatcgaaagcagcgcgtccattttacttcgttcatgaacaccgtgcacacccgcatccacgaggccaagcagagacaaggacctgttgaccgtgcctttaattctgaaaaaccagcaccatttgatcccacaaaaccggttgctgacctgattgccagtgagtcctggttgatttgcttcgatgaatttcaggtgacggacatagccgacgccatggtgctaaagagattgtttacgcaccttttccgccatggcattgtggttgtggccaccagcaatcggcatccagaggatctgtacaagaacggactgcagcgcacgaactttctgcccttcattgcgttacttcagcgtcgctgtaaggtgtcccagttggattctattgactaccgacgtatagcccaatctggtgacaccaactacttcgtcaaaggccaaacggatgcggacggcagtatgaatcgcatgttcaagatcctgtgcgccgaagaaaacgatattatccggccgcgaaccctgactcatttcggaagagatctgaccttcaatcgcacgtgtggccaggtactggacagcaccttctcggaactctgtgatcgccctttggctggcagtgatttcttacagatatcgcaattctttcacaccgtcctcatccgagatgtgccccagctgacccttgatgtgaaggcacagatgcgacgatttatcacgctcatagataccctttacaataaccgagtgcgtgtggtgatatcatccgacgttgcgctggaaaacttgttcagctttactggaggttccaaaactctgtccgattctgagcgaaccctaatggacgatctaaatataaaagaatccaaagccagttttttcaccggcgaggaagagctgttcgcctttgatcgcacactatctcgactctatgaaatgcagaagagggagtactgggagcagtgggccaaacatcgatgaaaaccccttgtcacaaagcagtagttcaattagcgctataaaaattacatgttttctacctcgctgacgcggtattttaaaattcacaatatcttgtacttacaaatttcatatcgaaaatgcaatattaaaattaggtgtatttcgcaagtattaagacaataaaaaatagacaaagttacctaagcgattggctttattaaacagc

SEQ ID NO: 18528 - protein, 458 aa, DROSOPHILA
MFTYQLGLVVRCARQKPLLLWAPACHMSGLSPLKEYEKRVSSGQLMTDNRQLQTMKELDALYHKIQGYKPSYRAGGGGGGFFSSIFGRKSSTEDDDQDDPNAGSHAPQGLYLYGSVGVGKTTLMDLFFDCCTQIHRKQRVHFTSFMNTVHTRIHEAKQRQGPVDRAFNSEKPAPFDPTKPVADLIASESWLICFDEFQVTDIADAMVLKRLFTHLFRHGIVVVATSNRHPEDLYKNGLQRTNFLPFIALLQRRCKVSQLDSIDYRRIAQSGDTNYFVKGQTDADGSMNRMFKILCAEENDIIRPRTLTHFGRDLTFNRTCGQVLDSTFSELCDRPLAGSDFLQISQFFHTVLIRDVPQLTLDVKAQMRRFITLIDTLYNNRVRVVISSDVALENLFSFTGGSKTLSDSERTLMDDLNIKESKASFFTGEEELFAFDRTLSRLYEMQKREYWEQWAKHR

SEQ ID NO: 18529 - DNA, 4286 bp, DROSOPHILA
gcactataaactaaataaatgaattaaaattttaacgttaagccgaccgcttaaaatcgaacaacacagatttacatatatagtagtgcacattttaccgacttattgcatattcaacattatttgtccatataatttaacaaacaaaattggcttattaaaccggaagcaattagaacacaatcctagccattttaagggctaatagcgggcagcactggggggaattaacaatgagccagcaacgatgttaactgaaaaatgcttttcgcctttgctgagctgcgactgaatgccggggatttggtagtgggtttgagtttcgggctgggagccacagatgcagttggatctaaagatgggagttttgcggacgggtcggcggttagtttaccaccgcccacccggccatctacctgctcccccaacccatcgctttgtcaaccaccatggtgcagtgaacccgccgcgccgctaagtatgcaacacagaactgaagtttaattgggagcaaaacccatcgaaacattccagcggcagacgaaggtattttactagcggatatttctttattgctggtgcatatctgcgtgatacaatatatctttattaaaaaaagagagaagtttgctacatgataagagtatttgctctcgcaacagctggtgcgcaataatattcattgatggttaagtatttgttggtagcttacattgagtacagctgtgcttgaaataattgtattaaattattcaattattatttgaaaccctttaagcaatatatcaaaaggccaaattgaaatatgtagaaacacagatatttgaagcacataaaaatgttaaatacatttttttttaaatttttttggttattgttttgttttgttaattccattacatttctcgttcaaggactggcaattggcataacttaaacataagccactacataacttttttttttaaatattttgttactttttgttactatttaagcttcagggcatgtactgagaatgatcataagttgtccaggaatttttcgttttgcttgtatatccatagtcgggtacaactttgggtgttttataatagttctttgtgttgagggagtagtcctgaaaaagcgtttttgtgaaagtgcaatcaatgatgctagttttttagagactttttagagactaaccttttcgtgttttctttgataaccacccaaaggatttggtcctgcggactcctccgccggtttcactttcagcaccgccgaagtgggcgtgtctccgatccttggattgtgggattttaaactcagtttcagatctattttgggtggcggctcctgacggattttctcctcgatttcgtaaagctcttgctgaaatttattcacattttagatggaagttgattggaatattctattggcataatttacgcgatttttatagaccatgcagcaggctcgcagcgtaaaataatatataatctccacacccgaaagcagtgaaaatccaagaaaaaggctggcaattccgccaaaggacaccaacagatcaacccagccgaaaaggacctcacgcttatagcgaataatcggccaggtgagaaactcgaccagcacacctaagctctccggtcgatccgacctgaaattacatcatacatcattacatcctctggttacatcatagatacacctatttggaaaaactaacattttgatcagcttatcgatgttgaaaacggttttcgagcaactgagctcgcattgcaggcaatccttgatgttcgtaatgttgctcttaaactcatcgaggcaatcgaagtccttgatcgagcacataggcacattagctttcggcgttaaatataataataatatgtatgcaataaggtttgtaaatatgttaattacacatgacaactcacgtatgggtttataaaagggcggattgcacttgcacaacttgatggccttgttcatgcgacactgcttcatgcaggaggagaatgtgtaggcgtctggaaaataattgagcttcacctcgtcactgaagatgcatttcctctggccaatggacagctggcgagcatcgtccgtggtgtaggtgttcttcttggatatcctcacctccaccaactggggttccgaccaatcgatctgagcattgaaatccgaaccgaagtactcctcgttggaaaagataaagatctgaagatgtgttattcaaattcattattatgcgaaatatacttgtataggaacttttatattgggataactactatactagtatatagtagtatatggttatgaacaacttacacgtgaagtgctgttgggtatgaaaaagagcgcccacttcttgtcggtttcgtagaggtcatgaggtgctccggtcttaacgctacacaacaaagtacatatacttaataaaacgcagatcaaattggattccgattccgcgaaacttactcttcagtgggcgtggacttgaaacgactgttgaaggcgtagcaaaagccgtgctccgtgtaaattggttcgaagtggtcgcaacagggtatgtcctcgtcgcgatacttgcaggacacgaagacgttcttgcagtcgatgtgaccctcgaaagcccactcccggatggtgtgcgcatctagcaggttttgcggaatcgactgcgacagcaccttggcgtcccgaacgttctcgaagttcagggaggtcaaaatccgcagaaacggggtatacatttgggcctgggcctcatcgtagttactgtaatcacaaaatgtcatacacttaatgtaaatcaacatatgtatgtacataaaagtagttgcattattgcgtaatgtttaaagaaatagtttcaatctataagatatttatgatatctccgtactcacgccagtgtattgtaaaccttctcgtaggtcttgtcgtggtcaaacgccgcctccggacagacgacggtggtggggaagaccacgttctggttgtggaagtcggtgtcgaggccagtgattgtcggattggtctggaacttctcccagaggctcataatgatgaccagcgcggtgaccgctcctatggatgtgaagcagaaccacatgaacttctcgccgataggtcggcccgattcggcaatatatcgcactccgtggagcgtcgagttctggaagaactccttcgtctggtagatgaggctgcgccgaaagatgaccaaagtctcgaggaagcgctgcgtcctggactccggcggatggcgtttctcttgcggcatttccgtttcaggaacattgctcgccgacgcggcttggtagtgaactcaaaactgatgccctagcatcggatccaaagtcaacattacgactgaacccagggaaatacatcgaatgccaaatcgatgcgtgtatcattagtccacctgcgtgtggttccatttgcaggtcctaaaagcctttcattgttcacgtaatgccgtttgcatgcgtctgattgtttttttggattgtggtagttaccagggactatctagatctttgtaccctaaaacaataataggtgaatattaatgaaaggttttttaattacaaaatattgtaaaaatcaagatacaaattctaagtcatagaaaatgtaaaatgataatataagctaatgaaacccttttcatttaaaatacaattaatatttaaactatctttaattcaaataagctcttagaataaaatataagcaaagaaaatagttttatatcagatcagcgtatttttaaatgcatttcagtaatgagtccaccaacttttcgtaccgacatcgactagattggggtcagtgatatggctaaagtcctgcgcaattgtgggttagtccagttaccgaatgcagctgccttggatggattgatgactggctggttggatggcttgaaggcttgatggattgctggctgcataaatggctggctaattggtcggggctgtctgaacagcttccggcgccgccttgcattccgcaaaaaaaaatcacatattcctttatagggatagggctgtgctggccactccaccgaaagccacttcactccaaggatcggaggaacttcacaagttttgtgtgaaattctgacacggcccggactctctttgttcgctctttcgcctctcttttcccttttttattcatatgatttgtttatttttattattatttttttttttttgtttgcaatcgttaagtgttctcaagtttcacaaagcgtcgaggaatgggttttggat

SEQ ID NO: 18530 - DNA, 1701 bp, DROSOPHILA
atgccgcaagagaaacgccatccgccggagtccaggacgcagcgcttcctcgagactttggtcatctttcggcgcagcctcatctaccagacgaaggagttcttccagaactcgacgctccacggagtgcgatatattgccgaatcgggccgacctatcggcgagaagttcatgtggttctgcttcacatccataggagcggtcaccgcgctggtcatcattatgagcctctgggagaagttccagaccaatccgacaatcactggcctcgacaccgacttccacaaccagaacgtggtcttccccaccaccgtcgtctgtccggaggcggcgtttgaccacgacaagacctacgagaaggtttacaatacactggctaactacgatgaggcccaggcccaaatgtataccccgtttctgcggattttgacctccctgaacttcgagaacgttcgggacgccaaggtgctgtcgcagtcgattccgcaaaacctgctagatgcgcacaccatccgggagtgggctttcgagggtcacatcgactgcaagaacgtcttcgtgtcctgcaagtatcgcgacgaggacataccctgttgcgaccacttcgaaccaatttacacggagcacggcttttgctacgccttcaacagtcgtttcaagtccacgcccactgaagacgttaagaccggagcacctcatgacctctacgaaaccgacaagaagtgggcgctctttttcatacccaacagcacttcacgtatctttatcttttccaacgaggagtacttcggttcggatttcaatgctcagatcgattggtcggaaccccagttggtggaggtgaggatatccaagaagaacacctacaccacggacgatgctcgccagctgtccattggccagaggaaatgcatcttcagtgacgaggtgaagctcaattattttccagacgcctacacattctcctcctgcatgaagcagtgtcgcatgaacaaggccatcaagttgtgcaagtgcaatccgcccttttataaacccatacctaatgtgcctatgtgctcgatcaaggacttcgattgcctcgatgagtttaagagcaacattacgaacatcaaggattgcctgcaatgcgagctcagttgctcgaaaaccgttttcaacatcgataagctgatcaaaatgtcggatcgaccggagagcttaggtgtgctggtcgagtttctcacctggccgattattcgctataagcgtgaggtccttttcggctgggttgatctgttggtgtcctttggcggaattgccagcctttttcttggattttcactgctttcgggtgtggagattatatattattttacgctgcgagcctgctgcatggtctataaaaatcgccaagagctttacgaaatcgaggagaaaatccgtcaggagccgccacccaaaatagatctgaaactgagtttaaaatcccacaatccaaggatcggagacacgcccacttcggcggtgctgaaagtgaaaccggcggaggagtccgcaggaccaaatcctttgggtggttatcaaagaaaacacgaaaaggactactccctcaacacaaagaactattataaaacacccaaagttgtacccgactatggatatacaagcaaaacgaaaaattcctggacaacttatgatcattctcagtacatgccctga

SEQ ID NO: 18531 - protein, 566 aa, DROSOPHILA
MPQEKRHPPESRTQRFLETLVIFRRSLIYQTKEFFQNSTLHGVRYIAESGRPIGEKFMWFCFTSIGAVTALVIIMSLWEKFQTNPTITGLDTDFHNQNVVFPTTVVCPEAAFDHDKTYEKVYNTLANYDEAQAQMYTPFLRILTSLNFENVRDAKVLSQSIPQNLLDAHTIREWAFEGHIDCKNVFVSCKYRDEDIPCCDHFEPIYTEHGFCYAFNSRFKSTPTEDVKTGAPHDLYETDKKWALFFIPNSTSRIFIFSNEEYFGSDFNAQIDWSEPQLVEVRISKKNTYTTDDARQLSIGQRKCIFSDEVKLNYFPDAYTFSSCMKQCRMNKAIKLCKCNPPFYKPIPNVPMCSIKDFDCLDEFKSNITNIKDCLQCELSCSKTVFNIDKLIKMSDRPESLGVLVEFLTWPIIRYKREVLFGWVDLLVSFGGIASLFLGFSLLSGVEIIYYFTLRACCMVYKNRQELYEIEEKIRQEPPPKIDLKLSLKSHNPRIGDTPTSAVLKVKPAEESAGPNPLGGYQRKHEKDYSLNTKNYYKTPKVVPDYGYTSKTKNSWTTYDHSQYMP

SEQ ID NO: 18532 - DNA, 3669 bp, DROSOPHILA
tcaataaagatggcattgtgctcgtctctgagactcgagatgcgtccgctgagaagagccgtgaagaaggtgtccgggatccacgtaagcgtttgccgcgacgtggaaaagctatggatagtgagatggagtttgcatgcgtcatcaatgccgttagtgggccgtaatgtgttggttctttgttcttaccgctgaccacccacattgaggttgaccaggtcgctgctggaggcatgcgtgaagtgggacatggcaatccgatgacccgcgggctgccgcagcagcggacggtggggattgctctaaatgcgcctctatttgtgtggcttccgtgctcccagcgctccaatcagcaactgatatggcggagcagtggcagcggcgtcagcggagcagataactcgcgatttcggtacccaacccacttgacgtgcgctgcggggtgcaatttattcgattaactctttgtgccaggctatttatttatttattatttgttgcactgcactgtagaaactagggatgggcaaattggtcgtgactgttcccagccatgacgagtcactgtttacggggggtccctgttgcatttagttgttttgctgaactttccacttttgattttgtatgtgttaactcaccaaggtttttgatggtttccaaacaacaattcatcattaaaaaataattaatatagaaataaaattaatttgggcatcagaaagtatatgcatttccacaattataagcaacgatatttcttgtgaagcagtgtacatctctaactctcggttaaattcccatgcaatacggtcataccaccttttcgtcaagcaacggtttatttcgcttggtggtaaatttgaaaatattgtaaagttatgacttgtattaagcatcaaaacaaaaagctcatggatcttgctgtcacactctgagcctttggaactacgctttagtttagtttcggacaccactcaaaatttcgaaaaagcccaaaatgccggcggcgaagtgcggttgtttgaagaaggaggctcgcgtccatgtcatctacgtgggtggaaccatcggaatgatccgcaacgagtccggaggtgggtatatcaatggctcttgtccgtgtactaatcaattgtttctcatcagtactgcacaccgcgcccaaggtgctggctcggcagcttcaagagtttcccagctgccacgacaggaattacaccagcaaggataatgatggtcccatgatggtgctacccgcagtgtctggagctccgtatagagtcctttacgatttgattgagttctgcccactgatggactccagctgcatgggcttctgcgactggaagcgcattgccaacgaagtgggagtaagttgagagtcgaggatcatcaggttaatacaaaatatgcaactaacttttttcgcagaagacatacaagtcctacgacggctttgtgatcctccatggaacggataccctagcctactccgcctcggcactagcgttcatgcttgagagcctgaacaagcccgtggtattcactggggcacagattccgatctttgaagcccgcagcgatgggcgggagaacttcttgggcgcacttctcatagcaggaaattacagtatacccgaagtgctggtcttcttcggcaacaagattctacgtggctgtcgctccacgaagctcaattctgactcttttcacgcactggactcaccaaattttgcaccattgggtcgggcgagtgtcaacattgagatcaacagccgccaaatcttccgaccgtgcaatattaaaccattttcacttcattcggaactcgaaaagaacgtggcgctgctgcgtatttacccgggaataagtgccagtgtggtgcaggcaatcctgaaagagccaacgaaaggtgttgtcctccagacctttggggccggcaattttccggttaatcgtgaggacttgctggacgaactgagggaggcggttcacagaggcgttattattgtcaacattacgcagtgctcggcgggcatggtggccaacatttacgagacaagccagggtctgatggaagtgggcgtaatacccggctacgatatgactcaggaggcagcctttaccaaactggcctatgtgctgtccaagccggagtgggacattcccaacaagaagaaggtgatgctactaagtttgcgcggagagctgaccaccaataaggttgccaagattaacgacattgatctgatcgagggcgtggcccgcacattgcacatgtcgacggcgatggaacggcagcagatgtgctccacattctatcccgctttggtggcggccgcggtcaccgaaggtgatgtccacaagttgggcgatcttaagcagtacggcgccaatctgtgcgacaccaactgcgatggtcgctccgccatgcacctggcctgcttcctgggcaaactgaactgcgtttgctttctaatttccgccggctgtccggtaaatgtccacgatcgattcaaccgcacgccgttgcacgaggccatcgacacggacaaccatgatataatcaacgctctgctcaagaacggcgccaagctgaacgatcagccgctggtccaggcggagctactacgtgcccttaccgagcggggcaagatcaagcgattggagtcatttcggctagccggagccaatctcacgctggctgatcggactggacgaacggctctgcactacgcctgccagttaggtaatcacgaggtggtagactatctgctgccgcactacgagaatccctacatcaaggatgagctgggcatgtcgccaatcgactacgccaaggcagccaatcatgcccacatcctgaccctgatgcgtttcaaggagaaggagctggccaagaaagatccgtgttcctgcacgcaatagaagcacttttagcaatgtctgtttctaaattccaaattaaaaacttatctcaacctcttttcttaatttttttttgtcaaatttcaaatattagcttataccttgtgtatataatataagtatgtatatttagttgtttgtccaagtcaagggcgacgttatttgcttgcataggtaacacattaaaatcaatttctacatagtatagtcgcacgtcgaggacgcacttaaatttttgttagtaaaacaatacaatcggatgttcgtatatttcatatagttgaatatagaatatagtatgcagtatttatgtggttatttgatccgtacagcgataaatggcctacgatggtgaaccgttgcggaaaacacgggcaaacaaatataaataaaatgtaaggcaataaaaacaaaatacttaattcacacacgcagttatcggataatgtcatctatgcaatagttatgggttttgcgttacttacacctaggctactacagacttaaattataaaaatgattcgcataattcgaatactcggcccgaagacaaactaaatactaaacttttcatcaacttactgaactaaaatgacacatggcttgtttctatttctcgcttaagtttgagctacaaatttgttctacaacatttagacatgaaatattgcttggtattttacgcttggtaaaaggcttttgattttgtatgttgtccgtgtgctgcatccgtagaat

SEQ ID NO: 18533 - DNA, 2547 bp, DROSOPHILA
atgccggcggcgaagtgcggttgtttgaagaaggaggctcgcgtccatgtcatctacgtgggtggaaccatcggaatgatccgcaacgagtccggagtactgcacaccgcgcccaaggtgctggctcggcagcttcaagagtttcccagctgccacgacaggaattacaccagcaaggataatgatggtcccatgatggtgctacccgcagtgtctggagctccgtatagagtcctttacgatttgattgagttctgcccactgatggactccagctgcatgggcttctgcgactggaagcgcattgccaacgaagtgggaaagacatacaagtcctacgacggctttgtgatcctccatggaacggataccctagcctactccgcctcggcactagcgttcatgcttgagagcctgaacaagcccgtggtattcactggggcacagattccgatctttgaagcccgcagcgatgggcgggagaacttcttgggcgcacttctcatagcaggaaattacagtatacccgaagtgctggtcttcttcggcaacaagattctacgtggctgtcgctccacgaagctcaattctgactcttttcacgcactggactcaccaaattttgcaccattgggtcgggcgagtgtcaacattgagatcaacagccgccaaatcttccgaccgtgcaatattaaaccattttcacttcattcggaactcgaaaagaacgtggcgctgctgcgtatttacccgggaataagtgccagtgtggtgcaggcaatcctgaaagagccaacgaaaggtgttgtcctccagacctttggggccggcaattttccggttaatcgtgaggacttgctggacgaactgagggaggcggttcacagaggcgttattattgtcaacattacgcagtgctcggcgggcatggtggccaacatttacgagacaagccagggtctgatggaagtgggcgtaatacccggctacgatatgactcaggaggcagcctttaccaaactggcctatgtgctgtccaagccggagtgggacattcccaacaagaagaaggtgatgctactaagtttgcgcggagagctgaccaccaataaggttgccaagattaacgacattgatctgatcgagggcgtggcccgcacattgcacatgtcgacggcgatggaacggcagcagatgtgctccacattctatcccgctttggtggcggccgcggtcaccgaaggtgatgtccacaagttgggcgatcttaagcagtacggcgccaatctgtgcgacaccaactgcgatggtcgctccgccatgcacctggcctgcttcctgggcaaactgaactgcgtttgctttctaatttccgccggctgtccggtaaatgtccacgatcgattcaaccgcacgccgttgcacgaggccatcgacacggacaaccatgatataatcaacgctctgctcaagaacggcgccaagctgaacgatcagccgctggtccaggcggagctactacgtgcccttaccgagcggggcaagatcaagcgattggagtcatttcggctagccggagccaatctcacgctggctgatcggactggacgaacggctctgcactacgcctgccagttaggtaatcacgaggtggtagactatctgctgccgcactacgagaatccctacatcaaggatgagctgggcatgtcgccaatcgactacgccaaggcagccaatcatgcccacatcctgaccctgatgcgtttcaaggagaaggagctggccaagaaagatccgtgttcctgcacgcaatagaagcacttttagcaatgtctgtttctaaattccaaattaaaaacttatctcaacctcttttcttaatttttttttgtcaaatttcaaatattagcttataccttgtgtatataatataagtatgtatatttagttgtttgtccaagtcaagggcgacgttatttgcttgcataggtaacacattaaaatcaatttctacatagtatagtcgcacgtcgaggacgcacttaaatttttgttagtaaaacaatacaatcggatgttcgtatatttcatatagttgaatatagaatatagtatgcagtatttatgtggttatttgatccgtacagcgataaatggcctacgatggtgaaccgttgcggaaaacacgggcaaacaaatataaataaaatgtaaggcaataaaaacaaaatacttaattcacacacgcagttatcggataatgtcatctatgcaatagttatgggttttgcgttacttacacctaggctactacagacttaaattataaaaatgattcgcataattcgaatactcggcccgaagacaaactaaatactaaacttttcatcaacttactgaactaaaatgacacatggcttgtttctatttctcgcttaagtttgagctacaaatttgttctacaacatttagacatgaaatattgcttggtattttacgcttggtaaaaggcttttgattttgtatgttgtccgtgtgctgcat

SEQ ID NO: 18534 - protein, 605 aa, DROSOPHILA
MPAAKCGCLKKEARVHVIYVGGTIGMIRNESGVLHTAPKVLARQLQEFPSCHDRNYTSKDNDGPMMVLPAVSGAPYRVLYDLIEFCPLMDSSCMGFCDWKRIANEVGKTYKSYDGFVILHGTDTLAYSASALAFMLESLNKPVVFTGAQIPIFEARSDGRENFLGALLIAGNYSIPEVLVFFGNKILRGCRSTKLNSDSFHALDSPNFAPLGRASVNIEINSRQIFRPCNIKPFSLHSELEKNVALLRIYPGISASVVQAILKEPTKGVVLQTFGAGNFPVNREDLLDELREAVHRGVIIVNITQCSAGMVANIYETSQGLMEVGVIPGYDMTQEAAFTKLAYVLSKPEWDIPNKKKVMLLSLRGELTTNKVAKINDIDLIEGVARTLHMSTAMERQQMCSTFYPALVAAAVTEGDVHKLGDLKQYGANLCDTNCDGRSAMHLACFLGKLNCVCFLISAGCPVNVHDRFNRTPLHEAIDTDNHDIINALLKNGAKLNDQPLVQAELLRALTERGKIKRLESFRLAGANLTLADRTGRTALHYACQLGNHEVVDYLLPHYENPYIKDELGMSPIDYAKAANHAHILTLMRFKEKELAKKDPCSCTQ

SEQ ID NO: 18535 - DNA, 3247 bp, DROSOPHILA
gaggcctcacatcgtttcagatctaagaaagtgaaggtggttcaattggagcactgcatatgaggagctgaaagtgaaacgttcagagctatgggaattaaattggacatgaatggtttattggttgtgagttgtttggcttgaccgctcaatgcgaaaatcggactaagttttcacatccttgcagttgtttttgtgcgccttttgctgcagcgtggtggccaaaccaccgacagctcggcgggcacagctgcacgacgatgtccagcttatccatccccacatcatcaccatagagcgtttagagaatttgctgcggcgtgctggggaaatctttggtccggctctagaggaagatgccatggcggaggccagtagtcaggtgcaggagcaagtgcagccgcagcagcgaatgctgccgccaacggagcagccgtataacttctatttacctctatacgacttcgtggagcccaagctggatgccaagagccgaatgctggagaagattgctcctccgccgcaaaagacggagcacaactactacgcggaaaagccaaaaaagaagccaaagaagtttaacgctgccaacaagcacatcaacctcaatctcaagtggcttaacacctacgagagggccatgggcggagcaactgcgcccaaagccatgtatctggagcaggacgagcgcaaccgaataaacttcgacgactccttctttgcggtggacatgcaggtaaagattccggataatcagccccacaaggagccagctgcgcccacagagctcttgcagcatggcgaagagcaggccgaggaagatttgatggcggctcctgcgcagttagcctttaacttcaagtctcccgtccaggaagaacgtcgaacatagatgcggttttttttgctataggttttagtcagttgtataaaaaagctacaataaatgcacttagagtgagtaaagtccagaatacggattcgaccagttggcctcctcctacttcttccgcagctccttgcagaaggtctcggcagcagcagcctcgcgagacacgggcacatttttctgagcctcatcctcctcgagttttttgacaccctgacgcacaacgcgttcaatgtcgtccagcaatccggaggctccgaaacggaacctctcgggacgcaaccagcggatgccaagagtttcgttgaccaacgtcatccaggcgatcgcatctcgtacagtctttactcctccggctggcttaaggcccacaatctggcacgtgcgtcgtttgaattcctgaatggcaaatatcatgaccaggccaacgggcagggtggcgttgactgtctcctttcccgttgaggtcttgataaaatccgctccggccatcatgcaaaccatggctgctttgtaaacctaaagaaattaatggatttgaatggtattttagtatagggattaggcgatattgatctcacattatccatggtgcccagctccccgatggccagaattgtttttaggtgagccctttgtccacaggcactgcgcataaggaccacctcgttgtacatggcctcccagtcgccaacgagggccaactggcgattgatcacaatgtcgatctctgtggctccagcaagaatggcgtggctgatctcctgcaggcgggtctgcaggccgtactggcccgtgggaaatcccgtggccaccgctgcaatagccaccttatccagtttgtcgtactgttggatagctaaataggcgtcctttaccctggcgggataaacgcaaacggcggccgtgtgcatctctgggatgagagcccggtcgaagaacttgtcaaagaactgcggctcgaagggatagcaggcgcgtaggcatagtctccgcacattggcagccgtatcatcgcccgccaaggtggtaagatctgtcagcatcagagccctcagcgcccaggcgatttcgttggctccggtgacatggcatcgctgggacaccgtcaaagcgatctcctcgacctgccgcagcgagatgtttaccttaagcagggagggatctgcgaaatatatatgtatatatttaaattcgtactattgtgcgaattcttaccatagggcagggttttgtttacttccaattccttcacatccatgctgctcattgctgtcaaacgaaaatttagctgactaaattccacttgaagataaaatcgttcgatcgccgatcttgacctctaatcttctactcaacctcaaccgaagaacatggagagtcttatcaatttgcttgttggacagctgatgacgacgttgccagaccgttcgcattaactgataatttatgagatggattccgttaaaagatcaccgatattaacaataagtaaatttgttatgtaaaactccacagcttgctgtttaataaagccaatcgcttaggtaactttgtctattttttattgtcttaatacttgcgaaatacacctaattttaatattgcattttcgatatgaaatttgtaagtacaagatattgtgaattttaaaataccgcgtcagcgaggtagaaaacatgtaatttttatagcgctaattgaactactgctttgtgacaaggggttttcatcgatgtttggcccactgctcccagtactccctcttctgcatttcatagagtcgagatagtgtgcgatcaaaggcgaacagctcttcctcgccggtgaaaaaactggctttggattctttctgtaaacaaaaacgtgttgattttaatggtagaagaatgagttactaacttactatatttagatcgtccattagggttcgctcagaatcggacagagttttggaacctccagtaaagctgaacaagttttccagcgcaacgtcggatgatatcaccacacgcactcggttattgtaaagggtatctatgagcgtgataaatcgtcgcatctgtgccttcacatcaagggtcagctggggcacatctcggatgaggacggtgtgaaagaattgcgatatctgtaagaaatcactgccagccaaaggctaatgcggaatatgttgagtatgggtaagattatgtattaatactttgcttacgcgatcacagagttccgagaaggtgctgtccagtacctggccacacgtgcgattgaaggtcagatctcttccgaaatgagtcagggttcgcggccggataatatcgttttcttcggcgcacaggatcttgaacatgcgattcatac

SEQ ID NO: 18536 - DNA, 1132 bp, DROSOPHILA
ttgagtagaagattagaggtcaagatcggcgatcgaacgattttatcttcaagtggaatttagtcagctaaattttcgtttgacagcaatgagcagcatggatgtgaaggaattggaagtaaacaaaaccctgccctatgatccctccctgcttaaggtaaacatctcgctgcggcaggtcgaggagatcgctttgacggtgtcccagcgatgccatgtcaccggagccaacgaaatcgcctgggcgctgagggctctgatgctgacagatcttaccaccttggcgggcgatgatacggctgccaatgtgcggagactatgcctacgcgcctgctatcccttcgagccgcagttctttgacaagttcttcgaccgggctctcatcccagagatgcacacggccgccgtttgcgtttatcccgccagggtaaaggacgcctatttagctatccaacagtacgacaaactggataaggtggctattgcagcggtggccacgggatttcccacgggccagtacggcctgcagacccgcctgcaggagatcagccacgccattcttgctggagccacagagatcgacattgtgatcaatcgccagttggccctcgttggcgactgggaggccatgtacaacgaggtggtccttatgcgcagtgcctgtggacaaagggctcacctaaaaacaattctggccatcggggagctgggcaccatggataatgtttacaaagcagccatggtttgcatgatggccggagcggattttatcaagacctcaacgggaaaggagacagtcaacgccaccctgcccgttggcctggtcatgatatttgccattcaggaattcaaacgacgcacgtgccagattgtgggccttaagccagccggaggagtaaagactgtacgagatgcgatcgcctggatgacgttggtcaacgaaactcttggcatccgctggttgcgtcccgagaggttccgtttcggagcctccggattgctggacgacattgaacgcgttgtgcgtcagggtgtcaaaaaactcgaggaggatgaggctcagaaaaatgtgcccgtgtctcgcgaggctgctgctgccgagaccttctgcaaggagctgcggaagaagtag

SEQ ID NO: 18537 - protein, 347 aa, DROSOPHILA
MSSMDVKELEVNKTLPYDPSLLKVNISLRQVEEIALTVSQRCHVTGANEIAWALRALMLTDLTTLAGDDTAANVRRLCLRACYPFEPQFFDKFFDRALIPEMHTAAVCVYPARVKDAYLAIQQYDKLDKVAIAAVATGFPTGQYGLQTRLQEISHAILAGATEIDIVINRQLALVGDWEAMYNEVVLMRSACGQRAHLKTILAIGELGTMDNVYKAAMVCMMAGADFIKTSTGKETVNATLPVGLVMIFAIQEFKRRTCQIVGLKPAGGVKTVRDAIAWMTLVNETLGIRWLRPERFRFGASGLLDDIERVVRQGVKKLEEDEAQKNVPVSREAAAAETFCKELRKK

SEQ ID NO: 18538 - DNA, 15987 bp, DROSOPHILA
tttcaacgagattcaatggttttgcgacttcgaagagcagtgcaactgcaagtcttttttatcagctatattcatatcttttgcttcagtaaaataatcatatagatgcatatatccgtttacatatctgtgttttctgtgtagatagcaatcttcaaagtataaattataatgattaaggtagtgtaggctacggctcagtaaaataatcaataaataaattgctctaagtcaacgtatgagttaaggtaaggtagaaagctaagcgagaattcgtcttcatccatccagctgcctctggagattcccagtcctgcggtttccactggtagccagttcttagttcttctgcgaattaagactccattgtgcaaactgctcctgccattggctattcgcatttgcctgtggaaacatagaaatctgtattaaaataagtcatcgaagcctcatgttttctctttaatcgtactcaagatctttggcatgcaaggcaattggaaagtagcaatcactacactagctacaggatatatagatatatattcgaattatgtttcggatatcgagtgcatgtacagagagaaatagataaataaggatagacaacggcaaagaacaacatctagatcaacagtgagcaggatttcatggcgaaatcctttaccttttcattccactcttggttatacgattgagattcgtcgaaatctgaaattgatcaagtttgcggtgagcatatgtattatcggtatcatggctcaaatcaaaatcagacaatttattcgaatcctttgagtcaagcagccaacgtgaatcaaatctagagactaactaggatgagctgactgagattgattgatatatatatagagagagagagagacggttgagagtgcagcaatgatgatgagctatgttgtagaactatagaagtaactatagatagagccccgactggaaactacctgaggtggagtggaagttcgtgagtcgagcgagctacgatggtctatactgtagaggcagcagtagattttgcatattttacctgatcacagagtatatatataacctacgacgaacactttatatattcagactatacttcatgatataagcatgcatgatcagctgcagttcatcgattgtctcaccgatctcgtgcagcgccgggaaaccggcctgctcatcgtcgatgaacagttcggggtggttgcgatagcccaggatgcggttcacctgggacagctcctcgccctgcccgaaagtgtaatcaaagtggtcctcctcgtgaacgccgctagtagggaacaaggagtatgcattcccaaatggagctgcagctccctcgcactcgagatcctcgtcggtgcggaacacctcctcgtactccccgcactcgcaatcgttgcactcgcactgactcgagtcctcggactcgccaccctcgatgtgtcggaattcttaatcggattttttgggcgattttgttttttgtttgttttgatttggtttggttttttggatgggcagggttccccgatttaacatacagaagaaatgagcgaaaattataaagggcaactaaccaaactgggaggagctcaatatttgcagcattttttcttatgccgtctattggggtaataatctaaaatcaaatggtttggaaaaaaaaacgaagaaaacaaaacggaaaattgatcgctttagagaagtgggaaccagcaggagttggaggagcgtttcagttcggatcgatgcagcccgggacaacttacccagtggcatgatgaagcgagcctgcggtatggagctcgccggctggggacccagctgctgtgcccttccccgtcctggaaaatggccagacccaaagacacaatacgcacaccgaaaaagaacacggataagcacagagtgaaaacattccatttggagctgggattgtgtttggtttggtggctctagaagcggtgctactacgaaatctacgtgctggtgcagtgcagatcaccattcacgagcaactctgggaaaacaggagcaaggaacaggagcagcagatgcagatgcaattgcagttgcagttttggaagcgtaagcgattggttagatgggttcgaatccaacgatttacctgcgttcaggtcgctgaccatgtgcgaaatggccgacgttagatgatcggcagcctcattgagctccgcgtcgggattcagattcggattctgattcgaaatcggattgaggctgggaatggcactgacattggcagtggcagtggtggtgcgcattggcggtggcgctgcgaaggcgaagcgatcaagaaacgagtgtgtttttgggcgtgagagcgtgtgtttcgggtgaattggtcaggtgatattcgtttgggttattggtttttgggtgtgtgttttgccagtggcggtgttaccgcattgttgagcggaatatacgattaatatctgtctgaacccaggcctaaactttcgcgttaaccaatttcacacaggggatttcagaatttggacatgaacgaacctaaccgatgagtaacccaagggtccgtacctccaatctctactcacttgcacttccgttggcggcgaaggcgctgcgcatatcgctgctaatctggttgagctgctccagctggctctggctaaatggcccgtggccatgagcctgctgctgttgctgttggaggagttgctgctggctggctctgactcctccggccatcggatgttgctgcatctgctgggcgtgtagagcactcatgggggatgtacccaggattccagctccgccgggcattggtggggatttaccggaacgaggactcgagttgggcgtggatcgaggcgatgctgtctgctggttcttcagcattcgcatcagtccctccagttgctccattagctgtcgtcgcgaatcctgcagagcacccaaatggccctccagttctcctttccgctgccttagagcacgcagttcattgattagcgccggattctctggcgccatctgctccgtctcctgttgacgcctcaggcgcgctatctcccgcattatctccttattcttggactccagttgggcaattagctcgcgttgggctcgcgagttatctgtgccaattggtgtggcattgtcgggcaagttggatggctgtatggattgcatagtaattaaagaaggacttaatagattttaagtatgtctcacttaccgctcggttttcctgggccaatctggcggcatagcgggcaatcaggcggtgctcctcgtcgttggcagaagcggcggccacgcgagacatggttgtgccggccgtgccgctggcgctgtccagactgcggcctgtggcccgcgagtcgagcgtgctggagcgatcgaaaaggccgtgctggcccgggagacccggatgcgggccgtggtggccatgtacgaggcccgaggggtccgagaagccgttgtgcgatggcagcggcgagggcggcacgatgtgcgacaggttgagcgtcttctccggctggtcggggaagcgagggagcacctgcaccgtcttctcgggcacacagcggaagctcttgcgcagcgagtgaccgatctgtttgctgggcgacttgtagctcgagtactccttgacctcgtgatcgttctggtgattcagcgatgtcttgccgtgccagaagcactcctgacacaactggtaggcgtgacaccgctgacagcgataacgaaacccggtgaagttttccttgtggcaaacagagcagacagtcggatgcacaatggtctccacggtggccagccggtgcaccagcggcagccagacgaggcaggacggccccggctcggacatcagcgtggccataaagtcgttcaccgtcaccttattctcggccgggaagatctcctcctcgagcccctccttgtagtggaatgtgggcgactcgtacacggccgccggcagggccagcacttcgcgcaggaactcgcccagcttccaggccaccagctgtccagcgccatccgagatctgcgagaatatgtctgtccgatggaaaagtttcaatctagtttatttggtaatcaaatgatgtgtgcattactcacatcttagtttgtccaccagcttgccagagcacatagtggccagggccactttgatggagaaaacgcgtatcttgcccgagttatcactgaagatgaggaaaatagttgaatggcttttcatattttagagtatatttgaagcacgcaccttgtgtacgcggccagcagccagttgagcagcagacccgccttcgagtccacaggcacctgctgagcggtgggcaggcgcttgttgaggttatgatagagggaggagaccagggtttccagcctggccacgctcacctcgctctgcggctccagggtgttcaggccattctcgcgaaaggcctcgatcacattccatatgtccaccaagtgcagatttgtggacttctgtatatagcgcagcttggaggcggtgcggtaggaggcaaatcgaatggagtcgaaggtctgcaggcgcaggtcctgcagtatggccactcgcggctccagttccattcctcgcctggaatttaattaaaacatatgcattatgatcaggataagcgtaaatagttatggtttagcagtcgcatataagtgggtcgttggtggggggaggaggattaggagcatctctgcccccagcacagggattcgctgtctgcttagggaatctattcatttcccaattcagcccccattttacatatttcattgtgtttggcgtctggcttcggcaggccggttgccgatgcactggaaaattttggtatattaatgaccaaatgtcctgatatgagaaagatttttcccagtcagttttatcagtttattaaatttataagtatcccaacatgtatcttaacagttaaaatcatccgttaaaaaaacaataggtaaacatttccttaaaatagaccattgtatttaaataatcttttataaaccataagctcataaacttatgattcattttcttgaaaactgagcaatcgatgggcgacgacactccatcctgattttagaattttcgccagtgtgatgccattgtctggtgtctgctggagtgggtgcatccctgctagcggcaatcgccggaagaggaagtgagcaattcagggtggcagacggggaatcccccgccgctgtttccgcagctagttagtgaaacaatagcgaatttaataatccgcctacgcgttgaaagtttttgctatcgcctaaaccgctttaccagtccaattaatcgggaggaatgcctcgcagcttccccttccgccgcggtggctggagcatcctcatcatatccttgatgcataactccacgccagaagggtgacgacaacttcagaagttgctgtcacatcacgcttctcgtacccaagttttcgcaattgattttccatctttcacgagagcgggagcgaaaaaaatgtccttggaaaaaggcgagcagacatctctgagtcatcgtacgaaaataatcagagaacttttctgtgcggatctggtttccatttctggctcacaatgcacacacatatgtatgtatgtatgtcccatcctgtcctgcccgcctgcctgccatgtcctttcatcatccagagctggccaatttaaacaagcattcttatttaaatgccgcttcctttttcctgctgccctctgtcaactaaatgatagtgttattacaagacggggagaaacgcccaaactgaaattcaatttcaaactgcaaactgcgaatggaactggagctgagatgatgaagtagctgagtggaatgggctgtactgggagaaaatcatatctcatttcaattgtacaatcacaaaaacagcttgaataaaataaattaaagaaagtaataaagtagcccaagaatattgtataataatgggcataaagacatatgttagcacactttcggatactatctttcagtgtcttgcaaatcccttcggactttaagttctcaagacctaagtgtggatgatagtccggatgtttggagattgaggatgatgagtcacaaggcaccggcgttcctcgggtttcgctccaccacttggtcgcacgtaaatagagcaacaacagccattaggacatacataacatacgtatataaatatgcactcacacccacactcatacactcgttctcgcactagcacactcacaaattcttggggcacggggcgaatgctctgcaaacatttgcgctcgaaagtatgcaacaagacctggctgaataatttcagctcggccaggagtagtggtggttgggtggtgtccgggtggcaggattggcacgggggaccatggctatggatgggaattccgcattgccagcggctgctgcagttttgatgctgccacttgccccgagcgttgacatcctgctgctcctcatcgcatgagcatctgccaagtggccacccgccgattataaacacacgaaaagaaattatagtctctctaaaaactaagcaatgttatattttaaatgtgcatagtaccaaggaagttgtatattcctagcgttttgagactgaaatttatcttttggcttcaaaaatttgagtacgcgcacaaacatattgaaaatacaatataattgttctaaatgttattttcagtgaacaagaagggggttaagcaggttaaggggggcgtgtgcagccctattcgtgtcattcagatatctccgcactaagaattctcttttcgctcgtgtcgacagcatattaaattccattgcaagtgtccccagcgccccaaaaacacctcctcgctctttggggattgtgcccaattgcaaccacaattgctggcatcttttgctgtggtcagccagcagctcaatgccttgctgcacatatttgtattgtcgtctattgtttattattttcctgccatttgtttagaagctcctctctttaaataaccagccagctaggcaaacttttcaaatcggatctgctgcctgtgacacttttagcgcaaactttccacagaactttaagttgaaatcgttttaaactcgttttgtatgccagaagtttgcagctcattaccggcaaactgcaatttgcgattgaattcaggcttaatttcgacctcgaatgggaaatgagtcgaattgaaggatgcagcagaggaaacggaaattccgataaaatcttttttaaatacaaaagtatttaccatcatttcaatagcaagaagtctgaatggaaagcattgcttggcatttagattatctgtctggtaagcccaggactttcgatacagctaatttaatggaaaagcaatggtggcataaagaaagaataaatgcatttaattagcatatcagcaaaagtggataatgttttccccatgcagcgaaaactttaaatcagccggctaaatagccagccatccgaccatccatcacctgcccaggtgaccccaggtgaacccaaaaggaactccagggacagctaagtcagccggagcgcacgttgatgctcaatttactaactgagctgaaaggaaaaaaaaaatgtgaaaaagcaacagggagcatggacgaggagcagagcggagaaaccgcatggatgaaatatgaatggcaacaaggacgaggacgaggacgaggatagcgtgtccaggagctgcatcaaagttttcctcccccttccaactgccacgtttctcctttgctgtgcgcttttcccgcaaagcagcaaattaaacaagtttccagctgcaggtcctccgtgtcctgggattcctcgcccaatcccgtaagggtcccgtgagtcctgggtgctgctgttttatgccatttgcgtgccagggaaatcaaagccaaacaactggctccagcgatgataactgggcacataatttgcaattccacagcgaggcgatggcgatggcgatggcggggcggagacccggatttattccgtgttaattccgacttttccgtttttgcagctacaacaggacaggagattgcatgtctgcccgaattgatcagctcaaatcgctggtcgacgaggcaataaccttttgtccacgtccgagcctcgaaaaatgtatggccaaaggcagcaggtaaaaggcaaaggctgtctgcgaactaccaggtaagttaattgaaaaatcgagccaacagtggatgtgcatatgctccatttggcataattgatgggcctcgcctgcaaaggaagtcccataacttggatgtgctcatttgtgcacggtgagaaagtttgtatcatcatttttgggtttaacttccaaaagaagttatagtctttatgggttacaattattcgtttaatgtacacatttcacccttaaaatccacgcttattgcaaattcaagcaataaaagctatgggaatacagtgatttgtttttcaccgtgctttccaaccatcaaaggcgcacgaaaattagtccatgagcacaaaaaaaaagctggtcacaagccagaaggaacacccgctcccgttggaaggaagtggtgtcccagttagacgaggcaactgtcatcagcctcgtcagaatgcgcaagcggagtaattatgtgtacagctcgcaatgggagcaaacaggaagggaatggactagaaacgaatggaacggagtggcaaggatgtggggcggtggcaggatctgtgccacttactacacagaaaaactaaaaaggggcaacggcaagagcgaaatgcacattcctcggcaagacaaagcgccattagttgtcgccgctcaaggatttccaaagggattggattggagccaccaaggcagtggtataaagtgtataccgaagagcttaagaaacggagccattcgcatcgtttgaagttggagtggcagctgacgcactctgaagactttactgtggccataatccccagatcccggggctttacctgtccgctctttgttcgccagcccagccagcaggtgggcaggtgggcattgctgacagcaatgcagatgatgggcccccagccggattgtgttttcccacagccacctggccaaggtcatggtgcagataagacgctcttgagtcacctggatggcaaagccttttgcattgtctagcttgattgcatttaacttaaagtgtcagcaggatgtgaaatataaataaccggctgaatctaaagggattatttagacgagcatgcagagcaatatgacaagttaatacaatatatcaaaataagatatgtatggtattttatttagtatgactaaataatgaaaccaaaagaaatgcgaaccaatctgctaaatgtttaatcaatttgctgcataatttatccatcgcttattgcaaacaatcgaggcaaatgaagtgcagaaaccacacgataagccgaagggtgaattaacattccgagctatgaactgcattattcattatccgaaatagtaacccttggagtgacctgcacctgcagcaatccacggattaatgagcaccagccacccacgcttagatacaaattcctaacgaaatatgcaaataactagtcgaggaatttgcaactgattgcaagctgtggatatattgtacaatttataaactcggggtgtgacaaccgtttcaacaccagccaacaccatcgatccatcgatgacaatccccagtataattagcacagatgagcaaacgattcgcagtaaatattttccactttatcacctgagtcacgccctatttttggcatctgaacgtgcgcttagcgaaaagcggaaaagcgagcgtgaaaaacatgaaacaaaacctaaggtcgaaacgtaatgaaatcgagcatttgacgctatcgagctgcaagcgttctaaatgcccagctaattggccaagcgagtccgaaaatcgctagtagcagacagaatgtcgctacccaagtgggccaaagtgttttgcacaaggccactaaaaagtgggcgcactatgtgggtggtgttgtttgtcttctttgtcggttgaatgttgtaacccaatgacccaatgtgggccacccacgcactcggaatctcttacgaaataaagaagacacaaggcatttgaagtgggcgggttttttttcccccatttcacgatccatttgcaatgcgttccactatctcagcagcgttgataacgatctgcaaagcaaacagaccgcaaacgataagatatattcggctaaaccggaccaaacccacttgtgggttcctcttgttctatttctatttgcgcgctgggaaactgtggccatgtcaacgacaagagtcaagtcaatcaagtggaactgcaatcgaattgggagtgcgattggaaatcgaatcccagacaaaaagaggttgccacaaaaagggatgacaaagaaagccccacaaatcaatgcaaacgagggcccaagtggtcaacagtcaccacgcatatggaaaatggaaatcgtgggccagtctgcaagtcggctgcctttctccaagctttcctcctgcactttgcataaatctataatgagatttggaatgcaactgtcacacataatggcattgccacgacgacaacgacgacgacgacgaacaatctgaccaatcaatgcagcttagccagaggccactgtgctgatataagcacgtttgaagtggacagagttgtctactacaaatatttaatattccctctttagttagttcgattattgcacactaaactcaaataaacaatatacaaatatacaaatgctattcttgccaatgcttttcacatatattgtaaataaacaatatttagattatggccccccattcgcaaagcggaagtccgatgcccaaatatttattggccacgatcggtgtttacaaacaaaacacgcgccagatgaaacaatggccatatattaacccccaccgctgtcgatcgaatcagtcggatcagttggctccatagaatgccatacttatgggcagtctagttggcttttcggcttttaatgggaaataacgaagcaattgttggaggcgattatcgaaattataccgaatagaggagctcactggccgcgcacagtgaagtccagaatgtgagtagttgataccgaatgccttccaattgatggacctccgatattagccagctaacatgtccagctgcagacagttcaatccgttctacattggaccctatccggagcgtgcgtgcggcgattgtccgtatggcgagtactcgggcttcaccagatgcggatggagtggcggtaacgggccctttggcaccaccttctgtgactcccgctatggcggaggaggaggaggcggccaaggcggtggaggagggagaggtggatgtggaggcagaggcagaggtggttgtgcgccatcttgtggtcctcgtggcggatcgtggtcctgtggtccccgcccgtattccccgtgctatcaatttccgtacggagcggacagctgcatgatgtgctccagtggatttggctgctgtggccaatcctgtcgcgcatcctgctactcctgctgctgagcatgtacgtctcgtggactctggacttcactgtttgcggttaattggtttcttgagttatttctttctttttcttttttttgagcaaaattgattgtaaagcaagaacaattatggttagccctttgggtttattattatgggcttggtcttaaaataaccagatgctttacgctccaatcgctagcgaaaatcccctgtaatggaatgcccacacatgactgcctcttggttatggagaacaaagttgtcgcccgcgataaatgtatgtacatcccatacatcaaacgaggccactgcgggtgtggaaatccgggccagaatccggtgtggagaggagtagggaggagaggagtggaaaggaggtcggcgccgctaaatgcgattacagcataaacgattaattttattgcagttagccgagccgggacgcttgttccataaactaattaaagcccagtggaaagtggacagtggatacattcgccgctgacttcaaagaaagggttaattgtgcgccttgtgcggaattggtccccctttttcattccgctctcttggttttccattcttcctttgtcttttccgcagacaactgggcagttttcttcgttttctttgttttctaggccgaaattactccgtggctagatttggtgggcaccacgttctcgttctgctcctcgacgctactatggccattgttgtggcggctgtcatgttgtgggtggccgcactcagctctgtttgtttgtttgtttttttctttttttttccatgctgctctgcgtgtttgtcgctttgctcttttttcccctctgccttctttttcgtgtcacgcctcatttagcttttcacaacatttccaaatttccacccacccggtcgacacgtcgcatcgcagcgcacgtagtgtcggaaatatctggggatgtggagcagtggtgcctagtcctctgcactctcggctcttagcagcacacatcaaaattaaccgaaataaccagtgggatgcgtgtatgcagctctgtatctgtgaactagatcgagtcgcttcgtcttcagattggaatgcccctcgtaatgagccacaatatgttcgagttaattgcatcggatcgaagttgccgcgggggaaatatcaacaggcaggcaatagagtcacggtaggctaggcaattttccatatataacgaatatttgatcgtaatggatataaatggatataataatgagttaaagaaaggcacccctgtgcgcaagcttttgagaatagctaccacttaacaatttcttagcttacaatacaagccagtagttaactcaacttgaatgccatatttttctggagtgattctatttatgtaggggtatatgtagcaaccacttgcactacacttcaacacctgatttatgcatttaatcgtaaaatttaaagatcgtcataatgccaatgagtcgtaaaaaccagccaattaaagccacttaaatttggcaaatggcaagcgcacttttccaaatgcatggctttgatttaatacctgtgataaaagcaatgcgcttaatgttggatcgtgggattatctagtgattgttccgattgcagatagtattcgtgtatagatgaggggctcgaaagtgaaactcgctgatatcgcaagagcattcgatccattttacttgccgacttgtaggtggttcggaatgccgcttggcattcgggtttgagcttcgttttgaacttcggcttggcgcacctgccacgagtgttccccctctcattctcgctcccactcccgcactcgctcgcagccccctccctggtggactctctccttcgcaccttcgcgcgcttgttggtgggccgggcgagcagccgccgtttttcaaatgctaaaattggcgattagtcaaaatgatgtcaccgagttattttgattgttttttttctttcattatttctatgtatttatttcgcttgactttggcattttggcgacacgctgaccataaattccgtattattgtttttcctgctattcgatatcaccgattgccaaaggtgggctaagatacaaaatgctctaatctaaacaccaagttgcagtgtgtgtgtgtgtgacttttcattcgcacgacgcttaattattcgctgagctaatcatttcaccgactgccatatggcggtatgtgatctaatctcaatgagcaaaaggtctagttattaaggcatgcggctcagtttgatatggaatttttcaactatgcgaacttggatgtcaaccagacgcaatagttaaggaaattcattaaaacttcaaacatttcagttccttaaacttatcttgtatgaagtattatagaggagatatcaatatacccgttaagctttttaatataatttacacaatttcataatttcgtgaacgagcgaacatggggcgtggcgtgaaccactagactttccaacggaatgcaaatagtttaactatggtttcccacatagcaaaaacaaccaaatccgaactttcctcctagctgcccgcaaacatatttagttgtaaactaaattccaggcgcaaccacaaacaggcttggttcaaagtgtggaggggaggggggagtgttttgggagtgggcgcaggggggcagacactttttatgaatgaacactgtgcgctgcgtcgccaacgcgtcactcatccgagttttcctatcgcggaaatctactacgcatttcagtgggtaagtgaggggggtggaagggcaatcttagcaacattttattggtattgtttatgcccgggaatttggtaatataatccgcacattatttgttgtttaccttttgtaattagcaaccttttttaatacgtcactttttgttgggctgcgcggagttgctgcttcttcttgctgctctttctcctccttctcctgtttctctgcacttatcgcgttttattttcacctgctgtttacacacaataaacgatgaacggtaaacggagttgccaaactcgcgttagcgaacgagagagcaagatgcagcgccgagatagagagcgaagatgctgcgcccttttggcctttggtaaaaaatatggtaacagaaaaacttctttttttcgggctacgcttatgggctcaaaacacatacacaccgacggcaaaaacgcacacacacaagcgagctcgcaggaattttgagcctggctttaaaccgcaatgctatgcaaaacttttttctggcttgccaacggtaaatacgcagcgcgatttgcgattagctccgtgcgaatatcttatcaacggattttgtttacccaaaaaccacttccaacattgcgccgcgacactgcttcgacacccacaagccagcaacaacaaaatcgttggacagtgttaccagacgacgaagggctcccaattgaattcgtactaaaaaatgacacaggtccaacgagcttctaatttgaaattacagtcttggcacacagatcagaaattgatacaggcaataagctgattggatctataatgttaatttcgtcaaaaatatcaaaatagttcatattacgtgatatatatagaaaattttaggtggcagtaaaaactgctttaccaaggtggcaacggtaactggtgtgattttttgcttaatatgaagggcatgttaggtttgtaacttcgctaagtaaaacaggatgtaaaaatagcctaaatttacaaattctataagtttgattatactaaattaaatttattttaaagacgagagctgtgcagcaaactacatctagatgacaggaaaatccatttaaagcataacatataatttcacagctctacttgtgcttttaactgcatgtaatacaggcgtaagttctactctgcctttttatgtgctatggattccgaatccgccttagtctggcgttccttgcgagctcgctccttgagctgcgctgtttttagagtcaccatcagctgcgtggagttgtagagccaagtgccctgcaaataagcaaagataaatacacacttcatgcagtggaaacactataacttacaatcaaaagcatgcaattaagcaaaataggtattgagaaaactgtcgagataaacaggccgttgctatcgaagtattgttgtctggaaaaggaactccagttgttagcagcgaactcattgatgctttcggtgaagtagactgccagcactgaggaagatgaagcacatgcaaaaatcagagtcatttatcgggtaagtcaaggaagccgccaagtccacgtacacagtactaggaagaggaaaacctggaagttggagctgttccggct

SEQ ID NO: 18539 - DNA, 3045 bp, DROSOPHILA
ttggaagtggtttttgggtaaacaaaatccgttgataagatattcgcacggagctaatcgcaaatcgcgctgcgtatttaccgttggcaagccagaaaaaagttttgcatagcattgcggtttaaagccaggctcaaaattcctgcgagctcgcttgtgtgtgtgcgtttttgccgtcggtgtgtatgtgttttgagcccataagcgtagcccgaaaaaaagaagtttttctgttaccatattttttaccaaaggccaaaagggcgcagcatcttcgctctctatctcggcgctgcatcttgctctctcgttcgctaacgcgagtttggcaactccgtttaccgttcatcgtttattgtgtgtaaacagcaggtgaaaataaaacgcgataagtgcagagaaacaggagaaggaggagaaagagcagcaagaagaagcagcaactccgcgcagcccaacaaaaagtgacgtattaaaaaaggttgctaattacaaaaggcgaggaatggaactggagccgcgagtggccatactgcaggacctgcgcctgcagaccttcgactccattcgatttgcctcctaccgcaccgcctccaagctgcgctatatacagaagtccacaaatctgcacttggtggacatatggaatgtgatcgaggcctttcgcgagaatggcctgaacaccctggagccgcagagcgaggtgagcgtggccaggctggaaaccctggtctcctccctctatcataacctcaacaagcgcctgcccaccgctcagcaggtgcctgtggactcgaaggcgggtctgctgctcaactggctgctggccgcgtacacaagtgataactcgggcaagatacgcgttttctccatcaaagtggccctggccactatgtgctctggcaagctggtggacaaactaagatacatattctcgcagatctcggatggcgctggacagctggtggcctggaagctgggcgagttcctgcgcgaagtgctggccctgccggcggccgtgtacgagtcgcccacattccactacaaggaggggctcgaggaggagatcttcccggccgagaataaggtgacggtgaacgactttatggccacgctgatgtccgagccggggccgtcctgcctcgtctggctgccgctggtgcaccggctggccaccgtggagaccattgtgcatccgactgtctgctctgtttgccacaaggaaaacttcaccgggtttcgttatcgctgtcagcggtgtcacgcctaccagttgtgtcaggagtgcttctggcacggcaagacatcgctgaatcaccagaacgatcacgaggtcaaggagtactcgagctacaagtcgcccagcaaacagatcggtcactcgctgcgcaagagcttccgctgtgtgcccgagaagacggtgcaggtgctccctcgcttccccgaccagccggagaagacgctcaacctgtcgcacatcgtgccgccctcgccgctgccatcgcacaacggcttctcggacccctcgggcctcgtacatggccaccacggcccgcatccgggtctcccgggccagcacggccttttcgatcgctccagcacgctcgactcgcgggccacaggccgcagtctggacagcgccagcggcacggccggcacaaccatgtctcgcgtggccgccgcttctgccaacgacgaggagcaccgcctgattgcccgctatgccgccagattggcccaggaaaaccgagcgccatccaacttgcccgacaatgccacaccaattggcacagataactcgcgagcccaacgcgagctaattgcccaactggagtccaagaataaggagataatgcgggagatagcgcgcctgaggcgtcaacaggagacggagcagatggcgccagagaatccggcgctaatcaatgaactgcgtgctctaaggcagcggaaaggagaactggagggccatttgggtgctctgcaggattcgcgacgacagctaatggagcaactggagggactgatgcgaatgctgaagaaccagcagacagcatcgcctcgatccacgcccaactcgagtcctcgttccggtaaatccccaccaatgcccggcggagctggaatcctgggtacatcccccatgagtgctctacacgcccagcagatgcagcaacatccgatggccggaggagtcagagccagccagcagcaactcctccaacagcaacagcagcaggctcatggccacgggccatttagccagagccagctggagcagctcaaccagattagcagcgatatgcgcagcgccttcgccgccaacggaagtgcaacgccaccgccaatgcgcaccaccactgccactgccaatgtcagtgccattcccagcctcaatccgatttcgaatcagaatccgaatctgaatcccgacgcggagctcaatgaggctgccgatcatctaacgtcggccatttcgcacatggtcagcgacctgaacgcaggacggggaagggcacagcagctgggtccccagccggcgagctccataccgcaggctcgcttcatcatgccactggaattccgacacatcgagggtggcgagtccgaggactcgagtcagtgcgagtgcaacgattgcgagtgcggggagtacgaggaggtgttccgcaccgacgaggatctcgagtgcgagggagctgcagctccatttgggaatgcatactccttgttccctactagcggcgttcacgaggaggaccactttgattacactttcgggcagggcgaggagctgtcccaggtgaaccgcatcctgggctatcgcaaccaccccgaactgttcatcgacgatgagcaggccggtttcccggcgctgcacgagatcggtgagacaatcgatgaactgcagctgatcatgcatgcttatatcatgaagtatagtctgaatatataaagtgttcgtcgtaggttatatatatactctgtgatcaggtaaaatatgcaaaatctactgctgcctctacagtatagaccatcgtagct

SEQ ID NO: 18540 - protein, 816 aa, DROSOPHILA
MELEPRVAILQDLRLQTFDSIRFASYRTASKLRYIQKSTNLHLVDIWNVIEAFRENGLNTLEPQSEVSVARLETLVSSLYHNLNKRLPTAQQVPVDSKAGLLLNWLLAAYTSDNSGKIRVFSIKVALATMCSGKLVDKLRYIFSQISDGAGQLVAWKLGEFLREVLALPAAVYESPTFHYKEGLEEEIFPAENKVTVNDFMATLMSEPGPSCLVWLPLVHRLATVETIVHPTVCSVCHKENFTGFRYRCQRCHAYQLCQECFWHGKTSLNHQNDHEVKEYSSYKSPSKQIGHSLRKSFRCVPEKTVQVLPRFPDQPEKTLNLSHIVPPSPLPSHNGFSDPSGLVHGHHGPHPGLPGQHGLFDRSSTLDSRATGRSLDSASGTAGTTMSRVAAASANDEEHRLIARYAARLAQENRAPSNLPDNATPIGTDNSRAQRELIAQLESKNKEIMREIARLRRQQETEQMAPENPALINELRALRQRKGELEGHLGALQDSRRQLMEQLEGLMRMLKNQQTASPRSTPNSSPRSGKSPPMPGGAGILGTSPMSALHAQQMQQHPMAGGVRASQQQLLQQQQQQAHGHGPFSQSQLEQLNQISSDMRSAFAANGSATPPPMRTTTATANVSAIPSLNPISNQNPNLNPDAELNEAADHLTSAISHMVSDLNAGRGRAQQLGPQPASSIPQARFIMPLEFRHIEGGESEDSSQCECNDCECGEYEEVFRTDEDLECEGAAAPFGNAYSLFPTSGVHEEDHFDYTFGQGEELSQVNRILGYRNHPELFIDDEQAGFPALHEIGETIDELQLIMHAYIMKYSLNI

SEQ ID NO: 18541 - DNA, 6865 bp, DROSOPHILA
tcatccatgtggtggtggtggcccgcaatcgcattggagtatttgttatggatatacaaaaggggaagttcgccgctagtggaatgcatttgtaggctttgccgcagggattaactgatgatattcctcagataggcggagttttccgatttagggttctaactttggggttgattaaagctaaaatcatcatggaactaatagttttacatttttaaaagtaatgccgattttttccttacttgggatacttccgaaatccttgttattaatttgtatcttttcttttttggtcatctatgataaatcttatgttgttatattgatatgaccgcatagagatattgcatgctatcggatgcataagcttaaaccttaaaatctcgcaggatttcagaaatatcccttaaattacataatttcactggtgtgcggtattctttttcgttttactttacaattcttctagagttttttgacttatttacccaataattcgaattctaaaagtatatccgatcatttaaataatattagataaaaacaaagaatttttcaagcatactaacagttttttcgctctacaaaatattatttttcaaaagtataatttttttcgtcaaattaagtaaaacataaatttagaatcaaactatagcacaaaatggttacttgtttgtttcgttctaaatcctgatttttacgcctaagactacaacatgcatgcacaacaacaacaacaattatgccaacgacaaggttaacaacaacgacaacaacatggaacacagcttgcctcaaaactacaatgtgtgacggttcggattatggtgaatatcagacggattcataatactgactggctacccgggtgcgcgatcgatcctttcgcctatgtgaggatggtggcctcgccgccacccagtgggcgaggagcgcccacatgcggacgctgctgctgctgctggagccgcccaccgcccaccctcagcttcttgtgtcatttcttgccaccgaaagtgggtttcggtagcgcacccatgaacgcaccagcatttgtgggcaaggccggtgcaacgaagctgagatcggggatcagggagatgcgtggagccaccttggcgttgccgatttggaactgctgccgctgatgctgctgctggtaggtggcacccacacccaatcctccagacacgggtgcagtcgagaagtcgtgcatgatgtgtatttgctgtggaatggctggcacattgttgttattgctgctgctggtgctgcccttgggcactagattgctatgaggctgttgctgcagctgctgctgcgcctggtacaaactcaagggattgttgtagaaattagcgctctgccacgcaccggaattgaattgtggagccggtcgtgctggcggagtactgctcacaaaatccgaccaatcatcttctttgggagcagctggtttcctagcgttgctgttgactatattattgttgttagcaattgcgttttgctgatgatgcggttgctgttgggtgactggaacagagacaaagtccgaccattcatcgtcttcttgaggctgagactgagctggcgtggaaggagctggtttcttggccaccgaagcgcttatggtgagcggtttggcctgcgaggagaacaactcctctatcctggccatttcctcggcatttatgctagacagagcattgtcgccccattcaatagttgcagctggcttctttgccagcggaatggcttggggcagcagaatagccggactaaggatcatctgttcgccaaaagtgggtgtatcaattcgagaccttggcgccggcatagattgaaaatcactaaagtcgtcatcttccgtcgtctgtggtggcaactgaaagctgctggcagctccattgccactcagtttgctgggcgaatccagaccaaatgggggtttgtactccacgtcgcgatactccttcttcaccaccgtctcatcgatgataatgcccgtcgcagccatctcgtagtcgaaatcaatgggcgctagtgtggtggtcttggccaccgccgtatccgatttggagggcgtatagatatgggtctccttcagcggcaccgaatagctggccatcgagctgcccacgatctcctcctgagctggcgctgcggccggaggagtggtcctcaaatcaaactgctccggctccgaccgctgctgatgcagctgctcaccgccgttgagtttgtgggcagggctgtctgctgatagagtagtcggtagcgtcgctgctgctgcagcaacagctgctgctgatgccgctgctgtggattcaatatggttcgattcggggctggggactgcagttggctggtggctatgactcggtcgctcttcgccgtcggaattgctggcggaacaggagccggtggagccttccccatgagacgggccagtccgcgtttcagtttggctcgccgttgttgcggcggcgttttccaatcctgtgcgaaggaaagaaaacaattacttggctgtcatgaatgaaaactatgagataaacaaagataattaattagttattcggctataatcatctgttatgttgcagataactaaaaaaacactgtgcttatgaaagatatggaatggatatggatactaatcttgcattaatcattttattttactagatacattgtatcttttatagaatcaaagaaatcagaaaatggttacatttcaagcattacttttagttaccagatttagcaacacatcagatgatggcttagtttagagacaatatttaggtattagtatgatcaactgtatctagctaagtaaaatgtgaaaatgaagggaactcttgggcgggcttcaactacttgtgctagaactgagctggctgagattggatgcgttgtgccaaagtaacaagaactgggggaactgtggatcggtaggacggtacgggtagatagagagatagagctgagaagtatatagagaatcgaaactgaactgaacgaaccaaaaaagagtggagattcaactacaacacacgcacagagccaacgaaacttactaaaatccagcaaggcgtcgtgagcagtgaggtttgtgttaattgttattgtcattgttgcagtattttttgcatgattgttgttaagattgttgggattgttattatcgttattattgttgttgcagatggtggcaaaatgtgtgagtgatggagagtggtgcaaatcgattgtcaaattgtgatcgttatgggtcatcaaatccatcacaggtggcatacaatccagttgatcaacgggtgcagcaacgtcgttatcaccattatcgttgttgttattggtgtgggagttagaggtaacaagatttattttatcagcattagccaccaccgttagttggtctagttgttccaattgtaatgtctgtacatgtgattctaaatacaatttatcgtaaggataaactttttgattgtttgttgagatagttagaagtaatgtggtcacaaggaaaaacaaggcaaacgaaaatcaataagaatatatagaaaggagcagccaatcgaacggcaggccaatccgggaagcgtgtgtcaataggatcgggaaataggcaacgaaaagcgtttgaaagtaaagcgagcgttaggcgatagggtggcaatttctcgatttacgaaacttgtgtagcggttaatttgcggcaactaagtggagcaatctcgcagagactctaaggacactcaccctggtagctggtggaattggaaatgggctccaggctgcttgcggcgccggttgattgaggtttcagcggcttcagcggatcaaagctcaggttggcagcaaaacgtggcatcgatgagttccacttgtcgccgaagagctggaagtttatgaatttcagttatttgaaatacattttgaagccctatctaacttactatattccttgaatcgatgcccagcgatcgaacaagggcgtgtctcatttccgagctgctccattggtaatcaagggcttgggcatgctctatggcaccaaaattgaatcgctggcactgagccaaaggcctgcgattgtccatacttttgctgtccagttccgttggttgtggaaacatcatatcaaggactggcttaaccctttcatctatgctcagatggacagcagctggcggcggtggcggaggtacagaaacaggagtcactacgggcgcggcgaagtcgccaaaatcatcgtcgtcttcgctttgaccgtggtttccattcgcaggagtggcaaactcctgaaaatcatcgaagccatcatcggtctctgcaggaggtaacttagaggattcttctgtgctaggagccgtcttaacctctagaggttgagattccgttcgggaattgattgctaaggaaggtgtctcaaaggcagacgttgaattctccgtgatttctagttggggttctgctgctgagaaatccgcaaagtcaccgaagtcatcatcatcttcttgctcttgcatttcgggaacaatttctttgtgtactaagtcttttggcgtcgcatcaagatttgtaaatgaatatgtatcactatttgctggttcaccccattggtgaggggattcctcctgatttggaggatttgataagccacggctttgattttccataggcttttctaaggtatttgaactttcctcctgggcttccaaacttctaaagctttcttctggctgggaggtattctctacgtattctcctttccctgtatccacattctcctccgaaaagccttctccatatggtagggttggagtggccaatacctctatggcaaagaaatccacagctccctcgcgtataaatagttctttgggcttctttggcgagcactcctcgtcgctgtcatcggacacatcctccagcgtgacttggtggctgaggatatgggctttggttgtttgcatagccggcggagcaactgcactagtctccgcaaccggtgagagtgtggaggcggcagaaacgctttccgtggaatagagacttagactgtccaacttaagggagggcacatgctcctccagttcctcatcatccagttccaagctcaacggaggcggcgtcggcggtgctgtttcctcgaaaacatcgtaatccatcttctgtttcacctggtaattaaatgcctcgacggtttgtttgtcttccagcaaatcaggtggcttttctcgaaattcctccacgggatctggtggtggagggggttctaaaaagcgagaattaactgagtatcactttgagattcgataaatatctaagcttgcctttcgagctgctgactaagccaaaatctgagtattcgtcaccctcgtccaaatggatggtggattgtaaaccggaatcgtcgtcttcctcaccaaaatcgatgggcgggggggtgctgcagagcagcggtggtacattcaccataatgccagctgcaaaattcagtaaaaggatcccctaaaattcacttcctgcttcaagaagaacaacaaaaacgctgggaacggttcgatcttctatctctctcgctccactttatcactgtgtgtgtggtgtgtatgtgtgacgcaggtgtggagggcctgcaagtgtgtgtgtgtgtgttagccactcaaggtctgtgttggaattttcttgtttgcatttaacacgcgtcaattttgttgtgtctctgtattatgtctaattgtcgccttattggtggctctaaaaacagatttgccgaatttgcaagtcgcgttttatctgcaattagccatgttttccagaaaacaatactttttcctctgcccacagtgtgaacgtttaacttttggccaaccgacagtgctgaaaaacgttgcgcaacattgataacatacaaaatttgaatcttatctttttcaattcccattttcgatttaaatcattatccatagttcagatagaatagttatattagttatatttctataatagatttttattctttccaattcttttaccgttaaaattgtatttgaaaattattagtaacaagagtaaaatatacatgaaagtctaggctgcagtatgtaatacgtcaaattttgttgggacactaaacaacaaatagtcgtcataaaggcttcttttaaattgttatgatattttccacaatttctgcatacttttttaagcttgctggcaacgccgccaccgtaccaatacaactatcgatagccgcctgtcagttttgacagctgttttaaggttatactgcgctgccgttgcaatcgctccaccaatttggtaattttgcttatttaacatcaaatattgcataaaactaggaaaaccaggaatctgtaaagtggagcgagacggggaacgctattaaggaagtcggataactaaagtacatccttttcttgcagttcacggtcggacaattacataacttgaagaagaaaccatgtcgcaggctcccgttcgcgtttccccgctgatcaagttcggcagatggtccctgctcctggtgggcattgcctacggcgccgcccaccagagccgcctgtccaagaaggaggagaagttgcgcgagatcgaggcacagcagaaggccgtccgtgatgccaagctcgccgaggagaagaagcgcagcgcagaggctgaggcccgtgccttggctgagctttcgaagcccactcccaagcactaggatccttcaggatgcaacatccgcagttcccttagcttaaaaacattgaaaaaccacaacatttacacacgaagttcgcccaaaaggaggagcatcatcgatagtggagccacc

SEQ ID NO: 18542 - DNA, 3477 bp, DROSOPHILA
tgggcagaggaaaaagtattgttttctggaaaacatggctaattgcagataaaacgcgacttgcaaattcggcaaatctgtttttagagccaccaataaggcgacaattagacataatacagagacacaacaaaattgacgcgtgttaaatgcaaacaagaaaattccaacacagaccttgagtggctaacacacacacacacacttgcaggccctccacacctgcgtcacacatacacaccacacacacagtgataaagtggagcgagagagatagaagatcgaaccgttcccagcgtttttgttgttcttcttgaagcaggaagtgaattttaggggatccttttactgaattttgcagctggcattatggtgaatgtaccaccgctgctctgcagcacccccccgcccatcgattttggtgaggaagacgacgattccggtttacaatccaccatccatttggacgagggtgacgaatactcagattttggcttagtcagcagctcgaaagaaccccctccaccaccagatcccgtggaggaatttcgagaaaagccacctgatttgctggaagacaaacaaaccgtcgaggcatttaattaccaggtgaaacagaagatggattacgatgttttcgaggaaacagcaccgccgacgccgcctccgttgagcttggaactggatgatgaggaactggaggagcatgtgccctcccttaagttggacagtctaagtctctattccacggaaagcgtttctgccgcctccacactctcaccggttgcggagactagtgcagttgctccgccggctatgcaaacaaccaaagcccatatcctcagccaccaagtcacgctggaggatgtgtccgatgacagcgacgaggagtgctcgccaaagaagcccaaagaactatttatacgcgagggagctgtggatttctttgccatagaggtattggccactccaaccctaccatatggagaaggcttttcggaggagaatgtggatacagggaaaggagaatacgtagagaatacctcccagccagaagaaagctttagaagtttggaagcccaggaggaaagttcaaataccttagaaaagcctatggaaaatcaaagccgtggcttatcaaatcctccaaatcaggaggaatcccctcaccaatggggtgaaccagcaaatagtgatacatattcatttacaaatcttgatgcgacgccaaaagacttagtacacaaagaaattgttcccgaaatgcaagagcaagaagatgatgatgacttcggtgactttgcggatttctcagcagcagaaccccaactagaaatcacggagaattcaacgtctgcctttgagacaccttccttagcaatcaattcccgaacggaatctcaacctctagaggttaagacggctcctagcacagaagaatcctctaagttacctcctgcagagaccgatgatggcttcgatgattttcaggagtttgccactcctgcgaatggaaaccacggtcaaagcgaagacgacgatgattttggcgacttcgccgcgcccgtagtgactcctgtttctgtacctccgccaccgccgccagctgctgtccatctgagcatagatgaaagggttaagccagtccttgatatgatgtttccacaaccaacggaactggacagcaaaagtatggacaatcgcaggcctttggctcagtgccagcgattcaattttggtgccatagagcatgcccaagcccttgattaccaatggagcagctcggaaatgagacacgcccttgttcgatcgctgggcatcgattcaaggaatatactcttcggcgacaagtggaactcatcgatgccacgttttgctgccaacctgagctttgatccgctgaagccgctgaaacctcaatcaaccggcgccgcaagcagcctggagcccatttccaattccaccagctaccagggattggaaaacgccgccgcaacaacggcgagccaaactgaaacgcggactggcccgtctcatggggaaggctccaccggctcctgttccgccagcaattccgacggcgaagagcgaccgagtcatagccaccagccaactgcagtccccagccccgaatcgaaccatattgaatccacagcagcggcatcagcagcagctgttgctgcagcagcagcgacgctaccgactactctatcagcagacagccctgcccacaaactcaacggcggtgagcagctgcatcagcagcggtcggagccggagcagtttgatttgaggaccactcctccggccgcagcgccagctcaggaggagatcgtgggcagctcgatggccagctattcggtgccgctgaaggagacccatatctatacgccctccaaatcggatacggcggtggccaagaccaccacactagcgcccattgatttcgactacgagatggctgcgacgggcattatcatcgatgagacggtggtgaagaaggagtatcgcgacgtggagtacaaacccccatttggtctggattcgcccagcaaactgagtggcaatggagctgccagcagctttcagttgccaccacagacgacggaagatgacgactttagtgattttcaatctatgccggcgccaaggtctcgaattgatacacccacttttggcgaacagatgatccttagtccggctattctgctgccccaagccattccgctggcaaagaagccagctgcaactattgaatggggcgacaatgctctgtctagcataaatgccgaggaaatggccaggatagaggagttgttctcctcgcaggccaaaccgctcaccataagcgcttcggtggccaagaaaccagctccttccacgccagctcagtctcagcctcaagaagacgatgaatggtcggactttgtctctgttccagtcacccaacagcaaccgcatcatcagcaaaacgcaattgctaacaacaataatatagtcaacagcaacgctaggaaaccagctgctcccaaagaagatgattggtcggattttgtgagcagtactccgccagcacgaccggctccacaattcaattccggtgcgtggcagagcgctaatttctacaacaatcccttgagtttgtaccaggcgcagcagcagctgcagcaacagcctcatagcaatctagtgcccaagggcagcaccagcagcagcaataacaacaatgtgccagccattccacagcaaatacacatcatgcacgacttctcgactgcacccgtgtctggaggattgggtgtgggtgccacctaccagcagcagcatcagcggcagcagttccaaatcggcaacgccaaggtggctccacgcatctccctgatccccgatctcagcttcgttgcaccggccttgcccacaaatgctggtgcgttcatgggtgcgctaccgaaacccactttcggtggcaagaaatga

SEQ ID NO: 18543 - protein, 1035 aa, DROSOPHILA
MVNVPPLLCSTPPPIDFGEEDDDSGLQSTIHLDEGDEYSDFGLVSSSKEPPPPPDPVEEFREKPPDLLEDKQTVEAFNYQVKQKMDYDVFEETAPPTPPPLSLELDDEELEEHVPSLKLDSLSLYSTESVSAASTLSPVAETSAVAPPAMQTTKAHILSHQVTLEDVSDDSDEECSPKKPKELFIREGAVDFFAIEVLATPTLPYGEGFSEENVDTGKGEYVENTSQPEESFRSLEAQEESSNTLEKPMENQSRGLSNPPNQEESPHQWGEPANSDTYSFTNLDATPKDLVHKEIVPEMQEQEDDDDFGDFADFSAAEPQLEITENSTSAFETPSLAINSRTESQPLEVKTAPSTEESSKLPPAETDDGFDDFQEFATPANGNHGQSEDDDDFGDFAAPVVTPVSVPPPPPPAAVHLSIDERVKPVLDMMFPQPTELDSKSMDNRRPLAQCQRFNFGAIEHAQALDYQWSSSEMRHALVRSLGIDSRNILFGDKWNSSMPRFAANLSFDPLKPLKPQSTGAASSLEPISNSTSYQGLENAAATTASQTETRTGPSHGEGSTGSCSASNSDGEERPSHSHQPTAVPSPESNHIESTAAASAAAVAAAAATLPTTLSADSPAHKLNGGEQLHQQRSEPEQFDLRTTPPAAAPAQEEIVGSSMASYSVPLKETHIYTPSKSDTAVAKTTTLAPIDFDYEMAATGIIIDETVVKKEYRDVEYKPPFGLDSPSKLSGNGAASSFQLPPQTTEDDDFSDFQSMPAPRSRIDTPTFGEQMILSPAILLPQAIPLAKKPAATIEWGDNALSSINAEEMARIEELFSSQAKPLTISASVAKKPAPSTPAQSQPQEDDEWSDFVSVPVTQQQPHHQQNAIANNNNIVNSNARKPAAPKEDDWSDFVSSTPPARPAPQFNSGAWQSANFYNNPLSLYQAQQQLQQQPHSNLVPKGSTSSSNNNNVPAIPQQIHIMHDFSTAPVSGGLGVGATYQQQHQRQQFQIGNAKVAPRISLIPDLSFVAPALPTNAGAFMGALPKPTFGGKK

SEQ ID NO: 18544 - DNA, 4012 bp, DROSOPHILA
ttgggtccgccattgagctcctggtcccgctctctgtcttttgataaggcgagcggggaagcgggcagcctggatgcttcactgcctccggctccatcgctgctagcgttcccgtagatatgagcatacttgtgcacgcgccgaatgctaatatccgttcccaaaaataattgataagataacctctgccaaggcaatatgatagatttagttacctgagcttgctgagggaggtggcgctacctccgtcggaacggaagcccacaaagttaagcaccagcaacaagcatatcgcgccggctaggaagcgtatgagattcgccttggtgaagaggtacatggtccgaggattgcatcataccttgctcgacgcccaggcgctgcgaactggcattttcaagcgcaaaacgttcgacaaccgaacaaaaacgttaaaattcgcaactccagggttcaatcagaaaagtcagctgagagtccccctcgaccagggttgccagagttgcgcaattgctgcagccataaatcgccgactgccgatagtttgcaggcgccaaattcaaaaaacaaacttcacagcatatttttatgatctattattactaaaaatattaaatgcattttaaaattgaacgaaaatctaaatgttttatctacaaaacaatgaatacatataatataaggcaaattaatttgttattctaaagtccgaagttctcttggttttgtgatttattgcgctgttcggatctcgtaagtatcccaaaaatagcgagttacagagtggtattgtaaactggggaaatatacgatctgacatttgcccccaagtcctgggaatgggtcttttctatcaagaatataaacaagttacaaacacaactgaagatttaaactaattgtcgtgcagagcagtaaggccccactatcctgacagcggttgtcgcagcggcagtcgcagcgcctcgttgtccttgatgtgaatcacttcgaactggttttgataggtgtactctatccgcagaatcttgtcttcgccgatgcccggatcatagaagccgggcaggtcgctctacaaagacgtaaggaatggtattatatcaacccagaacacaatcagtgaaagtgtctcacctttgatgaatcatgcagctgcagggtcccgttcttgaccatgcattgaatggctacggtgacgtcgagcgattgctctggcttgaactgtctgccgcccgccaaggtacagccgtagacagctcgtgtgacaatcagcccattcctcgccagctcctccgtcatgatcctattgtacgtggcctgcattagatgaacggcagcactcgcctcgtgcctcttggcggacagtctctgctcattctgacgcttcgtcctttccacctcgatgttctttcgctccgcctccattgggtccatcacagtccttttgatgaagaaccacgcaatgactggagtcaccgaggcgtagaaaactgcagctggtactatttcatcgcttagatggatggggaacacatacgattgatttgaacgaagtattctgtgaaaaaggatgacggtaaatttcggagctttccagctgtacaaattcactcacttaaatttaagtatgactccagaaggcacgccaatcgataccgtcgctgtcacagaactgtacttggaaacctttttctccactccatactctcccataaagccaaaggttccaactctgcaacgagggaaattaataaatcagatttgaaaaatatgcaatcctcctactttgccgccagttttagcttgagctcgttctccatcattttgcgggtgtaggaaagaccgaagtaaacatgtggtgttccaatcaccagcgacgaactcagcgagtaagtctccttggagtgatcgatctgtgtggacatggaggattgcgaaccagcgtttagtgttagactacccatcgtgtgcttgtctagctgcacggccagcgtggagaacagggcgggtatgacaccttggtcacgaaagttcagattggtgcctccattcaacgtcagcttttggctaagagtgcggccacctaaacaagaagtctgtatgcaaatcgtagatatcaggtattggggtaaacacttacccttaagacccagaaggaatccgttgcccgctccggcacatagctctatccagcccttgttgagcagccgtcggccggcgatcacgaagccaccgctaccattgccattggatgagtacaggttgccgctcatgatgatcatatctttccgcgtgatcggagcctcgatggactgggcaatgctcatggagccgatctctacgtgcggcatttcagagtcgtcgtacggtgcgaagatctccgtggcattcacgttgatggtaatgttaccacgaggattggtccgctgctgtagacgtctttcagcggccgcctgcgccagccgctcgtactcctcccgaatctcatccggagtctttgttcggtgcagaatctcccagccttcggtccgtagtcccttctcgccaaccgagtcgtagatggcccgctgttggggatcagagaggacctcgtaggcacgcttcgtgcggttgaacatgatctcagccattttcttgctatccggatccaggtgcttgtccgggtggaacatgcggctctgtttccggtacgccgtgttgatctgctccgcagtggcctgtgaatcgagtcaaaaggattagatcggtggtagagcgtaccggccggtgacgctgcacgtacatcgcggggcaaattcagaaacgtatagtagttctcgtccagctctgcatcggactcatcgtgatccgatgccatgtcggtgatctagtcccgcggttcctgctcggcttcgaaaaggggcggggacgagtcagcgcacggacctcaccggcgttctatgttaattttggatttcgaaatttttgggtacttttacgcaatgactatacatgtgttgaatgttccgatagttgacgatggtttgctccaactgggttttgttttgagatacggtcatactgcggatgtacggtctcactacaacagcgacaccagtggtaaaaaatatgtaggttaatcggaaatcacaaatgttaaatgtgttgcaattgctatttatttagatgccacttgtttagtttataactttaatgaaataaatatcttattaaaattaagaaagtaaacaatattttatccgaactaatctttgaatataaaattttgctgtttcttttcactttacatctagtttgctttcatttactatgttttcaaaccaccttgtgctgaagggccattgaaatatttaaagttttatacaccacaattcgttgaagaaacactttcacaccgttgacaactctggcacgcgagttgcgggaaactatcgcattgcccgtcgcacagagacaagcccgagtccaccacttaccttacagtcctctcacgggaagaaacgtgctccgccgttctgacgaaatttttgcttttaatttgacaattgttcgtgtgaaattgcagaagtaaaaagccaaaatgctgcgcgtacccaagtttctgccccgtctcgcccgccaggccggcgtggtaccctcccatatgtccggagcttctagcatgttccgcgtaagtaccatccccccgccccgacccaacgactattatataaagtgcggcatgccgatgatgcggtctcatgttttgcgggaagattctacagcggagcccctttttgtctttacagaatctgccaggtgctagcaatggaatatcgtcccagctgcgttacaagtaagtgaaatcgagttataatttcgcaaatttctcttattaccggaacacaattatgtaagcactagacaaacataagatagatttccaaaagctacctcatgttgcatcataatgtacgatatttaaaagaaaatgccttgataattgcaaatatctgtggccagaaacgtggtg

SEQ ID NO: 18545 - DNA, 1718 bp, DROSOPHILA
ctatcggaacattcaacacatgtatagtcattgcgtaaaagtacccaaaaatttcgaaatccaaaattaacatagaacgccggtgaggtccgtgcgctgactcgtccccgccccttttcgaagccgagcaggaaccgcgggactagatcaccgacatggcatcggatcacgatgagtccgatgcagagctggacgagaactactatacgtttctgaatttgccccgcgatgccactgcggagcagatcaacacggcgtaccggaaacagagccgcatgttccacccggacaagcacctggatccggatagcaagaaaatggctgagatcatgttcaaccgcacgaagcgtgcctacgaggtcctctctgatccccaacagcgggccatctacgactcggttggcgagaagggactacggaccgaaggctgggagattctgcaccgaacaaagactccggatgagattcgggaggagtacgagcggctggcgcaggcggccgctgaaagacgtctacagcagcggaccaatcctcgtggtaacattaccatcaacgtgaatgccacggagatcttcgcaccgtacgacgactctgaaatgccgcacgtagagatcggctccatgagcattgcccagtccatcgaggctccgatcacgcggaaagatatgatcatcatgagcggcaacctgtactcatccaatggcaatggtagcggtggcttcgtgatcgccggccgacggctgctcaacaagggctggatagagctatgtgccggagcgggcaacggattccttctgggtcttaagggtggccgcactcttagccaaaagctgacgttgaatggaggcaccaatctgaactttcgtgaccaaggtgtcatacccgccctgttctccacgctggccgtgcagctagacaagcacacgatgggtagtctaacactaaacgctggttcgcaatcctccatgtccacacagatcgatcactccaaggagacttactcgctgagttcgtcgctggtgattggaacaccacatgtttacttcggtctttcctacacccgcaaaatgatggagaacgagctcaagctaaaactggcggcaaaagttggaacctttggctttatgggagagtatggagtggagaaaaaggtttccaagtacagttctgtgacagcgacggtatcgattggcgtgccttctggagtcatacttaaatttaaaatacttcgttcaaatcaatcgtatgtgttccccatccatctaagcgatgaaatagtaccagctgcagttttctacgcctcggtgactccagtcattgcgtggttcttcatcaaaaggactgtgatggacccaatggaggcggagcgaaagaacatcgaggtggaaaggacgaagcgtcagaatgagcagagactgtccgccaagaggcacgaggcgagtgctgccgttcatctaatgcaggccacgtacaataggatcatgacggaggagctggcgaggaatgggctgattgtcacacgagctgtctacggctgtaccttggcgggcggcagacagttcaagccagagcaatcgctcgacgtcaccgtagccattcaatgcatggtcaagaacgggaccctgcagctgcatgattcatcaaagagcgacctgcccggcttctatgatccgggcatcggcgaagacaagattctgcggatagagtacacctatcaa

SEQ ID NO: 18546 - protein, 521 aa, DROSOPHILA
MASDHDESDAELDENYYTFLNLPRDATAEQINTAYRKQSRMFHPDKHLDPDSKKMAEIMFNRTKRAYEVLSDPQQRAIYDSVGEKGLRTEGWEILHRTKTPDEIREEYERLAQAAAERRLQQRTNPRGNITINVNATEIFAPYDDSEMPHVEIGSMSIAQSIEAPITRKDMIIMSGNLYSSNGNGSGGFVIAGRRLLNKGWIELCAGAGNGFLLGLKGGRTLSQKLTLNGGTNLNFRDQGVIPALFSTLAVQLDKHTMGSLTLNAGSQSSMSTQIDHSKETYSLSSSLVIGTPHVYFGLSYTRKMMENELKLKLAAKVGTFGFMGEYGVEKKVSKYSSVTATVSIGVPSGVILKFKILRSNQSYVFPIHLSDEIVPAAVFYASVTPVIAWFFIKRTVMDPMEAERKNIEVERTKRQNEQRLSAKRHEASAAVHLMQATYNRIMTEELARNGLIVTRAVYGCTLAGGRQFKPEQSLDVTVAIQCMVKNGTLQLHDSSKSDLPGFYDPGIGEDKILRIEYTYQ

SEQ ID NO: 18547 - DNA, 3021 bp, DROSOPHILA
ctgtccgctcaaaatacaatggcaaaaaaaaaaaaggaagcgccataatcctgcttattccgcgctcaaaggacactttctgtgacccaattatggccatgaaattgtgacacattgaggcctcgctgcattcgccctcgtctttgtacattccctataatccagtgcggaatgaaaaatgactcaatttgcaatggccggcgcacaacagcacaccttatagcggaacacaatccccccaattgccacatatagtgacccatcccatcccattccatccagcaccagtgtcattattttcatttccaccgcagccacagctgcttaataagaagtaattctaccttccacacggttagttagtggaaaatgtcttggcttatgggtggaaattcccccccttttcttcgcatcgacaaatggctttttggtggcatggcacgaaaaaaaatcgaagtgaaaatgtatggatcgcattttccgactgccagatatccgctattgagattcacaacatggtgcaccatgcaccatgtcaaaagttgtttaattggaattctcactggcgtgaacactacgtgcatacgcgttcaacacgatgcgtataaaacaatttacaagcggcagaatcgatgttttattgccatgctggcgatttgcagttcaagtgcagcgcgcaaaaacttgaacttttgtcataaaagttggaatagttatactgaccgattggtgagtggaaaaaaacggcttagtgtttctggtaaaaaaaaaaaaacaaaaatattgtcttattggcttagtatatatgctctgagtactgtgtgtactgagcaagtgtatacgtactattgcaaaattagaatttatgttaatgccgctcttctttatgctacgcgaccagctcgcatttccaattcaatggaagcgcatttggttgaacataaaagactgaactctgattagttgccagtgaaacattacctcgagtggaagcggattgactttagattttcgtttagaatggccgatttactcaatggaaccctaatcatttcggaggatcctgtccgcctgccactcatcggaagtccatggccatcgctgaccatcgtttcgctctatctgctgtttgtcttgaagttaggcaggaagttcatggagaacagaaagccctacgatctccgcagagtcatcagggcatacaacattatgcagattgtctacaacggcgttattctgatagcggtaggtacatagaacccagacggtcataagtcactacagaatgcaccattctgcataatcattaatgtgacataaaaatcagatgatcttataaacttaactcaatgatcttaataaatcttaaaatgatcttaataaattaacatagaggcaacataaaaatatagactgtgttccatacttaccacatcctttgcttccagggtcttcactttttgttcgtcctgaaggcctacgacctgcgatgcatcaccaaactgccgctggatcacgagctgaagagccgagaaagatggttgacctactcgtacttcttcaacaagttcatggatctgctggagactgtgttctttgtgctgcgcaagaaggatcgccagatatccttcctgcacgtcttccaccacctggtgatgtcctttggcggatacctgcacattaccttcaacggctatggaggcactctgttcccattatgcctgctcaatgtggcggtccatgtgatcatgtacgcctactactacctgtcctccgtcagcaaggatgtgcagacgagtcggtggaagaagtacatcaccattgtccagctggtccagttcatcctggtgctggcgaactttagctacaccctgatgcagcccgattgcaatgcctcccgaactgtgatatatactggcatgttcatttccacgaccttcatcctgatgtttgccaacttctacattcacaactacatactgaatggaagcaaacagaagagcgcgttgaaatccgattgaggccgcaaatcctttgaatgacggtgactgtgtgtttcgcgataccgactaactaataaacttgcattggagcactcagcaccaagactctactgggcaccgtattcacagctatctcagcactagccctggccaagttactcgctagtcttttaatatcttgaagtcacttagcatatccacgagttgtggtacttgaaaatcaaagcgtggatagaacgcttcccgaattcccatttaaaatgcacactacggcatacgaatgtaaatgctccatttaaagaaacattgtaacaatttgtgccacttaaggtcgagagcctaatttcgagtttggattagtcactatcaatcgcacaactcgattagattcgccatgttcgctccgatagatcctgtaaagatacccgttgtaagcaatccatggataaccatgggcacattgattggctatctgctgtttgtgctcaagctgggccccaaaatcatggagcaccgaaagcccttccatttgaatggcgtcatcaggatctacaacatattccagatcctttacaatggtctaatactcgttttagtaagtatttgaactggggcttctggacatctgcaggttctgatgggaggatgctacttttacagggagttcacttcctgtttgtcctgaaagcctaccaaatcagttgcattgttagcctgccgatggatcacaaatataaggatagagagcgtttgatttgcactttgtacctggtgaacaaattcgtagaccttgtggaaaccattttctttgtgctccgcaaaaaggacagacagatatccttcctgcacgtcttccatcattttgcgatggcattttttggatatctctactactgcttccacggatacggtggcgttgcctttccacagtgcctgctaaacaccgccgtccacgtgattatgtacgcctactactatctatcctcgatcagcaaggaggtgcagagaagtctctggt

SEQ ID NO: 18548 - DNA, 818 bp, DROSOPHILA
actttagattttcgtttagaatggccgatttactcaatggaaccctaatcatttcggaggatcctgtccgcctgccactcatcggaagtccatggccatcgctgaccatcgtttcgctctatctgctgtttgtcttgaagttaggcaggaagttcatggagaacagaaagccctacgatctccgcagagtcatcagggcatacaacattatgcagattgtctacaacggcgttattctgatagcgggtcttcactttttgttcgtcctgaaggcctacgacctgcgatgcatcaccaaactgccgctggatcacgagctgaagagccgagaaagatggttgacctactcgtacttcttcaacaagttcatggatctgctggagactgtgttctttgtgctgcgcaagaaggatcgccagatatccttcctgcacgtcttccaccacctggtgatgtcctttggcggatacctgcacattaccttcaacggctatggaggcactctgttcccattatgcctgctcaatgtggcggtccatgtgatcatgtacgcctactactacctgtcctccgtcagcaaggatgtgcagacgagtcggtggaagaagtacatcaccattgtccagctggtccagttcatcctggtgctggcgaactttagctacaccctgatgcagcccgattgcaatgcctcccgaactgtgatatatactggcatgttcatttccacgaccttcatcctgatgtttgccaacttctacattcacaactacatactgaatggaagcaaacagaagagcgcgttgaaatccgattga

SEQ ID NO: 18549 - protein, 265 aa, DROSOPHILA
MADLLNGTLIISEDPVRLPLIGSPWPSLTIVSLYLLFVLKLGRKFMENRKPYDLRRVIRAYNIMQIVYNGVILIAGLHFLFVLKAYDLRCITKLPLDHELKSRERWLTYSYFFNKFMDLLETVFFVLRKKDRQISFLHVFHHLVMSFGGYLHITFNGYGGTLFPLCLLNVAVHVIMYAYYYLSSVSKDVQTSRWKKYITIVQLVQFILVLANFSYTLMQPDCNASRTVIYTGMFISTTFILMFANFYIHNYILNGSKQKSALKSD

SEQ ID NO: 18550 - DNA, 14416 bp, DROSOPHILA
taaaagtcagcaatatgtccatgttgggtgcggagagtttttgcctggccaatgatagtgtgttctccagcaccaaggtggagttcgatggcaactgcagcgcaataaactcaacgatgcgtcgcagttttgacaacaaaacgctagtgccgggcggagcagcatctaccacactgatggctgcatccggagccacgctaccatcgcatttgctggaattcaatacatttttggaaataccgctggaaaaatttagctgtacgccgcgcgcctggtgagagcatactttagctgaatgtgctatttccaattaatccagagttcatgttttttccgacagctccttcctgttgtcggccaatccactcatcgtcgaggcccaggagttggcctccaccgttcaactggcaccaggctatttgctaacacccttcggcgctctgcaggaagtccgaaaacgcattttgtgggcgtcagcaattgccgcacacacgtctgagttgaaattgaatttgcagccgttaattggtaagctcgattccgacattttgtctcatatccgtctgatagaaaacgtatcaccctgctccccagttgatccgcacgatttgagactgaaggcgagtcgtcagcacgaggaaattgaccaattgctggacaacctgatggccattggggtgaagactcagttgcagctggaaaaggccgagcgcatctatcagttcctgcttgagaatccattgcgacgctacgttccacccagtaaacgatacaacaatggcagtttcgcggactacgagtccgaattcaatctctactatcgcatgaccaccaatggaagttcgatgcgagcgccacctaattaagtacgttatttgtgttgtgaatactgtagcccttttcaattttaaattatatgaatatcctgtactgttagaatgaaaaaacgttattttaattttttaaatatttttattcatttttttttgttaattttagtttttcgtttgtctttttttttttttgttacaaagtcgaaattgattttactcacacccacacaaaaatttgggtaaaaatgtcttgttattcaaaagaatttctcattgtgcttatgagctaataatgtacacaacttttgttgccttttattcgaatatggattttgcctcgattatgggggttgagatattatttagggaatagtgtgtcgagctgataggtttgcgtaacgaaaatactttattattattaaataaaaataaaatatcctctcaattgtcgaagcaaaatcggaatgcttgtgatgtatcttgcttagattaaaatatttaaaacatatacagtgccagatcagaaagcaaaacggacgggatcaaggtgaaatgcatcgtttacggctgggctggagtctaatttcggtttgagttcggctctagggtgctaataaattatagtctagttatcgttggcccttcacttatcatacttaacttaagacataatattggacgtacaaaaattgggctggactatacggaaacggaagcagaagctacaaaacgaactgagaactggatgtgggttggtgtgtccgaaatcgtttgagacatctattgcgcggttacacgatgtttgttttcgatatatctattttatatatgttttatgcattcgagggctggttgatggattggacctgaagcgcttggagtcgacggccgtgggcccattggcttatctggcgaagagcaacgccgccaggatgcccacaagagcgaacgaagtggcggacacatcctcggctccggcgatgtacgcctgtccacaggccggtgggcacacgggaatgatcgtctcgaagagattgacgcgcgcctccgcctctccaaagcgattggtggccttgcacacataatctccgtactggcgcttctcaacggtgatcacacggagcgtcgagtcggtatactcgtcggcggtggcgaagtgcgagatgctgtagtgctggttgttggccagctggatgtcgtccttggtccacacaatggccggtggcggataggcctcaatgtggcactccaagtccatgtcgtactgcagagcctgtcccaaacgaggacgcggcacggtgatcactggtgcgaactccacctccacgttgatattgcgcctgtcgcccttgctcactccattgtcggccacgcagtagtaggtgccgcgatcctccttcttcactgacttgatgcgcagggtgttgcccacataggtggcactatctggaataggcaaattggtatggatggattgggttattgcaattagatttgggtatgattttaagcttcctattacattaaaacccgaatgtatctgcatactatctcatcaaatattgtagtatgtattgtaattttgtttgaaacctaaacgatttagagaataagtaatatgtagtagcgatctaataatacttcaaatcaacgtagacaattgcccttttgtatgtggtgtaaccatttccattatgggtttaatcttattcgctgtttaaatgacgcgcgttcaagtgcgaacacatccactggccattaatggagcagctctaaacgctctcggtgctccatctattgtgtttgtgcagcgggggctgagtcaaaaatccgattttaatgagccaacccgcggcacatccgttggcacttgcgggtgaccttttccagtttttcactgtccacggatatggtcggtggaaggcgagcagcgaaacaatgacagcgttaatgacctctaacaagtaaagcattttgtttgggcctctgctcgtttgcactgccaactaattttgaaaaacggagtatgccagcgccactgcacttagccatgagtgctctaaaggatggggggatgtccatgggttcggggtgcgcgctaagcaactgaaccgtgaacgtgaatgggaataggaataggaattgcagtacgaatgccaaatgccaaatgcgaaaggtgctctgggttcataaccggaagttggcttagctcaaccaggaatgagtggggtgtactatatatgtatgtagcatgtggtatgtgcacgatgcagtggaagcgagtgcaatgagcctagggaactggatctgctccctcctccactcacacagatacgcccgcttatgtgtgcgtgtctgtggctgctcttcaaacatttgccaaaacaattcaggctcaaacaattgacacaaactacatggagcagaagtacacagggagaaaggcttggcatcttttaaaaataatgccaaagtctattgagtatggaatttttaaaccaccatctaaaaactttatttttattcaaagtatagagatacaaaatgcagtagatctacaaatacagcttgaatttttgaattatccgaagattcaagtacttttttttgagtactaaaaaaagagttggcatccgatgggatgttgaggagccgtagaaacatcaggagcattgaccaaagctccggaatgctctgaaaatatgttttgtgcgaattgcacataaatgcgggccacacgccgaagggggagaattcaagtgcggcttgtgcctgctcaactgaaacatttcaaattaattgcgcctgggaatcgaagtaacacatttcattaaaattggattgacagcccctgccacccatgccgcccattctccccttcgaccctactataaacccaagcaatatgtgatggcaatgggttaaggcggtggcccagcaaacaactgcatcggttgacgaacgtaaaatggcaccatgatgcgggcatctgagaaacaagcgcaaccaactcatttcaatattagaaaagcacacacaagctgaaataaactcccaagtaatacttatgcacatatgtacatatatctactactatgcatataaatccaaagcagactttatgaaatgggtgaggggcagtggaggtatttgttcaattagtccaatggaagatgattcacttcgcattatagtgtcttgacagaaatacatttgtgtttgtacaaatggacgggagcatggagtggttctataatggtctatcgagaaggaaaaatttagtaggatcggagtaacccattgtcatcaggactgaaatggttgtttgtatagactaatgatatataaaatcactaagtaaaagtaagtatactaggaatagatccgctcttgctgaatttttagaaatacgaacaatcgggttcaccaataaaaccaatcgacgataattcatttcagtgacatacccctacgacaactttaacctaaaacatagcccactcgcatcaataaagatgcaagtagttaaagttaactagtctgcctgcccagcgagtagaatcatcagttgcgtttgtaatttcggagcgtttactgtgactgccccgagagaccgggcccaaaacaggttctttctgtataagtctagcccagaagtcatctcggtttctgtttctctaccttgcagcgagctgtgagttcagcagcctgactgcagctctagatgtgcattatttcaccagatagcccttgatcgaacgcagttgtaatagctgtgcgtttatggttcacagggaaggcacaacccactcgaaatacaaatgcgcaggcgcaacatggtgttaaatgctaccactactttttattttatttttttccagttgtttttgatggactaccgcacagtcagcggactgtgaaatgatatgcaagtcaggtacgaaaagagcccaggaatttcagagcttcaaacgttcccaaacatttgtcgcctgtaaaccgttttaccgttttttctgctagcatgtaaaactttgaaaacccctttttttaatgtggaggttgcgcatgcgcgtaagtggggcgtgtcagaaagtggcaatatttaattgctaattagctatgcgaggcaaacaaaaaaccggggaatagtcgtacgagcgaatacagctgccagtttcttgagtacgagacatttctcattctccgcttgtaattaatgcagaatgaatgccatgaattgactccagacgcgatgcttgcgacacttttgagggttcaaattcatgaactggagcattccagtcaagtcattgaaacagaacaccccaaaatggatgatgaatccctgggttattagaatttgagaaagtcaagagtcgaaaattagaaaacattgttgtaatggcgtcgagttacgaaaaccagactcatatatcactcgcaaatcagctgaaggcaagggttcaacgggattggattggatctaaatacctcgtcctcgtcgatctactaaatgtgtgtgctatttgaaccttggcttcatcctctgtttggtattccctaacgtgctgtttcaataaccaaccattacggattgacaaattaagagtgaatttctgttcaatcaaactaatgagagcccgcatcccaggaacctacaaaagatgcatattccatatacatacagtatactacagtgtgcagcggaaacagctcgctcctccgtatcatgccaaccatcatccatcacacggaatggtgtggagtaatttcagttactaatgagagaattaaaaacactttgcaccaggcaggatggtgatgatgctgcgtccatctctgactcggcaatctctgacaactaatgaaaggaaaacagaaacagcaacggcacagaaacaggaaagatggaaagatggaaactcaaaaggtaatgaaaacgccgacttggcaggcgggcgggtccacatttgttttaggcccttccttcagggaaacctgtctggaagtctccgcctgccatcatgcgaaatgaaaacaacgttgctaacgcaacaccccttgtttctggaaccccgactgccgactccggatccctctgctccctggacaaacaaccagagataaattgtcagttgaaggctcaacgaaaaaagagccaaagaaatggaaaattgtgcaaagctagaggtgagaattcagttttttttggtcagggaaaaatgtgagaagtgcaggtagataggtcctaaaaggatgcaacttcgctgagacgctgcacagaaaacggaaaatggaaaatggaaaatgcacggaacaggtgtaggtgtaggttctagcatgactgtccctatatgaaccgccgagttctgaaagtctctcggtctcctggcttcctgcttggatgactttcaatgagcgctcgcttggaaaattggtgacaagtagggatggtggaaagggttgctggttctgctaccgtttctaatgtttcataaactacttaaagcgacaaaataaaaccccgccgttgagcgccattttgtgaggtgacagaaacaaccacccaaaagggctggaaaaagggaaattgagtggcatgcaaaaaatatccgcaccaatcacagggccagacgctgtttttttttttcaaacccccttttttgtacccgccgagcgggaaaacgtgtgagacgggcaacaacaacaactagccaaaataacatttgatgcaaggcgctttccctttccgcggcaagtcgtggcccgcggccatatttgttctttccccattcaatttcctgcaatttggccagcaactccggcggaaagtctaaggaaaattcaggaaaagcctgtctatctcgttctcttgcagggcccttcaaatgtcaactgactccatgaaccgaacgttgccatgtggaaattatgaatgttaatgcagcacgtcaacaatgtgtgactcatcataatttaaaacacggactggcaaaggcaaaggcaaaggccacatgccaaatgccgaagcgggtgcgcttttaatgacgctccgcattacttgcgcctgctgcacacatcccaaccgaaatgaaaaacccagacccagtcccagtctcagtcccaatcccaaacccggtcccaaccacccaacatatcatggctcccgggcatgtcacagatgggtcatgtggcccgttctcctggatacgtgccatccagtttggtttggcaaaaatccaattaaaagagagcacacagtgttttgattctaacacgattttcctattttttttttcagagtagcgctcgtgtatcaatggatgcttcacttaaacggggattgattgcattgtgatgtgtgtgtattgcaaatggttgtgctcaatcagcaaataccgaattgcaaactgaaaactgcaatagcgtgcgtaaaagttgatttagatgttctatttgttattttatttccttttgcaactgcaaaatacccatataccaaattaaagaggtaaaactctgctagaagtgaagttacttgggttaacttagaaaaaaaaaaacctaaccaacccgcctgtgacttccttttatgactatttttgcttcctcaacgaaatgaaatgctttcttggcccagaagtcaagtggtttgagttgattaaacccacgaagagctttaacgcagccccactccgctgacagcttctttcattgattgcccaggaacacctggtagatgcaacgccagaagcagaagcagctccaaccgcctgcaatcttgtggaaaaattgcaaggctctgcaaatttgtctcctcttcctgttttgtcacccaaactcatcacggaatcatcaacatggttgtgatggggcatgggcttggatgtggcatgggttaggagtgcctgtgtggagcggggaaagggcttcacttgttctggctgatgttgctgcaaccgccgcacatacatatcgagcatataacaagctcttgagacatgtgaatgcacccactttggtgggccttcgccttgaaaccgcaccaagtgacatggatccaccctcccggagtccggacagcaagccacccacaattcacagccgacaacccaccgacagacaaggccacagacgctggctatgttgttgacttttgaaaagtgattttcccttctcgagtagtacattatagctggccgagagttatgccgcctggtatgccatttattggattacactccacttcgctgcactccccttctcagccatctcaggaaactcactcaattgcagactgtacttgctccggctttattccgaaaatcataaatcagggaattgtaaggaaaactattaaaattgtaattatgccaaaaaagagagagctgcaagaaggctgaccgacgtaaatcccttgtgagccgagtacctaaataaatattggctaagtcccaaagcaaacaattcagatggctgggcgtgtgagttgggtcggaaaagccgcgagtccttttgtgtgagaatgtgagtgtgataaggattaaaaagccggtctgaaggtgaaacatgcagccaagagtgctaaacaaataagggaattgccacaccaagaatgtatgcaaagtgaaagggattctcgcagggcaaaacggatctttgatgattatttattcatttagaaatacgggtatctacgatgttttcatagatagcagtacatttatatacaaatagttttcatgtacgtacgaacaaataataatataacatggataatgatacatattgcatttgcaagcaaaaactgctatatatattgtcgttgaaaaagtccacgaaaagtggctaggaacatgaggaatggcctcatggacacatggaaaatggaacgatttggtcgtgcacttcggctattaactaacaagttattacttcgagctgagtgagtgccacaaagggctgactggctgactggttggctgttctggcgattctccgcattttgcggctgactgaaagccgccagttggccccatgaaatggccatgttgaccaagtggtcgttgccccagcaaccaacattcacaaacaggttttcttgccacaacgcttcttctacgtcatcgccgtttatcgtgttccatgttcccgttctcgttttgccttcgactttgagttggccataaacaatgcagcgcgtttgcaaacaggaagaggaaacggcagcaggacaaataaaaacagagcgaccatcaaaggattcggaccactcctccgaattgccaccactccgcttcctaattgcgagtgagtgtgccaaacctaattgcttgcaaatattttgaaactcaaacacacagctgccgcctgtggcatctgaggaatttcattatgcacagcaagcgaatatgcatgatttccattatccatcaaatttaaagggggggccaactaatctcgtgcacggcctgttgagatctcgagtttagcatcaattgcgtatcgaaatgtttaagcataaatattattaccattaagactggcacccttgcgtttgatggcaaaattggagtacttgatctcatgctcacttgagtctaattcgcaatttgccagcaaacgcaatttgcatgaaagttaatcaagaattttcaccgagggagagttttctggacaaatacatagtactccgccgtagaccgcgtttcaggttcagacaccccgaagtgatctgtgcgcgagattctcgcgcataattgaacaattaaagttaatttagcatgatcctcgatccctcgacgagcgataagtatctgaaagattctccgcttccgttcggaacaacaatgccccaatacgaatggcgacagctgccagccagcgtttgaaaattcagcaaaaagtgaattcaatttcgcgttgctttctttgcagctatcagctatcagctatgagccatctcttgttttcattcgatgggccaaggtgaggtttattatggcagccgattttgcatggagcagcagatacacatgtgcttatacggcagattgccccacggtgcgccgggttttcaggtgccaggtgcaaacactgcatatgtctgtgtttactcaatggccatctaccatctagcaacttggtttacccattcaatgtaacatacatgggttataccttaaaaaaaaaagtgaaaaataaccaatcgatttgcatggcaacgcacaaattggcatggacccgggtccctcaacaccccgaataccaaagaaccggtggactggcgagcggaaacgcttgattaggggttcctcaatgggcaccacagcctgggcgggacgaaatgcgtttccaaccggctgatgggatcaggggttgtttagatggaggggcatgggcatggcatgggcatagaagggctcgaaccgctcgcggcttgtttgtttgcatctcttacattgtactcgccccgggaaccgccgacctttgtttgggttacctttttagcttgtaatttatatatattttgtatacttcgattgtattttgccggctatcaaaataagaattatgtagccgagcaatacgaatggtgggaaggggaggaggtgtggtgttacccagggttgtgggcctgggagattcttttgcagggggcgcagcccatttgccatgctctcaggatccctttgtttgcgtatgtttgctgtttactcgttccacctctgagtttcatttttcagctttttcatttttcatttttttataccacccaaaagcccagaccgtgtctgatgtgtaagaaacagccctctgccgcaacgtttttgcacgggttgtttgcccggagtcgcagagtcgcagagtcgcagatgaggagacccggagaccatcaaacggtccgtggaacgttttcaagttgcggaagcaattgcgcgtgctgaagttgtcgaatgcctcagaaactcgaatgggaatggaaatgcgaaacgtgaaaagcggcacaaaggctgtgcagtcggagctcctcgtcacgcccacctctgtgtacacctctatgtcctcgatggcctcggaactgcaactcccccaacgacgatagcccttggaaaacatttgactcggctcgttggcgcatttcaaagcgctgctggacgtgaaactgtgctgtttgcctaagcgctttaaattagagcgtggaaaagtgtgaaactcctggcaaatactggacctcaaacccggagccctttgatttatggcggaataaagttaagccattcctggccagccgtggagcgtatccaactggttgcggttgggttttatagcttgtaacgcggggcacgcctggtttttatttcatcatttttttgttttgaacccacagaaggagccctcaatgccgtggcaattaaagattgcacaagccgaagctgatagctgatagatacaaagccccgggaattaagctggctatcggatgtaacgaagcccaggtagggtgtgtccgcgagtcggttctgggtaatgagtaactctcggattagttacactaattgctttccaaatgacgctgcaatcttgttaaggacagccattatgttttgcccgagggtcggagttcaggtaaagatcgcatcgagatcgctatggaacagcagcacctgtatgggattaacctagcgagaagattctattgttccatctacctgggcaccaaattactttagtgttttattagcttttctcttcctttcgagaatttctggatggacaagtaaacgcaaacaatttgtagatagcatttgcacttgtccgaaacggagtttcccgagaaatatggaccgttttcttggaatgggaggaacataaagaaggtgaagaaaaataaatttattatttctggcatgtacatatataacccccccatttgggtttttccaaactcgtcaagtgtatggataagaaatttcattttgcgcaaatatcgatgatacattattctaataatcaaaagaacatgtatttatacaaaagccaaatatcatacatatgtacgtgctgatttcttcaaaagtaatgaataataaaatggatttagaaagagagaagctagaattgagttccttgctaagttaaataacaatcaaactttttcgcacaacttaatgtattcttgagctaacaaacttgctagaaattagattttcccttgttatttggttagacctctttgcgaaacaatcttctaaggcccaacaaggtaaacaaagggtagcatgtgtatgttttcgaacgacagaagttggaaaacggcctaaaatgaaaaatcaatctgctgttgcgaaactcagccctcgaaacaggtggggggtggcagggcagggctagaccccgtttaccagaacagccagcccaagccgagtaaacaaaactgaaaaactaaggtgacgcctgagtgagtcacggtcactcacactggagcccagagcatcgagcccagttaaaagcccccattcccagccatcccagctaaaacctaatgccaaagcgggacggacagagctacctgaccagagagcgggagccaagagaacggagagagagagagagcgaagagggagagagagaagtggagaacgcgccccaccaaacgaaagctgacttagccagcgtacccagcgtaacccaagataatcacccacaaataaatgaagaaactcaccagttggcagaatggcattgttctcgcgcctccaggtgatggtgggtgtgggatagccgctggcgtagcactccatctggacctcgctgccctcgctggccaccaccgactgcgtggagttgtccgagatgacggggggacggcgcaccgatagcttcacttcggcgctcactttgtgaacggtggagatcaccacctggcaggtgtaggtgcccgcgtccgtctcctgaatgtccttgatctgcagcttgtaggtggacgagttgggatcgtaccgcagcgagaagcgcgaatccttgatgaccagcgtggagcccgtggagaggaagacgggatcgctgtccgtcttcaggaacagcacgttgtactctttggcatactggacggagcaatcgaactccactgtgccgccgatatccttgatctgctcctgcgtgatgtaggatatggtcggggttcgctgtgctagcgtttgctgcacaaaaatggccaggagcagggtgctccacacgcaattcgagatactcggccgccacatcttagaaattgacttttagcaccacaccctgcaagcgcgcgatttaatatatgtagtgtttctcaagagctgcgctccaagatctcaatcttctccaaatagggtgagagcgcggcgaagacgtctccaagaaaccgaagacaactattgccgtttctttcttgagcacagcaaacgcggatgctgaactgcagtctccacacttgtcttctcgctcagagctggtttcagacttcttctctcgatcagtcacgagttttggccaagacggagataacgcgccggagagacaacttcacagttcgaaagtcgcgaaacgaatgaatctctggctttgaaaagtgcgccatcaagagcgcaacttgcctggagatgggcaccttgaatgtgcctaaataaagacagtagtgttatcggtatgcaacatagctcagactcaaaccagagatagcatatggttgatatactaagtggagacacacactcgaaaatcagatggcaacgccattcctcttggaaccaatggcatcctcaaattaatttgaaatttaaaatgaaatttcaagctagtaacttcatttcaaaataaaaacgttcattctttgtgattgtttaaaatgcctttttatttaattttctctttcttgttattttattcagtagttatgtataagttctataaatgtcggattttctctatatcgtgctctatgccgttacgattatatggtataacttttttgtatgaatgcatattataaatggataatatataaatcgtgtttagtttttcgttttagtgttcaacattgggcttctctttcatgtgattcaaatagttgttggctttatcgtatctcaaagtgtataatgtatatatatatataatgtagagcatttagaatttgattttaggttctcaacaagttgctagttattaagtacataatatgtcaatgtctatatcgtatttgtattacgcattacgtgatttgattttccatttgttaagtttcttggtaataaatatccgctgacgggggcgcttacacaatctaaaagccaattacgaatcgcggaaacctaaaattaaaacaccatacctcttattgccctttagcagtacgatcgtaaaagtttcaacgagattcaatggttttgcgacttcgaagagcagtgcaactgcaagtcttttttatcagctatattcatatcttttgcttcagtaaaataatcatatagatgcatatatccgtttacatatctgtgttttctgtgtagatagcaatcttcaaagtataaattataatgatt

SEQ ID NO: 18551 - DNA, 2131 bp, DROSOPHILA
cgcgactttcgaactgtgaagttgtctctccggcgcgttatctccgtcttggccaaaactcgtgactgatcgagagaagaagtctgaaaccagctctgagcgagaagacaagtgtggagactgcagttcagcatccgcgtttgctgtgctcaagaaagaaacggcaatagttgtcttcggtttcttggagacgtcttcgccgcgctctcaccctatttggagaagattgagatcttggagcgcagctcttgagaaacactacatatattaaatcgcgcgcttgcagggtgtggtgctaaaagtcaatttctaagatgtggcggccgagtatctcgaattgcgtgtggagcaccctgctcctggccatttttgtgcagcaaacgctagcacagcgaaccccgaccatatcctacatcacgcaggagcagatcaaggatatcggcggcacagtggagttcgattgctccgtccagtatgccaaagagtacaacgtgctgttcctgaagacggacagcgatcccgtcttcctctccacgggctccacgctggtcatcaaggattcgcgcttctcgctgcggtacgatcccaactcgtccacctacaagctgcagatcaaggacattcaggagacggacgcgggcacctacacctgccaggtggtgatctccaccgttcacaaagtgagcgccgaagtgaagctatcggtgcgccgtccccccgtcatctcggacaactccacgcagtcggtggtggccagcgagggcagcgaggtccagatggagtgctacgccagcggctatcccacacccaccatcacctggaggcgcgagaacaatgccattctgccaactgatagtgccacctatgtgggcaacaccctgcgcatcaagtcagtgaagaaggaggatcgcggcacctactactgcgtggccgacaatggagtgagcaagggcgacaggcgcaatatcaacgtggaggtggagttcgcaccagtgatcaccgtgccgcgtcctcgtttgggacaggctctgcagtacgacatggacttggagtgccacattgaggcctatccgccaccggccattgtgtggaccaaggacgacatccagctggccaacaaccagcactacagcatctcgcacttcgccaccgccgacgagtataccgactcgacgctccgtgtgatcaccgttgagaagcgccagtacggagattatgtgtgcaaggccaccaatcgctttggagaggcggaggcgcgcgtcaatctcttcgagacgatcattcccgtgtgcccaccggcctgtggacaggcgtacatcgccggagccgaggatgtgtccgccacttcgttcgctcttgtgggcatcctggcggcgttgctcttcgccagataagccaatgggcccacggccgtcgactccaagcgcttcaggtccaatccatcaaccagccctcgaatgcataaaacatatataaaatagatatatcgaaaacaaacatcgtgtaaccgcgcaatagatgtctcaaacgatttcggacacaccaacccacatccagttctcagttcgttttgtagcttctgcttccgtttccgtatagtccagcccaatttttgtacgtccaatattatgtcttaagttaagtatgataagtgaagggccaacgataactagactataatttattagcaccctagagccgaactcaaaccgaaattagactccagcccagccgtaaacgatgcatttcaccttgatcccgtccgttttgctttctgatctggcactgtatatgttttaaatattttaatctaagcaagatacatcacaagcattccgattttgcttcgacaattgagaggatattttatttttatttaataataataaagtattttcgttacgcaaacctatcagctcgacacactattccctaaataatatctcaacccccataatcgaggcaaaatccatattcgaataaaaggcaacaaaagttgtgtacattattagctcataagcacaatgagaaattcttttgaataacaagacatttttacccaaatttttgtgtgggtgtgagtaaaatcaatttcgactttgtaacaaaaaaaaaaaaagacaaacgaaaa

SEQ ID NO: 18552 - protein, 359 aa, DROSOPHILA
MWRPSISNCVWSTLLLAIFVQQTLAQRTPTISYITQEQIKDIGGTVEFDCSVQYAKEYNVLFLKTDSDPVFLSTGSTLVIKDSRFSLRYDPNSSTYKLQIKDIQETDAGTYTCQVVISTVHKVSAEVKLSVRRPPVISDNSTQSVVASEGSEVQMECYASGYPTPTITWRRENNAILPTDSATYVGNTLRIKSVKKEDRGTYYCVADNGVSKGDRRNINVEVEFAPVITVPRPRLGQALQYDMDLECHIEAYPPPAIVWTKDDIQLANNQHYSISHFATADEYTDSTLRVITVEKRQYGDYVCKATNRFGEAEARVNLFETIIPVCPPACGQAYIAGAEDVSATSFALVGILAALLFAR

SEQ ID NO: 18553 - DNA, 4093 bp, DROSOPHILA
tcgcgtggacattgagactccagtgcgcaagcgtgaaatcgagacggcggttgcctcgcccaaccaacagcatgtgccatcggtgaacaaggcgggaaaagaggtgtactatccacccggacacgacaccatcgtcatgaagcgcgaggagatgcatgctggatctgcctcaggcgtgagtattggatacttaccaaggtggaatatgcccaactgataatcctacatccacagggtcgctgggccaagggatccggaatgtacgagtacgagtccggctcgaagtcaaagacgaaaaccaagtccggtggcgccgttgtgcccgtgtgcctgcccctctgctgtgccatgccctgctccattatgtagtgggcggacatcgccggaagaccgtatcttgtacataggtttctaatatttgccgttaatagttctaacgctaaatcctgccccgcgtttttgattgctctctactaggtcgtctaacttctatcgggcttgctgcttgtcaattggttgtacgcgtaatttgtttgccaaattgtatgtctatatatctatacgttattgtctatgtatataatttgtgaagcgtcatctacggatgggccggttgttataccattttattttggatttagtagttcaccccaaactagtttgctcaaaattgttgctcaagcatttaaattcgccagtgggatgcccaaaaagtttactcgatgccaattgttttaacttaaatttgcataccgcataccaaacactaataaatgagccgtggaatccaattccctctattattcgtttcgccagcgcccccaaatacccactaatcataaaccataatcgtaacagcgacttaaaaggtaactcagtcgttacagagccataaatactatttctaatacacgtagtaaccataataaaaaacgagatctaacaaacgaagcgatgaactgtttgaatgcctcttttgaatggatcgatttgcgtggggttttggtatagtaaaagtttttataagtttattttggtataaatcgttctgatcgaataacaatttgcatatcacaaaagtaatatctacatttcaccttgtaggaataggtgtagctttcttttgagaagttattaaaaaacactatagtgaaacaacaaaaaactaaaaacaacataaaacaatacaaaaatcaacagaggtatattatttagataagtatcattgagcactttgagtagtgaaacgggaggattattgctacagagacgagttcttattgttgttcttggattacgaattgaagctaaatgatggattaaaagtatactacatcgtaatatgagtatagttactggacttactaccatacacacaatatgtgcctaatattctaaccatgccgccatgatctgtcattctattaaaagagactaccgtttgtgaaagtaatgttgtcctttgtacatacgcatatttgagagttggaaaggtcacgtattgtaacgctgtcttttatgcaggctaacttttgcgctcggagttctttagctctgctaagtaccaagtgaaagttggaaattgtttgatgctgtagatagaatactttatcgagttgattccatcctgttctattttgctcatgccattctgtaagttttcatagctgtcaaaaaaagaagggtaaaaattccatatttgttagtctaaattatggataatagtatggtctactgaccgcttaggattggccttttccttctgatgcttcagcatcttgtagcgagctatgttgaccggataccttgatatgaataggtttgcgtgcttcaacctgttggacatgtcgtcatcctcgccgccccagccaaagaacgagtttgagaacccatttacggcctgaaagtgctcacgcgtcattgcggaaacacctccaaatattgatcgataaggcaacctataaagaattgaatcaatttaccattgatagttgttatctctttgctctacttgcctgaagttcagcgtgtctatagccactgacatgtgtcgcggctgacgtggacagttgtaaagattgcggtcgtccaaaggcagaagatcgacatcgtggaatataaaacaatcccactggtacagctttaaggcctccaaataaccaatgttcatcatggcagcccgattaaagggcttcccgttggtctgctctacaatgaaaatgcgataggcgatgcgctgcttcatcagaaatgggtggatgttgcgcaggaaaagtaatagatgggcgtatcgatcgcggaagggcacaacaatagccacgtgatgctgggcattgcagttttcaggctcgaaggcgccaccagggcgcaaaagaggtccaagctccgcctcaataacgtccagtgactccagtgtcgtgttgggcgtgatgggtccacctaaacaaggtggacgtattttaaatcgtgctaaagaaagagccaagccgagcttaccatcacggggatcgggatcagtgcagttggcaaggagggcggatgtggatttctgtcgcgggggcaaaaatttctttgtgcccagcaggaagcgcgttaagtcttgtggaatggaagtaaagtttgccgtggcaatcacagttcttatggtagagttgggtccgccattgagctcctggtcccgctctctgtcttttgataaggcgagcggggaagcgggcagcctggatgcttcactgcctccggctccatcgctgctagcgttcccgtagatatgagcatacttgtgcacgcgccgaatgctaatatccgttcccaaaaataattgataagataacctctgccaaggcaatatgatagatttagttacctgagcttgctgagggaggtggcgctacctccgtcggaacggaagcccacaaagttaagcaccagcaacaagcatatcgcgccggctaggaagcgtatgagattcgccttggtgaagaggtacatggtccgaggattgcatcataccttgctcgacgcccaggcgctgcgaactggcattttcaagcgcaaaacgttcgacaaccgaacaaaaacgttaaaattcgcaactccagggttcaatcagaaaagtcagctgagagtccccctcgaccagggttgccagagttgcgcaattgctgcagccataaatcgccgactgccgatagtttgcaggcgccaaattcaaaaaacaaacttcacagcatatttttatgatctattattactaaaaatattaaatgcattttaaaattgaacgaaaatctaaatgttttatctacaaaacaatgaatacatataatataaggcaaattaatttgttattctaaagtccgaagttctcttggttttgtgatttattgcgctgttcggatctcgtaagtatcccaaaaatagcgagttacagagtggtattgtaaactggggaaatatacgatctgacatttgcccccaagtcctgggaatgggtcttttctatcaagaatataaacaagttacaaacacaactgaagatttaaactaattgtcgtgcagagcagtaaggccccactatcctgacagcggttgtcgcagcggcagtcgcagcgcctcgttgtccttgatgtgaatcacttcgaactggttttgataggtgtactctatccgcagaatcttgtcttcgccgatgcccggatcatagaagccgggcaggtcgctctacaaagacgtaaggaatggtattatatcaacccagaacacaatcagtgaaagtgtctcacctttgatgaatcatgcagctgcagggtcccgttcttgaccatgcattgaatggctacggtgacgtcgagcgattgctctggcttgaactgtctgccgcccgccaaggtacagccgtagacagctcgtgtgacaatcagcccattcctcgccagctcctccgtcatgatcctattgtacgtggcctgcattagatgaacggcagcactcgcctcgtgcctcttggcggacagtctctgctcattctgacgcttcgtcctttccacctcgatgttctttcgctccgcctccattgggtccatcacagtcc

SEQ ID NO: 18554 - DNA, 1839 bp, DROSOPHILA
gcgaattttaacgtttttgttcggttgtcgaacgttttgcgcttgaaaatgccagttcgcagcgcctgggcgtcgagcaaggtatgatgcaatcctcggaccatgtacctcttcaccaaggcgaatctcatacgcttcctagccggcgcgatatgcttgttgctggtgcttaactttgtgggcttccgttccgacggaggtagcgccacctccctcagcaagctcagcattcggcgcgtgcacaagtatgctcatatctacgggaacgctagcagcgatggagccggaggcagtgaagcatccaggctgcccgcttccccgctcgccttatcaaaagacagagagcgggaccaggagctcaatggcggacccaactctaccataagaactgtgattgccacggcaaactttacttccattccacaagacttaacgcgcttcctgctgggcacaaagaaatttttgcccccgcgacagaaatccacatccgccctccttgccaactgcactgatcccgatccccgtgatggtggacccatcacgcccaacacgacactggagtcactggacgttattgaggcggagcttggacctcttttgcgccctggtggcgccttcgagcctgaaaactgcaatgcccagcatcacgtggctattgttgtgcccttccgcgatcgatacgcccatctattacttttcctgcgcaacatccacccatttctgatgaagcagcgcatcgcctatcgcattttcattgtagagcagaccaacgggaagccctttaatcgggctgccatgatgaacattggttatttggaggccttaaagctgtaccagtgggattgttttatattccacgatgtcgatcttctgcctttggacgaccgcaatctttacaactgtccacgtcagccgcgacacatgtcagtggctatagacacgctgaacttcaggttgccttatcgatcaatatttggaggtgtttccgcaatgacgcgtgagcactttcaggccgtaaatgggttctcaaactcgttctttggctggggcggcgaggatgacgacatgtccaacaggttgaagcacgcaaacctattcatatcaaggtatccggtcaacatagctcgctacaagatgctgaagcatcagaaggaaaaggccaatcctaagcgctatgaaaacttacagaatggcatgagcaaaatagaacaggatggaatcaactcgataaagtattctatctacagcatcaaacaatttccaactttcacttggtacttagcagagctaaagaactccgagcgcaaaagttagcctgcataaaagacagcgttacaatacgtgacctttccaactctcaaatatgcgtatgtacaaaggacaacattactttcacaaacggtagtctcttttaatagaatgacagatcatggcggcatggttagaatattaggcacatattgtgtgtatggtagtaagtccagtaactatactcatattacgatgtagtatacttttaatccatcatttagcttcaattcgtaatccaagaacaacaataagaactcgtctctgtagcaataatcctcccgtttcactactcaaagtgctcaatgatacttatctaaataatatacctctgttgatttttgtattgttttatgttgtttttagttttttgttgtttcactatagtgttttttaataacttctcaaaagaaagctacacctattcctacaaggtgaaatgtagatattacttttgtgatatgcaaattgttattcgatcagaacgatttataccaaaataaacttataaaaacttttactataccaaaa

SEQ ID NO: 18555 - protein, 403 aa, DROSOPHILA
MYLFTKANLIRFLAGAICLLLVLNFVGFRSDGGSATSLSKLSIRRVHKYAHIYGNASSDGAGGSEASRLPASPLALSKDRERDQELNGGPNSTIRTVIATANFTSIPQDLTRFLLGTKKFLPPRQKSTSALLANCTDPDPRDGGPITPNTTLESLDVIEAELGPLLRPGGAFEPENCNAQHHVAIVVPFRDRYAHLLLFLRNIHPFLMKQRIAYRIFIVEQTNGKPFNRAAMMNIGYLEALKLYQWDCFIFHDVDLLPLDDRNLYNCPRQPRHMSVAIDTLNFRLPYRSIFGGVSAMTREHFQAVNGFSNSFFGWGGEDDDMSNRLKHANLFISRYPVNIARYKMLKHQKEKANPKRYENLQNGMSKIEQDGINSIKYSIYSIKQFPTFTWYLAELKNSERKS

SEQ ID NO: 18556 - DNA, 4909 bp, DROSOPHILA
atgtatatacaacaggatattctgcacgatacttatcctgcagctgatgcattttctccaccagtttaaccactcccatcgagtaccacgcttcttcgtaaaggcgcatgagctgcaagacacggcggtcactatatctatcagccgggtcaggcatccttaactgaataacccaacgcatggaatcattggcggccacatcaactcgctcatcaatgaatacaccattcaagccgtatacgagaaattttttaggatgcaaaatccactgattgaccagttcttcgggacgaggattcccgtgaagctttcgcgtatcctccttgcaggccttgtagtattgtcgcatttgctttatcagtcggggtgccagtgtatcgttttcacccaagtggctctccatgaattccaccatggcagtggcgaactgatcctcgactcgctcaaagttgtccacatatttagaggcactggagaagcgaccgcaggcaaaattccagaaattcgtgcacggtgatgttgttctattgagattattgtgaatatcgttcgacgttgccacgttgatgtccactattgcctggatgggaatgaataatgccaccaggcaagagcacagtaaaagtaaacatcccattaagctcgctcgattcacaatgaaacaacagattatcgcaacgctctgctgagctcggccaccttcgaactacctatagagctttggggctgatagtgacagcttggtcaatactagaattcacatttgaaatgtagagcaattacctctaatgaaatgtgcctgccacctatataaacccgcttggtgagtacattaaaccgatcttaacgtttattgaatcttaattacaccgctgttgtagttcaatcttcaatcgttcgctaagacagttcgcaatataaaattggtaatcgcgtcgggactaccccaactatatgtcacacgcttatagtctacttaacaaaactggatctaaggtgttcacttcttgaacttttgcttctttcccgcattcgcacccgccgtggactttttcagctggccgatctgtttggatttttgcttcagcttgttctgcttcttgatgggttttccctcgagaatgggcacatcgtcgatatccactcgcggcgccttggccagtttggcgtttcccttgggcgactgttttcctttcggctgtggcttcgttttcgtttccttaattgctgatttgctaggggagtttgtgccattggttgttggcttattgtcatctggtttagctggtgatccggctccattttccttgggttgcgatcctttgttctttttattgaatgatttcgcatctgaattggaaacagtggttttcccattggtttgtttttgtttaggtgcagacttggaaggtgactcgcttgaatttgtttgcttgtccggtgcctgggatttctcatttttcttctctgctggcttttctggctttggctttttgacaggctgctcaaacaccttggccacatacttggtcttgctctcttcccgcttctttttcttcagttcctgttcgatttcggtgaaactgggttttccggcgcgctttccaagcagttttcggggacccttctcctttgacgctacctcctcctccacctcctcagactccgcagccgcttctgtagtggcgtccgcttcgatggcctcatccagctgcttttcatcctcctcctgctgctccttagttatgggtatggtgttggagaatttcttgagcttggccacgtagaacccgtccatgttgtgggtgtgcggatagtagcgcttggtaaggtttaagctaggatggaaccgatgctgacggaatttggtaaagccctccacgccgaagtccagaccagtgggcacaagtttgacatttcgcttcttcagtgcatagtcgatgacccattcgttctcctcgggcaacaccgaacaagttgagtatacaatgtagccgccagttgatgacttcgcatccgtacaatctatggcagtcagcagaagcttcctctgcaggttgtagcacctttgtacatctacttccgacttggtggtcttcacactgggatccttagagacgacgccagttccagtgcacggagcatccagcaggacacggtcaaagccagtcataatattccggaacttagtgccatcctcgcagctgaccactgcatttacaattcccaggcgatggaaattggcaacaatggccttgatgcgatccctgttagaatcgttggcgaagagcacaccagtgttcttcatgatgcttgcgatgtgggatccctttccacctggggcggagcacatgtccaggatgcgttcgttctcttgcggggcgagtgccattacaggcaacagcgaagaggcgccctggatcatgtagtggccagccagatactctggagttgcacccagtggcacctgtgagttaaagacaaccaatccaactttcgtccatttaccaaggggatccaagttgacgccacgattgatcagagctccggccaaatccctacgacgtgtttttagagtattggtgcgtatggttaggggacgagcaatctaaaggggttaatttttaatgattaatcttgtaactatattttttatgaaatatactaacctctgaggcctccagatattccattagctctgtcagcggcaacatatccatcagcttctccatcaaaaattcgttgtagctgtaatacaaacacagatccctgcgcagcaaatcgatgtactccccgcgagacctatccgcttgacgataccttttgaagtcggaaagaaccagactgacgtcctttatgcgctgttgcacttcctgcagggttaggtccttctcggtttcttcgccttcgacgggtagctggaaaacatcctgcttgtcaacggtttccaacatttcgtcgtcggccagttgggcttcctctgcctcgcgctttttcaacttcttgttagcccgctcgatgggcagcttgtcatcatcatcatcatcatcatcatcgtcgtcgtcctcatcctcctcttcatcactgtctgcctgagcaccatcttcctcgccagatatgtcaaagtcatcgtcggagttggcatcatcatcgtcggatagatcggccagcttgccaacctgagcggtatcatcatcagattccaatccttcctcatcgtctccctcctcttcctcttcacattcttctcccaactcatcttcggagtcctcctccgactcctcatcctcctcctcctcctcctcggactccgtttctggctgcttctgttgcttcttgggcttcagccaggcatcattatcatctgtaaaacccttgggagctgtagctttctggcccttcggagccggcaccagttgaggcacctcctcatcggaggatgcaacctgtggttcctcttcattatcctcaggatcgctgtcgctgttgtaggccgtcttccgcttagccggttgtggtaactttcccttggccctcttctcctgtagtttggccttctggactactttcttttgctctcgcttaacgaacctctgcttctgtcggtgggaaagcttcttgtcctcctcttccatgggagctgtgaagtaaaacatttgaattgaacacccattgaatagggtaatattcaggagctctcaccaaacgattgtttgcgaaaaacaggcggtccttgcttgcgcgccttgcgcccaggtccctttttcggtttctcactgtattcagccttccgacccatatttttaacttagtttatccagtttcttggagcagaacttaaaaaaaaacgtgagcacttcgattttgctccacgtgcgccgctcaaaagacagcgagtgttttccagcactggtcagagggaattgcttgagccagtgctgtcaacttttcagcttttaactagctatgaacaatgtttttttttcaacatatattaataactaataaaattatatattactttaaattttattttgtcggactttgcttgattcttacacagtttatttatacagattacgttagtatatatatttggaaaacacgtggaactttttaattaagatattttagctacttgctctcccagctgtttagcagcaaacgtatttctcagcactataaaaacgagttggtaaactaattggtaaatccaaaaatatcataaataaaaaaaatctggaatatatctaattaacagaattcttgcttataagtaagtattatatccattcaataattagatatgatctttagttgtaatttaaaatgaaaaattaatttaaataaccgttatagttgctgccaacttgatgcgaatagtagtttgttgacaaccctgccatatttgattgtgttggtgaatggctggttcaaacgactgcgcctttttgcgaaaaatttaattagttgcaaatcatggcataccaggagaaaataacagaatttaagaactgggccactaatcttggctgcccgcccactgccctgcccaccgatgatgcactccgaaggtaagttacagctgtgttaggcaaatcggcaactatccgtacttaaaacccgctttttgcttcacagaatttttaagtccggctccagtttacttttgaaccagctgcaatcccgcatccagccggtggattacgtgcgggaggtgcgcgagaacctgctgattgcccaagtggctcgctacaaggacaaaatggtgccgctggcctctaggagtttccagccaccggagctccagaggtaccaaaaaatacaggagctaaagaagcacaaggagaaggcgaaccaacagcttacggaggcccgaaaagagtaccaaaagctatctgccggcatc

SEQ ID NO: 18557 - DNA, 2781 bp, DROSOPHILA
tgctggaaaacactcgctgtcttttgagcggcgcacgtggagcaaaatcgaagtgctcacgtttttttttaagttctgctccaagaaactggataaactaagttaaaaatatgggtcggaaggctgaatacagtgagaaaccgaaaaagggacctgggcgcaaggcgcgcaagcaaggaccgcctgtttttcgcaaacaatcgtttgatggaagaggaggacaagaagctttcccaccgacagaagcagaggttcgttaagcgagagcaaaagaaagtagtccagaaggccaaactacaggagaagagggccaagggaaagttaccacaaccggctaagcggaagacggcctacaacagcgacagcgatcctgaggataatgaagaggaaccacaggttgcatcctccgatgaggaggtgcctcaactggtgccggctccgaagggccagaaagctacagctcccaagggttttacagatgataatgatgcctggctgaagcccaagaagcaacagaagcagccagaaacggagtccgaggaggaggaggaggaggatgaggagtcggaggaggactccgaagatgagttgggagaagaatgtgaagaggaagaggagggagacgatgaggaaggattggaatctgatgatgataccgctcaggttggcaagctggccgatctatccgacgatgatgatgccaactccgacgatgactttgacatatctggcgaggaagatggtgctcaggcagacagtgatgaagaggaggatgaggacgacgacgatgatgatgatgatgatgatgatgacaagctgcccatcgagcgggctaacaagaagttgaaaaagcgcgaggcagaggaagcccaactggccgacgacgaaatgttggaaaccgttgacaagcaggatgttttccagctacccgtcgaaggcgaagaaaccgagaaggacctaaccctgcaggaagtgcaacagcgcataaaggacgtcagtctggttctttccgacttcaaaaggtatcgtcaagcggataggtctcgcggggagtacatcgatttgctgcgcagggatctgtgtttgtattacagctacaacgaatttttgatggagaagctgatggatatgttgccgctgacagagctaatggaatatctggaggcctcagagattgctcgtcccctaaccatacgcaccaatactctaaaaacacgtcgtagggatttggccggagctctgatcaatcgtggcgtcaacttggatccccttggtaaatggacgaaagttggattggttgtctttaactcacaggtgccactgggtgcaactccagagtatctggctggccactacatgatccagggcgcctcttcgctgttgcctgtaatggcactcgccccgcaagagaacgaacgcatcctggacatgtgctccgccccaggtggaaagggatcccacatcgcaagcatcatgaagaacactggtgtgctcttcgccaacgattctaacagggatcgcatcaaggccattgttgccaatttccatcgcctgggaattgtaaatgcagtggtcagctgcgaggatggcactaagttccggaatattatgactggctttgaccgtgtcctgctggatgctccgtgcactggaactggcgtcgtctctaaggatcccagtgtgaagaccaccaagtcggaagtagatgtacaaaggtgctacaacctgcagaggaagcttctgctgactgccatagattgtacggatgcgaagtcatcaactggcggctacattgtatactcaacttgttcggtgttgcccgaggagaacgaatgggtcatcgactatgcactgaagaagcgaaatgtcaaacttgtgcccactggtctggacttcggcgtggagggctttaccaaattccgtcagcatcggttccatcctagcttaaaccttaccaagcgctactatccgcacacccacaacatggacgggttctacgtggccaagctcaagaaattctccaacaccatacccataactaaggagcagcaggaggaggatgaaaagcagctggatgaggccatcgaagcggacgccactacagaagcggctgcggagtctgaggaggtggaggaggaggtagcgtcaaaggagaagggtccccgaaaactgcttggaaagcgcgccggaaaacccagtttcaccgaaatcgaacaggaactgaagaaaaagaagcgggaagagagcaagaccaagtatgtggccaaggtgtttgagcagcctgtcaaaaagccaaagccagaaaagccagcagagaagaaaaatgagaaatcccaggcaccggacaagcaaacaaattcaagcgagtcaccttccaagtctgcacctaaacaaaaacaaaccaatgggaaaaccactgtttccaattcagatgcgaaatcattcaataaaaagaacaaaggatcgcaacccaaggaaaatggagccggatcaccagctaaaccagatgacaataagccaacaaccaatggcacaaactcccctagcaaatcagcaattaaggaaacgaaaacgaagccacagccgaaaggaaaacagtcgcccaagggaaacgccaaactggccaaggcgccgcgagtggatatcgacgatgtgcccattctcgagggaaaacccatcaagaagcagaacaagctgaagcaaaaatccaaacagatcggccagctgaaaaagtccacggcgggtgcgaatgcgggaaagaagcaaaagttcaagaagtga

SEQ ID NO: 18558 - protein, 857 aa, DROSOPHILA
MEEEDKKLSHRQKQRFVKREQKKVVQKAKLQEKRAKGKLPQPAKRKTAYNSDSDPEDNEEEPQVASSDEEVPQLVPAPKGQKATAPKGFTDDNDAWLKPKKQQKQPETESEEEEEEDEESEEDSEDELGEECEEEEEGDDEEGLESDDDTAQVGKLADLSDDDDANSDDDFDISGEEDGAQADSDEEEDEDDDDDDDDDDDDKLPIERANKKLKKREAEEAQLADDEMLETVDKQDVFQLPVEGEETEKDLTLQEVQQRIKDVSLVLSDFKRYRQADRSRGEYIDLLRRDLCLYYSYNEFLMEKLMDMLPLTELMEYLEASEIARPLTIRTNTLKTRRRDLAGALINRGVNLDPLGKWTKVGLVVFNSQVPLGATPEYLAGHYMIQGASSLLPVMALAPQENERILDMCSAPGGKGSHIASIMKNTGVLFANDSNRDRIKAIVANFHRLGIVNAVVSCEDGTKFRNIMTGFDRVLLDAPCTGTGVVSKDPSVKTTKSEVDVQRCYNLQRKLLLTAIDCTDAKSSTGGYIVYSTCSVLPEENEWVIDYALKKRNVKLVPTGLDFGVEGFTKFRQHRFHPSLNLTKRYYPHTHNMDGFYVAKLKKFSNTIPITKEQQEEDEKQLDEAIEADATTEAAAESEEVEEEVASKEKGPRKLLGKRAGKPSFTEIEQELKKKKREESKTKYVAKVFEQPVKKPKPEKPAEKKNEKSQAPDKQTNSSESPSKSAPKQKQTNGKTTVSNSDAKSFNKKNKGSQPKENGAGSPAKPDDNKPTTNGTNSPSKSAIKETKTKPQPKGKQSPKGNAKLAKAPRVDIDDVPILEGKPIKKQNKLKQKSKQIGQLKKSTAGANAGKKQKFKK

SEQ ID NO: 18559 - DNA, 5575 bp, DROSOPHILA
ctctacgtgcggcatttcagagtcgtcgtacggtgcgaagatctccgtggcattcacgttgatggtaatgttaccacgaggattggtccgctgctgtagacgtctttcagcggccgcctgcgccagccgctcgtactcctcccgaatctcatccggagtctttgttcggtgcagaatctcccagccttcggtccgtagtcccttctcgccaaccgagtcgtagatggcccgctgttggggatcagagaggacctcgtaggcacgcttcgtgcggttgaacatgatctcagccattttcttgctatccggatccaggtgcttgtccgggtggaacatgcggctctgtttccggtacgccgtgttgatctgctccgcagtggcctgtgaatcgagtcaaaaggattagatcggtggtagagcgtaccggccggtgacgctgcacgtacatcgcggggcaaattcagaaacgtatagtagttctcgtccagctctgcatcggactcatcgtgatccgatgccatgtcggtgatctagtcccgcggttcctgctcggcttcgaaaaggggcggggacgagtcagcgcacggacctcaccggcgttctatgttaattttggatttcgaaatttttgggtacttttacgcaatgactatacatgtgttgaatgttccgatagttgacgatggtttgctccaactgggttttgttttgagatacggtcatactgcggatgtacggtctcactacaacagcgacaccagtggtaaaaaatatgtaggttaatcggaaatcacaaatgttaaatgtgttgcaattgctatttatttagatgccacttgtttagtttataactttaatgaaataaatatcttattaaaattaagaaagtaaacaatattttatccgaactaatctttgaatataaaattttgctgtttcttttcactttacatctagtttgctttcatttactatgttttcaaaccaccttgtgctgaagggccattgaaatatttaaagttttatacaccacaattcgttgaagaaacactttcacaccgttgacaactctggcacgcgagttgcgggaaactatcgcattgcccgtcgcacagagacaagcccgagtccaccacttaccttacagtcctctcacgggaagaaacgtgctccgccgttctgacgaaatttttgcttttaatttgacaattgttcgtgtgaaattgcagaagtaaaaagccaaaatgctgcgcgtacccaagtttctgccccgtctcgcccgccaggccggcgtggtaccctcccatatgtccggagcttctagcatgttccgcgtaagtaccatccccccgccccgacccaacgactattatataaagtgcggcatgccgatgatgcggtctcatgttttgcgggaagattctacagcggagcccctttttgtctttacagaatctgccaggtgctagcaatggaatatcgtcccagctgcgttacaagtaagtgaaatcgagttataatttcgcaaatttctcttattaccggaacacaattatgtaagcactagacaaacataagatagatttccaaaagctacctcatgttgcatcataatgtacgatatttaaaagaaaatgccttgataattgcaaatatctgtggccagaaacgtggtgcttatctggacttgttgccggcggccttatcagtctactctatccatatgtaaaacaaacctcccaccccctccccctttccaggtccggtgaggtcaaaggtgctgttattggaatcgatctgggaacaaccaactcctgcctggccgtcatggagggcaagcaggccaaggtgattgaaaacgccgagggagcccggaccacaccctcccacgtcgcctttaccaaggacggtgagcggctggtcggcatgcccgccaagcgccaggcagtgacaaactcggccaacaccttctatgccaccaagcgactgattggcagacgttttgatgatcccgaggttaagaaagacatcactaacctgtcctacaaggtggtcaaggcttcaaatggcgatgcctgggtctcttccaccgacggcaaggtgtactctccatcccaaatcggtgctttcatcctgatgaagatgaaggaaaccgctgaggcatacctgaacactcccgtgaagaacgccgtggtcaccgtgcccgcctacttcaacgactcccaacgccaggccaccaaggatgctggtcaaatcgctggtcttaatgtgctgcgcgtgatcaacgagcccactgctgccgcgttggcctatggaatggacaaaacggaggacaaaatgtaagtgtgtgaacgatgttcgttgtgtcttctttatgggttcctactgtgtggctccttatcttttattagaacgattaaaagtgttttactttcaaattactaggaaaggagttttctaatgaataattgaaatattttaaactatattaaaaaatgcttacctttcagcattgccgtttacgatttgggtggcggcaccttcgatatttcgattttggagatccagaagggagtgttcgaagtcaagtccaccaatggtgataccctcctcggtggtgaggactttgacaaccatatcgtcaacttcctggtggccgaattcaagaaggatagtggaattgatatccgcaaggacaacattgccatgcagcgactgaaggaggcggccgagaaggccaagtgcgagctgtcctcctcccaacagactgacatcaatctgccttatctgaccatggatgccgccggtccccagcacatgaacctgaagctgacacgctccaagctggaaagcctagtgggtgatctgatcaagcgtactatccagccctgccagaaggctctgtccgatgccgaggtttccaagtccgagatcggcgaggtgctgctggttggcggtatgacccgtatgcccaaggtgcagtccaccgtgcaggaactgtttggacgccagccgtcgcgttctgtgaatcccgatgaggctgtggccgttggtgccgctgttcagggtggtgtgttggccggagatgtcaccgatgtgcttctgctcgacgttactcccctctcgctgggtattgagaccctgggtggagttttcacccgcttgatctcccgcaacaccactattcccaccaagaagtcgcaagtcttctcgacggccagcgatggtcagacccaggtggagatcaaggtgcaccagggcgagcgtgagatggctaacgacaataagcttctcggctcctttacactggtcggaattccccctgcacctcgtggcgtgccccagatcgaggttgttttcgatattgatgcaaacggtattgtgcacgtgtctgcaaaggacaagggcactggcaaggaacagcagatcgttattcagtccagcggtggtctgagcaaggacgaaatcgagaacatgatcaaaaaggccgaggaatacgcaacggctgacaagcaaaagcgtgagcttatcgagatcgtcaaccagggcgagagcatagtccacgatactgagaccaagatggaggagttcaagagccagctgcccgctgaggaggtaagcacataaagaagactcttatcttaagaacgtacttatgttcccattttattgcagtgcgagaagctaaagaaggaaattgccgatctgcgcacgctgctggctaacaaggagactgccgaccttgaggaggtcaggaaagccacttcctccctgcagcagtcctctctgaagctgttcgagctggcctacaagaaggtgtgtattggattgtctccttttactatgcaatgtaccaattgcatatttaatccttttcagatgtccgctgagcgcgagagcaacgcaggagccggctcctccgacagcagcagttcgagcgacacttccggcgaagccaagaaggaagagaagaactaaattaggcaaccataatagtcatagttgttgttgtttccctatttaataataaccgcttctggatttcgattaagttctacgttaaacacaaacacttcatattcctttattgaatcatgaatcacgcaaagccacaagcatttacccaaaatgtgaagtaaactatccgatgcgattaggtcaaatcagacgatgagacttccaagtaaacagacgaagaccaagccgccagggagcgtcaatgatcgactgcataaagtttttattgtttattatgcaatcaatcgattttctttctcccttacttaaaacacgtggtcaccgttgtgttgtgttcctgtaagattttgattatttttacgtatcatctaaactagctgtagttgtacaaaaacgagcacagcacaaaaattgaattcgaatggcggccacggcgttctagacgcggacaaataagcagatgctcatttggaggtttaaatttaagataaattgtatgttggtttccagtggacaaccaaattgactgggtaatatgcaattaaatttaaacaaatcgatgtaaacttaaaataaaacaaaacaaacatttacatacaaaaatatctttatttctctagactactactgacttgaatttctgattaaaactcatgtttaaattcctctagatattaaaaaataagcagggataaataatcttatgttaacttaactatggagtttttgtacatataattgatgatgttgttcgcaattcactaagctagttggatttgctaaacctattaagatttttcttctacatggctccgctctgaagtttgtacagcgtgtagtagagaccccgattcgcaagcagttgcttgtggtctccagcttcacacactaatccgttctcgaagacgaatattacgtcggagtggacaacggtggaaagtcggtgggctatactgatcgtggtacgtccttcagaggcggcatcgagtgcatcttggacaacctgaaggagaatagagaaatgaatacggaagtcctttatagaacatggatctgtactccaaccttttcactttcagcgtccaaggcagaagtggcctcgtcaagcagcatgattttcggattccggatgagggctcgtgcaatagctatgcgctgcttctgacctccggacaactgagcacccttctcgcccattctcgtatcataaccctatgggataaggtactatattactagaaattcgagcaaaaagtcaagataggggctcttaccaagggcaggttagcgatgaattcgtggatattggactttttgcacgccgagatgatctcctgatcagtcacattcctggcattgtcaccgtaggaaatattctctcggattgtgcgatcgaaaagaatgggctcctgcgacacgatacccaactggttgcgcagattggtcatagaaacattgcgcacatcacactcatctataagggtagctccctcatctacatcgtagaatcgctgtatcagctggatgcacgtggacttgccacagcccgatggacccactagggcgatcttctgacccttgctcacagcaagctcca

SEQ ID NO: 18560 - DNA, 2902 bp, DROSOPHILA
ggccattgaaatatttaaagttttatacaccacaattcgttgaagaaacactttcacaccgttgacaactctggcacgcgagttgcgggaaactatcgcattgcccgtcgcacagagacaagcccgagtccaccacttaccttacagtcctctcacgggaagaaacgtgctccgccgttctgacgaaatttttgcttttaatttgacaattgttcgtgtgaaattgcagaagtaaaaagccaaaatgctgcgcgtacccaagtttctgccccgtctcgcccgccaggccggcgtggtaccctcccatatgtccggagcttctagcatgttccgcaatctgccaggtgctagcaatggaatatcgtcccagctgcgttacaagtccggtgaggtcaaaggtgctgttattggaatcgatctgggaacaaccaactcctgcctggccgtcatggagggcaagcaggccaaggtgattgaaaacgccgagggagcccggaccacaccctcccacgtcgcctttaccaaggacggtgagcggctggtcggcatgcccgccaagcgccaggcagtgacaaactcggccaacaccttctatgccaccaagcgactgattggcagacgttttgatgatcccgaggttaagaaagacatcactaacctgtcctacaaggtggtcaaggcttcaaatggcgatgcctgggtctcttccaccgacggcaaggtgtactctccatcccaaatcggtgctttcatcctgatgaagatgaaggaaaccgctgaggcatacctgaacactcccgtgaagaacgccgtggtcaccgtgcccgcctacttcaacgactcccaacgccaggccaccaaggatgctggtcaaatcgctggtcttaatgtgctgcgcgtgatcaacgagcccactgctgccgcgttggcctatggaatggacaaaacggaggacaaaatcattgccgtttacgatttgggtggcggcaccttcgatatttcgattttggagatccagaagggagtgttcgaagtcaagtccaccaatggtgataccctcctcggtggtgaggactttgacaaccatatcgtcaacttcctggtggccgaattcaagaaggatagtggaattgatatccgcaaggacaacattgccatgcagcgactgaaggaggcggccgagaaggccaagtgcgagctgtcctcctcccaacagactgacatcaatctgccttatctgaccatggatgccgccggtccccagcacatgaacctgaagctgacacgctccaagctggaaagcctagtgggtgatctgatcaagcgtactatccagccctgccagaaggctctgtccgatgccgaggtttccaagtccgagatcggcgaggtgctgctggttggcggtatgacccgtatgcccaaggtgcagtccaccgtgcaggaactgtttggacgccagccgtcgcgttctgtgaatcccgatgaggctgtggccgttggtgccgctgttcagggtggtgtgttggccggagatgtcaccgatgtgcttctgctcgacgttactcccctctcgctgggtattgagaccctgggtggagttttcacccgcttgatctcccgcaacaccactattcccaccaagaagtcgcaagtcttctcgacggccagcgatggtcagacccaggtggagatcaaggtgcaccagggcgagcgtgagatggctaacgacaataagcttctcggctcctttacactggtcggaattccccctgcacctcgtggcgtgccccagatcgaggttgttttcgatattgatgcaaacggtattgtgcacgtgtctgcaaaggacaagggcactggcaaggaacagcagatcgttattcagtccagcggtggtctgagcaaggacgaaatcgagaacatgatcaaaaaggccgaggaatacgcaacggctgacaagcaaaagcgtgagcttatcgagatcgtcaaccagggcgagagcatagtccacgatactgagaccaagatggaggagttcaagagccagctgcccgctgaggagtgcgagaagctaaagaaggaaattgccgatctgcgcacgctgctggctaacaaggagactgccgaccttgaggaggtcaggaaagccacttcctccctgcagcagtcctctctgaagctgttcgagctggcctacaagaagatgtccgctgagcgcgagagcaacgcaggagccggctcctccgacagcagcagttcgagcgacacttccggcgaagccaagaaggaagagaagaactaaattaggcaaccataatagtcatagttgttgttgtttccctatttaataataaccgcttctggatttcgattaagttctacgttaaacacaaacacttcatattcctttattgaatcatgaatcacgcaaagccacaagcatttacccaaaatgtgaagtaaactatccgatgcgattaggtcaaatcagacgatgagacttccaagtaaacagacgaagaccaagccgccagggagcgtcaatgatcgactgcataaagtttttattgtttattatgcaatcaatcgattttctttctcccttacttaaaacacgtggtcaccgttgtgttgtgttcctgtaagattttgattatttttacgtatcatctaaactagctgtagttgtacaaaaacgagcacagcacaaaaattgaattcgaatggcggccacggcgttctagacgcggacaaataagcagatgctcatttggaggtttaaatttaagataaattgtatgttggtttccagtggacaaccaaattgactgggtaatatgcaattaaatttaaacaaatcgatgtaaacttaaaataaaacaaaacaaacatttacata

SEQ ID NO: 18561 - protein, 686 aa, DROSOPHILA
MLRVPKFLPRLARQAGVVPSHMSGASSMFRNLPGASNGISSQLRYKSGEVKGAVIGIDLGTTNSCLAVMEGKQAKVIENAEGARTTPSHVAFTKDGERLVGMPAKRQAVTNSANTFYATKRLIGRRFDDPEVKKDITNLSYKVVKASNGDAWVSSTDGKVYSPSQIGAFILMKMKETAEAYLNTPVKNAVVTVPAYFNDSQRQATKDAGQIAGLNVLRVINEPTAAALAYGMDKTEDKIIAVYDLGGGTFDISILEIQKGVFEVKSTNGDTLLGGEDFDNHIVNFLVAEFKKDSGIDIRKDNIAMQRLKEAAEKAKCELSSSQQTDINLPYLTMDAAGPQHMNLKLTRSKLESLVGDLIKRTIQPCQKALSDAEVSKSEIGEVLLVGGMTRMPKVQSTVQELFGRQPSRSVNPDEAVAVGAAVQGGVLAGDVTDVLLLDVTPLSLGIETLGGVFTRLISRNTTIPTKKSQVFSTASDGQTQVEIKVHQGEREMANDNKLLGSFTLVGIPPAPRGVPQIEVVFDIDANGIVHVSAKDKGTGKEQQIVIQSSGGLSKDEIENMIKKAEEYATADKQKRELIEIVNQGESIVHDTETKMEEFKSQLPAEECEKLKKEIADLRTLLANKETADLEEVRKATSSLQQSSLKLFELAYKKMSAERESNAGAGSSDSSSSSDTSGEAKKEEKN

SEQ ID NO: 18562 - DNA, 2862 bp, DROSOPHILA
taagtccagtcatccaagtgattcatagtttactgtccagtgttatcatttcgctcgtcttgatgttccccattgatttgttatgccagtgttttcattttttatttgccttatcttttctttaattttgcctaacagcgccccaaacccgaaaatgatccgccgccgcgttacacctccattaatcctgtaaatctccaggtcaggacattggatttgatcaaaccaagcacatactttattattacgtttatagcatcaaacctaagttttctgaaaatttccaaagatttaaattttgatttaagaaaccccgattaacactaaattgtacaatgtacactttatttactaaattttatatggctataaagcatcagaaaatgaggtttctttaggttttgcaatataaaaacatttattaatttgcttacttactttacccttcgcagaatgccaacaaaccgaaaccacaaccccgatccaagctgccaccgggtaatcccacgctaccaagtgctcctccggcattggacttcccctcgctgcccaacgttcccaacgatctgccagatattccgggcgcaggtgccgagaagaagaacgacgaggatgagattgatttcgatgacctgtcacgtcgcttcgagaaccttaagaagcgaaagtaaagctggccagcagatcaccttttaagtctacagtatatttgttataatctctgtcctgttctacattaataatcacgtatatgtgtaaggaactattgatcattttgttttttcgattaagtagttaatcagacttcaaaaatgtataatctgaattgaaagatggttgacctattgcttttcatattcgcaatcttgattcatctaaaaacagcctaaagattaaaatactaacagattaaattctgtgtacttatcagctttatgtttcacataaatatcaacaagattacaaagaaaaacaaaaaattttaaagggattgtattgcctagaagagttcctcgctctccaccacttccttcagctcgagcagctccagcagtcccttacccttcgtttcgttccttaccagctcatcaatgacacgatattggccaggatctatgagcaaggttaagtgcaaggtggcctcgtcccattcctcgtgctccactgcgttggccaacttgaccaccgattccttgagcttgccaccgccctcctttccagcaaagctaacgcgcagcttcatgcgcgacctctcgatgggcatatggtccttgagaatcttgatggcctccagtgtgttctgcttggtgttcctgttcatcttaacggagaagtgggcatccttcagggatttctcgatgatggaggcgggatatggacgacgcgtctctggatttacacacaacgcagccacggaattaactatactatttagttgcgtgtccagacaactttggcgctccttttccgacacctgcagttctcctttgctgaggatctccttgcaaatctcagtctcgtctgttttattgaaggccttttgcagctcgtcctttttggccgcctgtcctttggagacattggtgaacacggtatgggtttgcaggacctcatcgatgtccttttcgctaagcatatacaataaagtaattagatttaggtaaagcctatttcacaatctgcacgtgttgcatttagcggctgttacctgttgctcctccacgaaagaaccttatttttatagcaggcgatctcaaatcgcttgccacctttttttagcctcacaatggcgacatttgtgaggcgtatttgatttgtgggcgtgaatattttggacattgttgttaaaatacaagctgcggaattagcgatgtgcaagtaaaccaaaacactttcgatcgaaccaaacgatgaatggcaaaaaatcaaacatttatatatcccgtagttgtgaaatcattgaaatttcctttgatgtacagtttgataaaaaattttgttcacaatatacaaaactgcataacagctttctattaaaaacatacttataatatatatatttagatggattttatttatgtatattttttttgttgaaatttttttcaccgctacccacaattttccgagctatcgagtttttctacttatcgacgttttaccatcacaacgacgttgttgttgttccttcgccactcttcttcttcttcttcttcctcacccaattcgccagagcgcgcagcaaacaacaaaacacatagtgctcaaaaccgcgatatcaacggtcgctaaaaatcgttatcaatcgcctttcgctaaataacagcataatgtgcaacaaaatcatggaaatcaccgaaacagcgcgttcagtgcgaaaaactaaagattttaagacaactccagtggctcgaccgtttagtggtccctttaaactggctacatgccaaacagagggacctctaaacattaggcgaagaggacggcacaaggcagacatcgataaatcagcggcccaaagcaacgctgcaaaatgtttatgaacagctgatgggcccgccagggggcgctcgcgtttcgtcattgccagataaaataaatatcaaatgctgcctttaatggtgaacgccatttttattgcaagaaagaaagccacgggtttcaagcaaaaacgcgaataattaacgtgtgtttattgtaaaaagacagcgcgattatgatctaatcaaagaacaactggatcgagccgagggcacagcgattggctccaaaaagttcccattctcgtaagattaacggaggtgtgtaggttgggaatgccaacaaaaaaaaaattatgctcaaaaagtgacctgtaattgt

SEQ ID NO: 18563 - DNA, 782 bp, DROSOPHILA
ccgcagcttgtattttaacaacaatgtccaaaatattcacgcccacaaatcaaatacgcctcacaaatgtcgccattgtgaggctaaaaaaaggtggcaagcgatttgagatcgcctgctataaaaataaggttctttcgtggaggagcaacagcgaaaaggacatcgatgaggtcctgcaaacccataccgtgttcaccaatgtctccaaaggacaggcggccaaaaaggacgagctgcaaaaggccttcaataaaacagacgagactgagatttgcaaggagatcctcagcaaaggagaactgcaggtgtcggaaaaggagcgccaaagttgtctggacacgcaactaaatagtatagttaattccgtggctgcgttgtgtgtaaatccagagacgcgtcgtccatatcccgcctccatcatcgagaaatccctgaaggatgcccacttctccgttaagatgaacaggaacaccaagcagaacacactggaggccatcaagattctcaaggaccatatgcccatcgagaggtcgcgcatgaagctgcgcgttagctttgctggaaaggagggcggtggcaagctcaaggaatcggtggtcaagttggccaacgcagtggagcacgaggaatgggacgaggccaccttgcacttaaccttgctcatagatcctggccaatatcgtgtcattgatgagctggtaaggaacgaaacgaagggtaagggactgctggagctgctcgagctgaaggaagtggtggagagcgaggaactcttctag

SEQ ID NO: 18564 - protein, 252 aa, DROSOPHILA
MSKIFTPTNQIRLTNVAIVRLKKGGKRFEIACYKNKVLSWRSNSEKDIDEVLQTHTVFTNVSKGQAAKKDELQKAFNKTDETEICKEILSKGELQVSEKERQSCLDTQLNSIVNSVAALCVNPETRRPYPASIIEKSLKDAHFSVKMNRNTKQNTLEAIKILKDHMPIERSRMKLRVSFAGKEGGGKLKESVVKLANAVEHEEWDEATLHLTLLIDPGQYRVIDELVRNETKGKGLLELLELKEVVESEELF

SEQ ID NO: 18565 - DNA, 5745 bp, DROSOPHILA
gtggagatcgtgctccagccaaacgatcagatcaaaatgtcgggcataaatgtaaagcttgaaacctttggcgacttggacgacgacggagagaacctggtgatcatagaagattccgccgcccatgatattgtcgaaggtggcggtgacgaaccggcattggaaggacagctcgatgcccagggacgattggtgcagcagatcttggaaacgcaaaaggaactggtcaatcaaggcgccgaagtggaaccgcctccagcacaggcaggccgacaaacttctgcgcgccaggtgaacgacgtacgcgacgtagtccaaaagctcaccaagtcgataggtccgctgggtaaactactggactgcatacccgaggattttgatgcaatgcagctggagcttacgatgtggcgcgacacctacacgcaggcatccacggaactaaaaagggagcagactctcacggcatctgccacggagcccctgcagcatcagttgcagcaaatccaagccagcattgcggagtaccgggagctaatcgacgagagtcgccacaagatcttgcaaaacaacgcacgtattctgaagttgatgatggaacagtaagcattgaggattaataagcattgttaaaaattcaagagagttttatcgaaaatattgaatttgtatattttataattaataagagtactataaaaatagccatgcatatattgcttggtaacatcattcaattcaaaaatatataaaatctatataataatatcaaaatatctttgatatgtaatatgttggtttgtttgtttttgggtaatttgtcaatgcgcaagatgtctgaatattcaagcaacagacggtaagtttctcttttaaggtcacttggtgtttgtaccaaaaccaacgatcttaaaaatacaaatgttgtaaaaatcatcaacgatcaattcctagaatatggtttttgtgcggtaattgtacgcatgcatcaagggctggaaaatcaagctttctcttgttcgcctacaggttttttcttattttcccggaccacctcctctgagttatccttatccacagctttccccacgatctccttcttttcagatttcgccgaaacttccttcttttccggtttctctctgatttcatttgttttagtttcgcctgtgaccgacaccgcttcttcatcacctgaatgtgactcattgtctttgtccaatccaccttcgtcctgatcctcatctcccagtacatattcgatcacatcgtcgatggggaaattattgagcagcgacttgatggaatcgttgtgaatgaccacggtaaagagcagtttgcagtactctcgcatgcggctaccgtagtcaagctcagcgtagttttcgccacctttggttaggtcgtggccacagttctcgatcactttgcagagcaccgtctcctcgggggcattgggccagccgtatttctttaggatcggtggatccactagcatatcaataagtttacccacattctctttgagctttatgtcctcctcagttagaatttcgccactgaagtcatcctcgctacatgattcttccaaattatctgcgatggcagcggccagactggcggccagggatttacgctgctctttctttaccaccggcgagacctgcgcctcctccttcttcgcctcgggcttaacgccagcctcatccgtcagctgctctccctcgatggccccgtccaggggcagaattgtgtatgtttcgttttctagtgtaatggtctgggccgcgccatcgccttcgtccacgaggaattcacgcaccacaacgccattcccgtccgtttggctagaaattaacgagcccgccgatgtgtttaacgccactggtacaacctcctccgattcgatgtccttctttgcccgctttgatggatgcggctcaacgccaaaaatgtcatccggatcgcattcgtgaacggtgcgtatgtgccgtcgcagggtatcgctgctgtcaaagttcttatcgcaaatggcgcaatccgtgcgttccataattttgacggccgatcgcattgatgaccgttgttgtttcgctacaaagggtaggagcgggattaaagccttgattattgccaattgtcgattccaacttacggctgtgttttccctcgtccatatgctccttgagcaatgctggagtgcggaaattacgcttgcactcggcgcaggaaaagacggggcgttttgtgcgagaatgggtcttcacatggcgctcaagtctgcgaaacaaaattgcaataagtaagtagggctaacagaaaagataaaaggttttttaatatcttactgtttctctgttttgaatttttcgtcgcattgctcacagggaaaggggcgaatatgggttttggaatgggtgcgcagctgggtggcctggataaaactcttgccacattcatcacacttgtgcggacgctctccagtgtgccgtttcatgtgacgattgagcacttcctttacggcaaatgcttggttgcactaaaaggtaatagaataccgcattgttacaataggttaaatgaaaagttacggaagttttaagactaaccacagtgcaactgtatggtttctcgccagtgtgatagcgtcgatgctttttaagggccaccaatgcagaaaacttcttgtcgcaaagatcgcagtcaaatggtttctcccccgtatgagtgcgtatgtgaatgctgcgaaaatataccgaacattactttatgtcttttaaaatcaattagaaaacctacttcagcgtggacaggctgtagaaacaattcttgcacgtgtggcacatgtactccggctttttaaccacctgtgtacccaaatgctgcttcaaatgcgatcgcaggttgtccagccgatagaagacacgatcgcacaccttgcagctcatggtatcggtctcgttcgatgagcacgatgagtacttctggtggcgcttcaagtggtacgagcgggtgaagtccttgccgcagatcttgcatgcatacggcttgccacgtgacttgtgctgttcctcgtggagcgccaacaaggcctcgctgcgcaagttggcattgcaaatggagcaaggaaaatcgctgaactcggagtgagtgatgaaaatgtggcgttcgtaactggtctgtgtcttaaacgacttggggcagtcgggacagttaatgtgacccagctgaaaggaaaatgtggtatgcgaaagttatgcttacttctcttggtatcaatctttatgacttacatggaaggtgtcgtaactttcgctgcagcagaagcatatgtccttcttctccatcaccacggcatccttctcgatcttctccaggttcttaagcatgtcggctttgcgcaaatgatacccactgtcatagcgacagaactctagatgctttttcagactctgaacgcgacggaaggtcttgtagcatttgccacacacatgctccacgatctccttgatctttgtctggctagagttgcccttgcctgaggagtcttcaccgtcctcatcaccatcctcccctagatcctcatcgtcctcggtgacaacgatctcctggccgttgttattttctattctgcccggaactacttcctcatcatccgctagaatgaaatcaatggtgtcatcttcttcggtgaccacggtaaccgtggtgtccgccttggtattttctgatttcacagcctgaagtacatagtgctccattttctttcttttactgggagacgtcttgatcttggtagtttccacggctgtcacggtagcactgggtgtctttttctcgttcagaatcttcacagtggaagcagccggagctgtgctctttgtggcgccccgtttctcagttttcggagtgcccagtatttcttcattgagtattttgatgcgcgatccagcgacactgccacgcttctcctgcttgttggagggagttcttgatgtggtagtagtagtgcttgcctccgaatcctcaccagctcccacgtcattcaagagcttcatcctggtggcgggacgtttgtccttaggcggcgaaatgttttccacacccagcagcttgcccttcttttccttgccctccttggaggcactcatgttggtgataccagcctgcaattaagatcgattggatgataattcaggatcaggataaccagtgaccgctttagtctacttttaggcacgtgatttactgaacatcacattttgccagcgtcaccaacacacgcccaaaagctgctaagaaaaaatggcgtcgcgctgttcgatctttacgatcgatcggccttggtgtgagcgagacaacactacctgcgcctgacgcacagaaaacgcaacaagttttcttctgaaataaaattgtatttcaaaggggtagcaaataattctaatacactcgcaaatccgtagcatacttttcaaatatttaatgtgattttgtgccggcgaaggacgtggaggatcggttttaaccacttattttgctgattagaagtgcacttttctgctccgcagcgaaagaaagtgactgccatcgccgataaagagcgtgaaattatcaagtcactggctaaggtatttgcttcacaaacatgtcctcatatcacgggatgcgttccttaaagggttttgaccgcatttccgataataaatcacaatttacctaattttatgctttaaattccaacacgacaagcgtttgtgtatgaaaattcagtgtgaccgttgcatgtaggttggaaaataccattaattacaacaacccgtgaaaaaataatctgaacatgccgccatgaaaagtacaaagaaatttcctctgttttgaatcttctgggttgtaaatttgtaataattccaacataaatttaaaataaatagccggtgtctggcttaatattatattaactttttattggttaactttgtaagcatagattaatgatccgaacaataaagcttatatggaacatttcactatttatatataatttcagtcgaaggccaccgcagccgttgctcggtaagataattatcaggtttaacattttatacaaaaagtaattgaataaaatacaaataaatgcattctttaatatgcattttgataaaataaaaaacaaaatatataagcatataattaaaatagcagtgctcacaagggttaaaggctagtatgttaatgaggtatacctatcccatgatctcggtatatttaagccgccttgccacggtcacactttcgccaattgcaacgataaaaaggtaaataaaagccgcattaactcacaaattgcaattaactagcaataattgtaagccaatagccatgacgactgcctttgatgccgcacacactgaggggccgggattcgtgggcattcggttctgccaggagtgcaacaacatgctgtaccccaaggaggacaaggagaacaagatcctgctgtacgcctgccggaattgcgattacaaacaggaggcggactccaactgcatctacgtgaacaagattatgcacgagatcgacgagctgacccacattgtgcccgacgtgatttccgatcccacgctgccgcgcaccgaagaccacgcttgtcccaagtgctcccatcgggaggcggtcttcttccaggcgcaaactcgtcgcgccgaagaggagatgcgactgtactacgtgtgcaccaaccagaac

SEQ ID NO: 18566 - DNA, 2870 bp, DROSOPHILA
tcgtgttggaatttaaagcataaaattaggctggtatcaccaacatgagtgcctccaaggagggcaaggaaaagaagggcaagctgctgggtgtggaaaacatttcgccgcctaaggacaaacgtcccgccaccaggatgaagctcttgaatgacgtgggagctggtgaggattcggaggcaagcactactactaccacatcaagaactccctccaacaagcaggagaagcgtggcagtgtcgctggatcgcgcatcaaaatactcaatgaagaaatactgggcactccgaaaactgagaaacggggcgccacaaagagcacagctccggctgcttccactgtgaagattctgaacgagaaaaagacacccagtgctaccgtgacagccgtggaaactaccaagatcaagacgtctcccagtaaaagaaagaaaatggagcactatgtacttcaggctgtgaaatcagaaaataccaaggcggacaccacggttaccgtggtcaccgaagaagatgacaccattgatttcattctagcggatgatgaggaagtagttccgggcagaatagaaaataacaacggccaggagatcgttgtcaccgaggacgatgaggatctaggggaggatggtgatgaggacggtgaagactcctcaggcaagggcaactctagccagacaaagatcaaggagatcgtggagcatgtgtgtggcaaatgctacaagaccttccgtcgcgttcagagtctgaaaaagcatctagagttctgtcgctatgacagtgggtatcatttgcgcaaagccgacatgcttaagaacctggagaagatcgagaaggatgccgtggtgatggagaagaaggacatatgcttctgctgcagcgaaagttacgacaccttccatctgggtcacattaactgtcccgactgccccaagtcgtttaagacacagaccagttacgaacgccacattttcatcactcactccgagttcagcgattttccttgctccatttgcaatgccaacttgcgcagcgaggccttgttggcgctccacgaggaacagcacaagtcacgtggcaagccgtatgcatgcaagatctgcggcaaggacttcacccgctcgtaccacttgaagcgccaccagaagtactcatcgtgctcatcgaacgagaccgataccatgagctgcaaggtgtgcgatcgtgtcttctatcggctggacaacctgcgatcgcatttgaagcagcatttgggtacacaggtggttaaaaagccggagtacatgtgccacacgtgcaagaattgtttctacagcctgtccacgctgaacattcacatacgcactcatacgggggagaaaccatttgactgcgatctttgcgacaagaagttttctgcattggtggcccttaaaaagcatcgacgctatcacactggcgagaaaccatacagttgcactgtgtgcaaccaagcatttgccgtaaaggaagtgctcaatcgtcacatgaaacggcacactggagagcgtccgcacaagtgtgatgaatgtggcaagagttttatccaggccacccagctgcgcacccattccaaaacccatattcgcccctttccctgtgagcaatgcgacgaaaaattcaaaacagagaaacaacttgagcgccatgtgaagacccattctcgcacaaaacgccccgtcttttcctgcgccgagtgcaagcgtaatttccgcactccagcattgctcaaggagcatatggacgagggaaaacacagcccgaaacaacaacggtcatcaatgcgatcggccgtcaaaattatggaacgcacggattgcgccatttgcgataagaactttgacagcagcgataccctgcgacggcacatacgcaccgttcacgaatgcgatccggatgacatttttggcgttgagccgcatccatcaaagcgggcaaagaaggacatcgaatcggaggaggttgtaccagtggcgttaaacacatcggcgggctcgttaatttctagccaaacggacgggaatggcgttgtggtgcgtgaattcctcgtggacgaaggcgatggcgcggcccagaccattacactagaaaacgaaacatacacaattctgcccctggacggggccatcgagggagagcagctgacggatgaggctggcgttaagcccgaggcgaagaaggaggaggcgcaggtctcgccggtggtaaagaaagagcagcgtaaatccctggccgccagtctggccgctgccatcgcagataatttggaagaatcatgtagcgaggatgacttcagtggcgaaattctaactgaggaggacataaagctcaaagagaatgtgggtaaacttattgatatgctagtggatccaccgatcctaaagaaatacggctggcccaatgcccccgaggagacggtgctctgcaaagtgatcgagaactgtggccacgacctaaccaaaggtggcgaaaactacgctgagcttgactacggtagccgcatgcgagagtactgcaaactgctctttaccgtggtcattcacaacgattccatcaagtcgctgctcaataatttccccatcgacgatgtgatcgaatatgtactgggagatgaggatcaggacgaaggtggattggacaaagacaatgagtcacattcaggtgatgaagaagcggtgtcggtcacaggcgaaactaaaacaaatgaaatcagagagaaaccggaaaagaaggaagtttcggcgaaatctgaaaagaaggagatcgtggggaaagctgtggataaggataactcagaggaggtggtccgggaaaataagaaaaaacctgtaggcgaacaagagaaagcttga

SEQ ID NO: 18567 - protein, 941 aa, DROSOPHILA
MSASKEGKEKKGKLLGVENISPPKDKRPATRMKLLNDVGAGEDSEASTTTTTSRTPSNKQEKRGSVAGSRIKILNEEILGTPKTEKRGATKSTAPAASTVKILNEKKTPSATVTAVETTKIKTSPSKRKKMEHYVLQAVKSENTKADTTVTVVTEEDDTIDFILADDEEVVPGRIENNNGQEIVVTEDDEDLGEDGDEDGEDSSGKGNSSQTKIKEIVEHVCGKCYKTFRRVQSLKKHLEFCRYDSGYHLRKADMLKNLEKIEKDAVVMEKKDICFCCSESYDTFHLGHINCPDCPKSFKTQTSYERHIFITHSEFSDFPCSICNANLRSEALLALHEEQHKSRGKPYACKICGKDFTRSYHLKRHQKYSSCSSNETDTMSCKVCDRVFYRLDNLRSHLKQHLGTQVVKKPEYMCHTCKNCFYSLSTLNIHIRTHTGEKPFDCDLCDKKFSALVALKKHRRYHTGEKPYSCTVCNQAFAVKEVLNRHMKRHTGERPHKCDECGKSFIQATQLRTHSKTHIRPFPCEQCDEKFKTEKQLERHVKTHSRTKRPVFSCAECKRNFRTPALLKEHMDEGKHSPKQQRSSMRSAVKIMERTDCAICDKNFDSSDTLRRHIRTVHECDPDDIFGVEPHPSKRAKKDIESEEVVPVALNTSAGSLISSQTDGNGVVVREFLVDEGDGAAQTITLENETYTILPLDGAIEGEQLTDEAGVKPEAKKEEAQVSPVVKKEQRKSLAASLAAAIADNLEESCSEDDFSGEILTEEDIKLKENVGKLIDMLVDPPILKKYGWPNAPEETVLCKVIENCGHDLTKGGENYAELDYGSRMREYCKLLFTVVIHNDSIKSLLNNFPIDDVIEYVLGDEDQDEGGLDKDNESHSGDEEAVSVTGETKTNEIREKPEKKEVSAKSEKKEIVGKAVDKDNSEEVVRENKKKPVGEQEKA

SEQ ID NO: 18568 - DNA, 3902 bp, DROSOPHILA
gttttcttattgtttttttgcacctcttttcttgtgcggagctttaaacgtttatcgcctttttatcattatcatttatttgtttgcattagttaacacacacgcacgatcgcgaaatgacacatattaggaacttgggaacatgtttaattttagatgacatcgaatacttcccgaaaacaacgaccgaaacgaaaaagaaactggaataacaccgaaattaagacggaaaacagaattaagcctgcggcgctcgtggtgtttaacgcggatgctgcgctctgtgcgagataatcggaggagcactagccgggccaagattacgggcagtccaatgacagacacggcgacctggcacacgcgtccaaaggcggccaaagacagcgccaaactgcggccaacggggcggatgaaaatgcgagctttgaggaaaagcacacccatacagcaatcagggcttccacacacacatacacttacaggatacaacaccagttgaaccgaaactaccgcaacaagttgaaaagctcaagcaaagagagcggcgagagagagtgggagaggcagagacagagagctaaaagctcgcggtgagaccggcattttctgcggtatttgcattcaattgacgattgcgacgattgtgattgtgattgcgattccgatggcctgtcagctgcaattgacactcagactgaatggcccgccaaatgggttttgtccactcccaacaggaacaagccaccaaataccctggaactcggagagccctttagaatgttaaataaattgtttggtaagtgttttaatattgcagacacaatccttacaagaagttattaagtgataaggtttcgtttgcttttttatttataacatggaactgcatttatacttttccagggtatagatgcataaagtattggaaacaattgaaatcaaatatcgattgccaggggatcgcatttgatcacaatatattccgtgttacattttattgttatggatgcacatttcgatttgaattagccacatcccctgggcgccacatttcgcagacggacgagggactcgtttcgcaattgaaatcgtatgcaaattgacgcaaattgccaacgctgacgttcacacgctcatcatcccgatcgtgggcgatcaccggcggcagggatccgcagaagaactgtgcgtagctaaggtgaaacagttggggagccgtgaactcctgctcaaaggcatatggacggtattcgaactgccgtgagtcgtgggccaagccaaagaaggcatcgtacgccagttgcaggccattgagatctgccaggcgttctttcagcgagacgaatggttgctcctccgcacacttgatggcatcccgaaaaggcttcgactcccggatctccaagcccacaggtgactcatttccagctgcatcgaagagtataccttcctgttcaaaggcgtggttcatctcgtggcccaggactgcgcccagaagactgtgctggaagatggtgtgctctcggtgatcgaacaagggccactgcaaaaattccatgggaacagtaatggtgttcctttcgttctcatagaagggagaagtgcgagccttccttacgttatcgttgacataatagtgccgcagatccactcgagaattccttgcaagcagtccagcattctggagacgggtacgtagggcaaatgcttcaaggagattggccaggaagtttgtcgcggaaaagttcgcacttccatagtggttattatagaactcaggagatttctcctcaggcaaatttcctattttgatctgaataccttccaactttgctcttacataggccaactggtttggcgtaagctgcaggcgattggcatctaaatattggccaaaagctgcctttaaagtggataaaatctccagtaccttactggtatcctcctcccggttttggtatataaatcgatcatagatgtagttcatgcccaggggtaaataggcacgcatatggtgaatgcagcttcttggattccgctcccttggctccgactcctccactaaaacatattggcgtgctcgaatgtacgtgtccttcggctcactggcgaaatcccgtagacagcgaaaacattcccgcaaatactcaacatcactcacctcgaaagtcaggtgataaagctcctcggtgtggttcacgcccaataactcaataaaaaaggaatgcggaatagggatttcctgccttaattcactgaaactccatgtatatacaacaggatattctgcacgatacttatcctgcagctgatgcattttctccaccagtttaaccactcccatcgagtaccacgcttcttcgtaaaggcgcatgagctgcaagacacggcggtcactatatctatcagccgggtcaggcatccttaactgaataacccaacgcatggaatcattggcggccacatcaactcgctcatcaatgaatacaccattcaagccgtatacgagaaattttttaggatgcaaaatccactgattgaccagttcttcgggacgaggattcccgtgaagctttcgcgtatcctccttgcaggccttgtagtattgtcgcatttgctttatcagtcggggtgccagtgtatcgttttcacccaagtggctctccatgaattccaccatggcagtggcgaactgatcctcgactcgctcaaagttgtccacatatttagaggcactggagaagcgaccgcaggcaaaattccagaaattcgtgcacggtgatgttgttctattgagattattgtgaatatcgttcgacgttgccacgttgatgtccactattgcctggatgggaatgaataatgccaccaggcaagagcacagtaaaagtaaacatcccattaagctcgctcgattcacaatgaaacaacagattatcgcaacgctctgctgagctcggccaccttcgaactacctatagagctttggggctgatagtgacagcttggtcaatactagaattcacatttgaaatgtagagcaattacctctaatgaaatgtgcctgccacctatataaacccgcttggtgagtacattaaaccgatcttaacgtttattgaatcttaattacaccgctgttgtagttcaatcttcaatcgttcgctaagacagttcgcaatataaaattggtaatcgcgtcgggactaccccaactatatgtcacacgcttatagtctacttaacaaaactggatctaaggtgttcacttcttgaacttttgcttctttcccgcattcgcacccgccgtggactttttcagctggccgatctgtttggatttttgcttcagcttgttctgcttcttgatgggttttccctcgagaatgggcacatcgtcgatatccactcgcggcgccttggccagtttggcgtttcccttgggcgactgttttcctttcggctgtggcttcgttttcgtttccttaattgctgatttgctaggggagtttgtgccattggttgttggcttattgtcatctggtttagctggtgatccggctccattttccttgggttgcgatcctttgttctttttattgaatgatttcgcatctgaattggaaacagtggttttcccattggtttgtttttgtttaggtgcagacttggaaggtgactcgcttgaatttgtttgcttgtccggtgcctgggatttctcatttttcttctctgctggcttttctggctttggctttttgacaggctgctcaaacaccttggccacatacttggtcttgctctcttcccgcttctttttcttcagttcctgttcgatttcggtgaaactgggttttccggcgcgctttccaagcagttttcggggacccttctcctttgac

SEQ ID NO: 18569 - DNA, 1902 bp, DROSOPHILA
atgggatgtttacttttactgtgctcttgcctggtggcattattcattcccatccaggcaatagtggacatcaacgtggcaacgtcgaacgatattcacaataatctcaatagaacaacatcaccgtgcacgaatttctggaattttgcctgcggtcgcttctccagtgcctctaaatatgtggacaactttgagcgagtcgaggatcagttcgccactgccatggtggaattcatggagagccacttgggtgaaaacgatacactggcaccccgactgataaagcaaatgcgacaatactacaaggcctgcaaggaggatacgcgaaagcttcacgggaatcctcgtcccgaagaactggtcaatcagtggattttgcatcctaaaaaatttctcgtatacggcttgaatggtgtattcattgatgagcgagttgatgtggccgccaatgattccatgcgttgggttattcagttaaggatgcctgacccggctgatagatatagtgaccgccgtgtcttgcagctcatgcgcctttacgaagaagcgtggtactcgatgggagtggttaaactggtggagaaaatgcatcagctgcaggataagtatcgtgcagaatatcctgttgtatatacatggagtttcagtgaattaaggcaggaaatccctattccgcattccttttttattgagttattgggcgtgaaccacaccgaggagctttatcacctgactttcgaggtgagtgatgttgagtatttgcgggaatgttttcgctgtctacgggatttcgccagtgagccgaaggacacgtacattcgagcacgccaatatgttttagtggaggagtcggagccaagggagcggaatccaagaagctgcattcaccatatgcgtgcctatttacccctgggcatgaactacatctatgatcgatttatataccaaaaccgggaggaggataccagtaaggtactggagattttatccactttaaaggcagcttttggccaatatttagatgccaatcgcctgcagcttacgccaaaccagttggcctatgtaagagcaaagttggaaggtattcagatcaaaataggaaatttgcctgaggagaaatctcctgagttctataataaccactatggaagtgcgaacttttccgcgacaaacttcctggccaatctccttgaagcatttgccctacgtacccgtctccagaatgctggactgcttgcaaggaattctcgagtggatctgcggcactattatgtcaacgataacgtaaggaaggctcgcacttctcccttctatgagaacgaaaggaacaccattactgttcccatggaatttttgcagtggcccttgttcgatcaccgagagcacaccatcttccagcacagtcttctgggcgcagtcctgggccacgagatgaaccacgcctttgaacaggaaggtatactcttcgatgcagctggaaatgagtcacctgtgggcttggagatccgggagtcgaagccttttcgggatgccatcaagtgtgcggaggagcaaccattcgtctcgctgaaagaacgcctggcagatctcaatggcctgcaactggcgtacgatgccttctttggcttggcccacgactcacggcagttcgaataccgtccatatgcctttgagcaggagttcacggctccccaactgtttcaccttagctacgcacagttcttctgcggatccctgccgccggtgatcgcccacgatcgggatgatgagcgtgtgaacgtcagcgttggcaatttgcgtcaatttgcatacgatttcaattgcgaaacgagtccctcgtccgtctgcgaaatgtggcgcccaggggatgtggctaattcaaatcgaaatgtgcatccataa

SEQ ID NO: 18570 - protein, 633 aa, DROSOPHILA
MGCLLLLCSCLVALFIPIQAIVDINVATSNDIHNNLNRTTSPCTNFWNFACGRFSSASKYVDNFERVEDQFATAMVEFMESHLGENDTLAPRLIKQMRQYYKACKEDTRKLHGNPRPEELVNQWILHPKKFLVYGLNGVFIDERVDVAANDSMRWVIQLRMPDPADRYSDRRVLQLMRLYEEAWYSMGVVKLVEKMHQLQDKYRAEYPVVYTWSFSELRQEIPIPHSFFIELLGVNHTEELYHLTFEVSDVEYLRECFRCLRDFASEPKDTYIRARQYVLVEESEPRERNPRSCIHHMRAYLPLGMNYIYDRFIYQNREEDTSKVLEILSTLKAAFGQYLDANRLQLTPNQLAYVRAKLEGIQIKIGNLPEEKSPEFYNNHYGSANFSATNFLANLLEAFALRTRLQNAGLLARNSRVDLRHYYVNDNVRKARTSPFYENERNTITVPMEFLQWPLFDHREHTIFQHSLLGAVLGHEMNHAFEQEGILFDAAGNESPVGLEIRESKPFRDAIKCAEEQPFVSLKERLADLNGLQLAYDAFFGLAHDSRQFEYRPYAFEQEFTAPQLFHLSYAQFFCGSLPPVIAHDRDDERVNVSVGNLRQFAYDFNCETSPSSVCEMWRPGDVANSNRNVHP

SEQ ID NO: 18571 - DNA, 8116 bp, DROSOPHILA
ctacattcagttgtaaccggcatgatcggtctttgttttttataaaaaagcttatcaactacagattcactgatcattataatcttggacgtctctactgcaatacgagtgaataaaatgaaaacacttgaatcttttgtatcgagtaattggaatgcggggcatctgaatgagctttttccagtcaactttgttattaaattacagctcacagtttggcaaaaagtggagcatcttcggaatcgcatacattttgaacagttgtgtgttgagaatttaatcgacttatttaacccactaaataagttgtagaagtcacatttatttttgtttagttagtgcacctgcgctttgaggctaaaaactcagctggtgtaaattttaaatttgcttgctgattttagtttacagtcgcatgcttatgaaatcagcacgcgttttgaaagtcaaattgttggaggtttaagtgaattttaatcgttaagctttgtttcgcagttcaaacttgggagcgggttatcaggaaagtaattgtcaagtaccaagccagcaaaaagaagtgtcatgtatctcatttagatacgtgtgctgatagtaccttcagatagtttaaaacatgtttgagtacaggaatattcttactaaaaatatgatcattttgaactgaacttcatttgaaaattaattggttatgataagtttgagagtgaatttcggaaacatggacatttaaagagacatttaaaggacgttgatttgttgaggagaatttagcatgggttatcagataccctaacctcctaacctctattgttcgatcaatcggcattagttgcggagagcgaaaagctttgcaagctctaaaaaccaaaaccgagcgagagatgctctcgtgcgaacaggtctccggcaagttgccatcggatgggatcggatcgcactggtggggatcgggatcgctggtggcaagtgcggatcgtgggcctcagtaccgcccgagctagcgacgcgttaagatccgcatccgaatcgtaaacacaacgagaaacttacactgcgcgcaccgttacacttttgtgctgggagcgatcgaacactaatacactgaccaacgaatttcccgcacaacgaagagattttccctccccaattgaactgtacttggacgtacgttgcgtttttggagttttggaaaagtgcacagtgagtgctgcaagtatttgtacatacagagccacatagcgatacaaacgtcgatagatagaaagatacatatgtagatagtgtgtgggctgttggggctctttgctgttcggtgtttggtgtttggaagacgagctcaaaaaccgcagttagaaactagttttccctacgtgtcgtggtcgtggtcgcagtggcagtggcagttgctgtagtcgctgccttacatgaacgtggaagtactcgctttttgaagtgaaattcgaaaacgcatcctcctcgaccatgtagcgatgtatctggcggatcgctattccttgtgtatctcttcgtggccagatgattcatgtacggtgggcactcgtacgtacactcgatttatttcccgacggaacggcgcagtattcaaattgaaagaacagtggcagtgaactaaaaatagaattatttgttttcatataccaaccgacgaaaatgagaaaaaaaaaaaaaaatacgaaataaaatggctcggcaaaaagcgaaaagtcgaaaagtcgaaaagactttgctcgcccagtaaatgtatctgtgtatctttgcatctgtatccgaatcgtacgctcactaaactttcgtttaatttagccaagttcaaacggcgtctacagcttgtttatgtccgcctgacttgaactcgtgtattgttttcggtgttcgccttgtgtgtgggtgccacaaattggcaactcgacacacagatacgcaacacactcgcaccgctggtagaacgaacataaacatatctacatatagataatgatacatgcctggcgcatatatagacgttagatttcgcctacgttttgatatttgattttcggaaatttcaacaacagaacgccagcgacgacgacaacaccttcgctttttattttggccatttcaaacttgttgttagctcgatatttgtttattttacgagtttgtttgctattgcctacgtatgctatatggcatttggtgatctgtgatcagcactctcgcttcccctttgcgcagccacgcccacttgattggcttaacccaaagcgaaggcatcttctccaattcttttggaaaatcgcgtcttttcaacattttttcctttgcatatctattttgaagtgatgatttaaccggcataccaaacaaattttttaaccattttaatttagatttataatctcaaaaacaactcatttgtaatgcgttaaatcaacacaatgccataaagttctcagaattttctgttgaaacacctattttcaaaattgctatttttccatatttcaatctgtgattcataacaaacatcccaccttttaagataaatgtttacgtttgagaagaatttgcgtgagataagtaaagttatttgtagattttttgtactttatgcattgaaccttataatggtttatcttaataaaatggaaatatcagaatacatttttcgaaaaatgtaattgattagtttgttccttgttagaaacacaattaagttaagtttctcatcgctggcaaactttctcgagccttataaagatagttggctaatattaagttggccttaagtagaatacttggaaagcgggcgttatctttataaaataaactttgcttaaactgagcaaaattcataattgcaaagattttcattcataaaactgcaaaactaacccagcatgctaaaatggcgtgtaatgcctcaacgggttaattccgatcgccagacagacagcaacatgtttttgctccccagagctccaaaccccccagtatatgagatcatttctgagctgcctgtgtatacatatgcaaaaacaaaccatgctctccgctctccggtcatttgtgtttgtttttgttttcgtcgccaatcggaggcccagagaactgctaaaaacgtgctgagatcgggggaaccgagctatatagcgtgcgtatatagtagtgggcgggttgtgggggaagtgggggggaggtttcgttggaggtggcggcggcatcaattagatttggccttttatctatattctattgggctattttatgtgtgtgtttgtctgacgtgaggcattattatttgtgttttatgtagctttatttctttattagctgtattccgttgaccatatggcatgtggcatccctcgacccccatacacccccccccccttcatccatttccattcaaaggtgatttatttagctcgccttgatttgattacttaagctccaatttgcgttgacgtttaatgcagttgctgtcacaaagcgtcgtcttatgacatcatcgtcggtagtcggtagtcggtcatccttctcggatttttgcatcatctccgactatctctcactccaaggttatctctgaaaatcgagaaaaaaactgcattcatacatgtatctatatatacagactaaaaaggagtttaaggacacgttgccgaaagtgaaaaccagtttgacattgaaatttcgactttgtgcctctgtctgttttttggtttttttgcctgtttgtcagttctgaaaatcaatgccagcatttttggtttctctgccaaagggtattattattttaaggtcctcaaaatgggtatatgctattaaaagataacacatttattattaatactttgccttgaaacttcaaggttgtgtaaatttattgttcaaattaaaagcttgtgaactgacaaataaatttgtatcgattattgtaaatatgaacatggaaatttatagccataacatccacctaatattatagtttaaactacagaaaaactcactgatagcgattaatactccatataataaaactatatttttatatagccaatataagcatttatataacaagattaattatgatggaaaatatggattttcatgataataaacggtttcgtttgtcagataacgatattatcataacaatctaatctgatatgtatattttaatataggttaaaaccacggaattctcaaatcaagactatagtttaaatatttttcaagttggtagctagtggttgatggacagcccagctttaccaagtagacttaagttctgtaaggactggcccttaacaaccatctccgccgctttctagagcatttcatcttcgcatgacaggctccgtctgttcatcgcatccattgtgaattggcattccatactttgtgtgctcaagtgatgcccacttcagatgacttaagcttccattaatgcgccaaaagttctcacttcagagtggcgaatgcggccatgttcgaaaatcgacattggcgtgggtggggaaaaatgcttgggattctggcgaaccgccttgacgcgaaatcaacctgctattcggggtcggaatccgtgattacgtgtcagacacccacgagtcgtttgatttactcacacgtagaatttgaataatttatgaatgatactggtttccgtttcagctaaaaaactaattggaaatgcagtactcgagcagttcggaaaattactcatcctcgttgcgggacaagccctcgaaatggggcagggtaagccttgatttatggtccacatcggttagtaaatcactcatacgtcaccattaattcctcagaacgacaagaactacgcctataagaagtcatcctatcaatactcgagttctggcgacaacaatgtctcgtatcagggcaaatcccccgaccagaacatagatcaattggatgccttgttggaggatctgaagcaggaacgacagattaccaacagggaacgcgatctgctgcccagcaatggaaccacttataggacactgtaagtttgcacacgatctcaaattgtagtaactttacaaggattaatgttttgatgttttggtgtagtgaacgcactgatccctcgggcaccgtaacgaggactacgcgagtggtcaagaccagcaagcactcgggcaccggtggccagcagccatttattgatgatgtggagaccttcagtcccaccgactacagcaccctgcagtccacggccaagtactccagcttgaagagggacgagttccagaccaaggacaagccctatactctgggtaagagttaaagagcatatccagtggcaccacttaaactaaaatcttatacgatttcagcccactcccccagtggtggacactacgagagcaagtcgaagatctacgaaagcaatcgcaccattaacaacaatgtggagctgctgcctgcaacgagcagcacacatcagactttgaccagcggcaccaccattgacaaggagctgcaggacatcgctctgggcgatggcatcctgcctgccccaggcaccaaggtgaccaccacggtgaggacctacacctatgagatcccggccactggtcccggcagcaacaccagcaccattaaccgcacccacacgctgaacaactcgaatacgctgagcagcacctacaagcaccacgaaagccacaactccagtcagaacttctcgcagctgtcgcccgttccgcacccacagcctagccatgtgccacagacggtggtttacaacactgagagctactccacgttgaaccggaacagcgatcgtccggtggttagcaaccagtcgtacgagatcagagagcacaaggagaccaccactcgcggcgtgagcccacagccccgtcaactacctttgggatcgggtccggcgggaactccaccgggcaatcgtacggtcatctacaacatccacaagacggatcacgtcaacacagtcaacgagctgccaccacagcagcgctatccgccgcgcagtccggctcacagtcccaactacggaggaccacacagtccaccactacagccgggagtgaatcgctactactacaaggagacggagacctcgaacacggtcaatagcatccacggaccgccgaacggtggaccttacgagccgggtctacctcagtccgctccgctgaaacagctgccgcccaacaacgcgtatccacagcagccaccaaatggaaatggttatccaccgaattcgaccacttacagctacaaatactcctcgaccaccaacacaaacaaccgacgtggcccggactacggctcgccatctccattccccgtggatggcgtggagtatccagtgaatagcaatcctccccagcgagtggacgatctgatgcagtcattcggaactgtaagtatttgaagtatactgaagttactttccaatttctgtttgtttaaaaactaatcagtaatagcttcttgtttgcaagtcagtaattaagccactaataacttggtgaaaccgattagaacgaaagtcgttatcgcaatgccaaaaaactggtagttagagaatactttcgtatgaactcataatacctcagttagataaagataacacatttatcattttaatggtatcataattacttatacttggcagtgatttttatgatctttgatttgactccgtatctactctatatcttagaccaccgaccatgtggatcgcgtggacattgagactccagtgcgcaagcgtgaaatcgagacggcggttgcctcgcccaaccaacagcatgtgccatcggtgaacaaggcgggaaaagaggtgtactatccacccggacacgacaccatcgtcatgaagcgcgaggagatgcatgctggatctgcctcaggcgtgagtattggatacttaccaaggtggaatatgcccaactgataatcctacatccacagggtcgctgggccaagggatccggaatgtacgagtacgagtccggctcgaagtcaaagacgaaaaccaagtccggtggcgccgttgtgcccgtgtgcctgcccctctgctgtgccatgccctgctccattatgtagtgggcggacatcgccggaagaccgtatcttgtacataggtttctaatatttgccgttaatagttctaacgctaaatcctgccccgcgtttttgattgctctctactaggtcgtctaacttctatcgggcttgctgcttgtcaattggttgtacgcgtaatttgtttgccaaattgtatgtctatatatctatacgttattgtctatgtatataatttgtgaagcgtcatctacggatgggccggttgttataccattttattttggatttagtagttcaccccaaactagtttgctcaaaattgttgctcaagcatttaaattcgccagtgggatgcccaaaaagtttactcgatgccaattgttttaacttaaatttgcataccgcataccaaacactaataaatgagccgtggaatccaattccctctattattcgtttcgccagcgcccccaaatacccactaatcataaaccataatcgtaacagcgacttaaaaggtaactcagtcgttacagagccataaatactatttctaatacacgtagtaaccataataaaaaacgagatctaacaaacgaagcgatgaactgtttgaatgcctcttttgaatggatcgatttgcgtggggttttggtatagtaaaagtttttataagtttattttggtataaatcgttctgatcgaataacaatttgcatatcacaaaagtaatatctacatttcaccttgtaggaataggtgtagctttcttttgagaagttattaaaaaacactatagtgaaacaacaaaaaactaaaaacaacataaaacaatacaaaaatcaacagaggtatattatttagataagtatcattgagcactttgagtagtgaaacgggaggattattgctacagagacgagttcttattgttgttcttggattacgaattgaagctaaatgatggattaaaagtatactacatcgtaatatgagtatagttactggacttactacc

SEQ ID NO: 18572 - DNA, 2060 bp, DROSOPHILA
ctagcgacgcgttaagatccgcatccgaatcgtaaacacaacgagaaacttacactgcgcgcaccgttacacttttgtgctgggagcgatcgaacactaatacactgaccaacgaatttcccgcacaacgaagagattttccctccccaattgaactgtacttggacgtacgttgcgtttttggagttttggaaaagtgcacaatgcagtactcgagcagttcggaaaattactcatcctcgttgcgggacaagccctcgaaatggggcaggaacgacaagaactacgcctataagaagtcatcctatcaatactcgagttctggcgacaacaatgtctcgtatcagggcaaatcccccgaccagaacatagatcaattggatgccttgttggaggatctgaagcaggaacgacagattaccaacagggaacgcgatctgctgcccagcaatggaaccacttataggacacttgaacgcactgatccctcgggcaccgtaacgaggactacgcgagtggtcaagaccagcaagcactcgggcaccggtggccagcagccatttattgatgatgtggagaccttcagtcccaccgactacagcaccctgcagtccacggccaagtactccagcttgaagagggacgagttccagaccaaggacaagccctatactctggcccactcccccagtggtggacactacgagagcaagtcgaagatctacgaaagcaatcgcaccattaacaacaatgtggagctgctgcctgcaacgagcagcacacatcagactttgaccagcggcaccaccattgacaaggagctgcaggacatcgctctgggcgatggcatcctgcctgccccaggcaccaaggtgaccaccacggtgaggacctacacctatgagatcccggccactggtcccggcagcaacaccagcaccattaaccgcacccacacgctgaacaactcgaatacgctgagcagcacctacaagcaccacgaaagccacaactccagtcagaacttctcgcagctgtcgcccgttccgcacccacagcctagccatgtgccacagacggtggtttacaacactgagagctactccacgttgaaccggaacagcgatcgtccggtggttagcaaccagtcgtacgagatcagagagcacaaggagaccaccactcgcggcgtgagcccacagccccgtcaactacctttgggatcgggtccggcgggaactccaccgggcaatcgtacggtcatctacaacatccacaagacggatcacgtcaacacagtcaacgagctgccaccacagcagcgctatccgccgcgcagtccggctcacagtcccaactacggaggaccacacagtccaccactacagccgggagtgaatcgctactactacaaggagacggagacctcgaacacggtcaatagcatccacggaccgccgaacggtggaccttacgagccgggtctacctcagtccgctccgctgaaacagctgccgcccaacaacgcgtatccacagcagccaccaaatggaaatggttatccaccgaattcgaccacttacagctacaaatactcctcgaccaccaacacaaacaaccgacgtggcccggactacggctcgccatctccattccccgtggatggcgtggagtatccagtgaatagcaatcctccccagcgagtggacgatctgatgcagtcattcggaactaccaccgaccatgtggatcgcgtggacattgagactccagtgcgcaagcgtgaaatcgagacggcggttgcctcgcccaaccaacagcatgtgccatcggtgaacaaggcgggaaaagaggtgtactatccacccggacacgacaccatcgtcatgaagcgcgaggagatgcatgctggatctgcctcaggcggtcgctgggccaagggatccggaatgtacgagtacgagtccggctcgaagtcaaagacgaaaaccaagtccggtggcgccgttgtgcccgtgtgcctgcccctctgctgtgccatgccctgctccattatgtag

SEQ ID NO: 18573 - protein, 618 aa, DROSOPHILA
MQYSSSSENYSSSLRDKPSKWGRNDKNYAYKKSSYQYSSSGDNNVSYQGKSPDQNIDQLDALLEDLKQERQITNRERDLLPSNGTTYRTLERTDPSGTVTRTTRVVKTSKHSGTGGQQPFIDDVETFSPTDYSTLQSTAKYSSLKRDEFQTKDKPYTLAHSPSGGHYESKSKIYESNRTINNNVELLPATSSTHQTLTSGTTIDKELQDIALGDGILPAPGTKVTTTVRTYTYEIPATGPGSNTSTINRTHTLNNSNTLSSTYKHHESHNSSQNFSQLSPVPHPQPSHVPQTVVYNTESYSTLNRNSDRPVVSNQSYEIREHKETTTRGVSPQPRQLPLGSGPAGTPPGNRTVIYNIHKTDHVNTVNELPPQQRYPPRSPAHSPNYGGPHSPPLQPGVNRYYYKETETSNTVNSIHGPPNGGPYEPGLPQSAPLKQLPPNNAYPQQPPNGNGYPPNSTTYSYKYSSTTNTNNRRGPDYGSPSPFPVDGVEYPVNSNPPQRVDDLMQSFGTTTDHVDRVDIETPVRKREIETAVASPNQQHVPSVNKAGKEVYYPPGHDTIVMKREEMHAGSASGGRWAKGSGMYEYESGSKSKTKTKSGGAVVPVCLPLCCAMPCSIM

SEQ ID NO: 18574 - DNA, 5695 bp, DROSOPHILA
gtggagatcgtgctccagccaaacgatcagatcaaaatgtcgggcataaatgtaaagcttgaaacctttggcgacttggacgacgacggagagaacctggtgatcatagaagattccgccgcccatgatattgtcgaaggtggcggtgacgaaccggcattggaaggacagctcgatgcccagggacgattggtgcagcagatcttggaaacgcaaaaggaactggtcaatcaaggcgccgaagtggaaccgcctccagcacaggcaggccgacaaacttctgcgcgccaggtgaacgacgtacgcgacgtagtccaaaagctcaccaagtcgataggtccgctgggtaaactactggactgcatacccgaggattttgatgcaatgcagctggagcttacgatgtggcgcgacacctacacgcaggcatccacggaactaaaaagggagcagactctcacggcatctgccacggagcccctgcagcatcagttgcagcaaatccaagccagcattgcggagtaccgggagctaatcgacgagagtcgccacaagatcttgcaaaacaacgcacgtattctgaagttgatgatggaacagtaagcattgaggattaataagcattgttaaaaattcaagagagttttatcgaaaatattgaatttgtatattttataattaataagagtactataaaaatagccatgcatatattgcttggtaacatcattcaattcaaaaatatataaaatctatataataatatcaaaatatctttgatatgtaatatgttggtttgtttgtttttgggtaatttgtcaatgcgcaagatgtctgaatattcaagcaacagacggtaagtttctcttttaaggtcacttggtgtttgtaccaaaaccaacgatcttaaaaatacaaatgttgtaaaaatcatcaacgatcaattcctagaatatggtttttgtgcggtaattgtacgcatgcatcaagggctggaaaatcaagctttctcttgttcgcctacaggttttttcttattttcccggaccacctcctctgagttatccttatccacagctttccccacgatctccttcttttcagatttcgccgaaacttccttcttttccggtttctctctgatttcatttgttttagtttcgcctgtgaccgacaccgcttcttcatcacctgaatgtgactcattgtctttgtccaatccaccttcgtcctgatcctcatctcccagtacatattcgatcacatcgtcgatggggaaattattgagcagcgacttgatggaatcgttgtgaatgaccacggtaaagagcagtttgcagtactctcgcatgcggctaccgtagtcaagctcagcgtagttttcgccacctttggttaggtcgtggccacagttctcgatcactttgcagagcaccgtctcctcgggggcattgggccagccgtatttctttaggatcggtggatccactagcatatcaataagtttacccacattctctttgagctttatgtcctcctcagttagaatttcgccactgaagtcatcctcgctacatgattcttccaaattatctgcgatggcagcggccagactggcggccagggatttacgctgctctttctttaccaccggcgagacctgcgcctcctccttcttcgcctcgggcttaacgccagcctcatccgtcagctgctctccctcgatggccccgtccaggggcagaattgtgtatgtttcgttttctagtgtaatggtctgggccgcgccatcgccttcgtccacgaggaattcacgcaccacaacgccattcccgtccgtttggctagaaattaacgagcccgccgatgtgtttaacgccactggtacaacctcctccgattcgatgtccttctttgcccgctttgatggatgcggctcaacgccaaaaatgtcatccggatcgcattcgtgaacggtgcgtatgtgccgtcgcagggtatcgctgctgtcaaagttcttatcgcaaatggcgcaatccgtgcgttccataattttgacggccgatcgcattgatgaccgttgttgtttcgctacaaagggtaggagcgggattaaagccttgattattgccaattgtcgattccaacttacggctgtgttttccctcgtccatatgctccttgagcaatgctggagtgcggaaattacgcttgcactcggcgcaggaaaagacggggcgttttgtgcgagaatgggtcttcacatggcgctcaagtctgcgaaacaaaattgcaataagtaagtagggctaacagaaaagataaaaggttttttaatatcttactgtttctctgttttgaatttttcgtcgcattgctcacagggaaaggggcgaatatgggttttggaatgggtgcgcagctgggtggcctggataaaactcttgccacattcatcacacttgtgcggacgctctccagtgtgccgtttcatgtgacgattgagcacttcctttacggcaaatgcttggttgcactaaaaggtaatagaataccgcattgttacaataggttaaatgaaaagttacggaagttttaagactaaccacagtgcaactgtatggtttctcgccagtgtgatagcgtcgatgctttttaagggccaccaatgcagaaaacttcttgtcgcaaagatcgcagtcaaatggtttctcccccgtatgagtgcgtatgtgaatgctgcgaaaatataccgaacattactttatgtcttttaaaatcaattagaaaacctacttcagcgtggacaggctgtagaaacaattcttgcacgtgtggcacatgtactccggctttttaaccacctgtgtacccaaatgctgcttcaaatgcgatcgcaggttgtccagccgatagaagacacgatcgcacaccttgcagctcatggtatcggtctcgttcgatgagcacgatgagtacttctggtggcgcttcaagtggtacgagcgggtgaagtccttgccgcagatcttgcatgcatacggcttgccacgtgacttgtgctgttcctcgtggagcgccaacaaggcctcgctgcgcaagttggcattgcaaatggagcaaggaaaatcgctgaactcggagtgagtgatgaaaatgtggcgttcgtaactggtctgtgtcttaaacgacttggggcagtcgggacagttaatgtgacccagctgaaaggaaaatgtggtatgcgaaagttatgcttacttctcttggtatcaatctttatgacttacatggaaggtgtcgtaactttcgctgcagcagaagcatatgtccttcttctccatcaccacggcatccttctcgatcttctccaggttcttaagcatgtcggctttgcgcaaatgatacccactgtcatagcgacagaactctagatgctttttcagactctgaacgcgacggaaggtcttgtagcatttgccacacacatgctccacgatctccttgatctttgtctggctagagttgcccttgcctgaggagtcttcaccgtcctcatcaccatcctcccctagatcctcatcgtcctcggtgacaacgatctcctggccgttgttattttctattctgcccggaactacttcctcatcatccgctagaatgaaatcaatggtgtcatcttcttcggtgaccacggtaaccgtggtgtccgccttggtattttctgatttcacagcctgaagtacatagtgctccattttctttcttttactgggagacgtcttgatcttggtagtttccacggctgtcacggtagcactgggtgtctttttctcgttcagaatcttcacagtggaagcagccggagctgtgctctttgtggcgccccgtttctcagttttcggagtgcccagtatttcttcattgagtattttgatgcgcgatccagcgacactgccacgcttctcctgcttgttggagggagttcttgatgtggtagtagtagtgcttgcctccgaatcctcaccagctcccacgtcattcaagagcttcatcctggtggcgggacgtttgtccttaggcggcgaaatgttttccacacccagcagcttgcccttcttttccttgccctccttggaggcactcatgttggtgataccagcctgcaattaagatcgattggatgataattcaggatcaggataaccagtgaccgctttagtctacttttaggcacgtgatttactgaacatcacattttgccagcgtcaccaacacacgcccaaaagctgctaagaaaaaatggcgtcgcgctgttcgatctttacgatcgatcggccttggtgtgagcgagacaacactacctgcgcctgacgcacagaaaacgcaacaagttttcttctgaaataaaattgtatttcaaaggggtagcaaataattctaatacactcgcaaatccgtagcatacttttcaaatatttaatgtgattttgtgccggcgaaggacgtggaggatcggttttaaccacttattttgctgattagaagtgcacttttctgctccgcagcgaaagaaagtgactgccatcgccgataaagagcgtgaaattatcaagtcactggctaaggtatttgcttcacaaacatgtcctcatatcacgggatgcgttccttaaagggttttgaccgcatttccgataataaatcacaatttacctaattttatgctttaaattccaacacgacaagcgtttgtgtatgaaaattcagtgtgaccgttgcatgtaggttggaaaataccattaattacaacaacccgtgaaaaaataatctgaacatgccgccatgaaaagtacaaagaaatttcctctgttttgaatcttctgggttgtaaatttgtaataattccaacataaatttaaaataaatagccggtgtctggcttaatattatattaactttttattggttaactttgtaagcatagattaatgatccgaacaataaagcttatatggaacatttcactatttatatataatttcagtcgaaggccaccgcagccgttgctcggtaagataattatcaggtttaacattttatacaaaaagtaattgaataaaatacaaataaatgcattctttaatatgcattttgataaaataaaaaacaaaatatataagcatataattaaaatagcagtgctcacaagggttaaaggctagtatgttaatgaggtatacctatcccatgatctcggtatatttaagccgccttgccacggtcacactttcgccaattgcaacgataaaaaggtaaataaaagccgcattaactcacaaattgcaattaactagcaataattgtaagccaatagccatgacgactgcctttgatgccgcacacactgaggggccgggattcgtgggcattcggttctgccaggagtgcaacaacatgctgtaccccaaggaggacaaggagaacaagatcctgctgtacgcctgccggaattgcgattacaaacaggaggcggactccaactgcatctacgtgaacaagattatgcacgagatcgacgagctgacccacattgtgcccgacgtgatttccgatcccacgctgccgcgcaccgaagaccacgcttgtcccaagtgctcccatcgggaggcggtcttcttccaggcgcaaactc

SEQ ID NO: 18575 - DNA, 3068 bp, DROSOPHILA
gaaatgcggtcaaaaccctttaaggaacgcatcccgtgatatgaggacatgtttgtgaagcaaataccttagccagtgacttgataatttcacgctctttatcggcgatggcagtcactttctttcgctgcggagcagaaaagtgcacttctaatcagcaaaataagtggttaaaaccgatcctccacgtccttcgccggcacaaaatcacattaaatatttgaaaagctggtatcaccaacatgagtgcctccaaggagggcaaggaaaagaagggcaagctgctgggtgtggaaaacatttcgccgcctaaggacaaacgtcccgccaccaggatgaagctcttgaatgacgtgggagctggtgaggattcggaggcaagcactactactaccacatcaagaactccctccaacaagcaggagaagcgtggcagtgtcgctggatcgcgcatcaaaatactcaatgaagaaatactgggcactccgaaaactgagaaacggggcgccacaaagagcacagctccggctgcttccactgtgaagattctgaacgagaaaaagacacccagtgctaccgtgacagccgtggaaactaccaagatcaagacgtctcccagtaaaagaaagaaaatggagcactatgtacttcaggctgtgaaatcagaaaataccaaggcggacaccacggttaccgtggtcaccgaagaagatgacaccattgatttcattctagcggatgatgaggaagtagttccgggcagaatagaaaataacaacggccaggagatcgttgtcaccgaggacgatgaggatctaggggaggatggtgatgaggacggtgaagactcctcaggcaagggcaactctagccagacaaagatcaaggagatcgtggagcatgtgtgtggcaaatgctacaagaccttccgtcgcgttcagagtctgaaaaagcatctagagttctgtcgctatgacagtgggtatcatttgcgcaaagccgacatgcttaagaacctggagaagatcgagaaggatgccgtggtgatggagaagaaggacatatgcttctgctgcagcgaaagttacgacaccttccatctgggtcacattaactgtcccgactgccccaagtcgtttaagacacagaccagttacgaacgccacattttcatcactcactccgagttcagcgattttccttgctccatttgcaatgccaacttgcgcagcgaggccttgttggcgctccacgaggaacagcacaagtcacgtggcaagccgtatgcatgcaagatctgcggcaaggacttcacccgctcgtaccacttgaagcgccaccagaagtactcatcgtgctcatcgaacgagaccgataccatgagctgcaaggtgtgcgatcgtgtcttctatcggctggacaacctgcgatcgcatttgaagcagcatttgggtacacaggtggttaaaaagccggagtacatgtgccacacgtgcaagaattgtttctacagcctgtccacgctgaacattcacatacgcactcatacgggggagaaaccatttgactgcgatctttgcgacaagaagttttctgcattggtggcccttaaaaagcatcgacgctatcacactggcgagaaaccatacagttgcactgtgtgcaaccaagcatttgccgtaaaggaagtgctcaatcgtcacatgaaacggcacactggagagcgtccgcacaagtgtgatgaatgtggcaagagttttatccaggccacccagctgcgcacccattccaaaacccatattcgcccctttccctgtgagcaatgcgacgaaaaattcaaaacagagaaacaacttgagcgccatgtgaagacccattctcgcacaaaacgccccgtcttttcctgcgccgagtgcaagcgtaatttccgcactccagcattgctcaaggagcatatggacgagggaaaacacagcccgaaacaacaacggtcatcaatgcgatcggccgtcaaaattatggaacgcacggattgcgccatttgcgataagaactttgacagcagcgataccctgcgacggcacatacgcaccgttcacgaatgcgatccggatgacatttttggcgttgagccgcatccatcaaagcgggcaaagaaggacatcgaatcggaggaggttgtaccagtggcgttaaacacatcggcgggctcgttaatttctagccaaacggacgggaatggcgttgtggtgcgtgaattcctcgtggacgaaggcgatggcgcggcccagaccattacactagaaaacgaaacatacacaattctgcccctggacggggccatcgagggagagcagctgacggatgaggctggcgttaagcccgaggcgaagaaggaggaggcgcaggtctcgccggtggtaaagaaagagcagcgtaaatccctggccgccagtctggccgctgccatcgcagataatttggaagaatcatgtagcgaggatgacttcagtggcgaaattctaactgaggaggacataaagctcaaagagaatgtgggtaaacttattgatatgctagtggatccaccgatcctaaagaaatacggctggcccaatgcccccgaggagacggtgctctgcaaagtgatcgagaactgtggccacgacctaaccaaaggtggcgaaaactacgctgagcttgactacggtagccgcatgcgagagtactgcaaactgctctttaccgtggtcattcacaacgattccatcaagtcgctgctcaataatttccccatcgacgatgtgatcgaatatgtactgggagatgaggatcaggacgaaggtggattggacaaagacaatgagtcacattcaggtgatgaagaagcggtgtcggtcacaggcgaaactaaaacaaatgaaatcagagagaaaccggaaaagaaggaagtttcggcgaaatctgaaaagaaggagatcgtggggaaagctgtggataaggataactcagaggaggtggtccgggaaaataagaaaaaacctgtaggcgaacaagagaaagcttga

SEQ ID NO: 18576 - protein, 941 aa, DROSOPHILA; identical to SEQ ID NO: 18567

SEQ ID NO: 18577 - DNA, 6341 bp, DROSOPHILA
gttactccaccgcccaaataccatctgcatattatcattattacgatgtagttaaccacgggaaatcttcccgggctctcggtttgctagctaattatttatgctttttacatacagattacttgacaaatgcatttatcgattttacggctgcggcatgcaatttacatgtgtactcgaatgtgattattgaattatccccatatggtttcgaattcgtatctgtaactgtttaaaggtgtatctgtatctgtggatgtatctgcatctgtgtatatctatgtttgggcagtaaatacggtattgagagctatttacaaatggatgcaggatgctggagatgcgcggatacatacatgggtagctattccgggttaatggccattaccaagtcaattattgaacaatcaatttgggaatgcaaatgcagctcgcccatggaaactccatctcaactcgggaatctttatactcaaggttctggagtccaactgattaaaaccatattaaaaagttatcacaaattcccccctcgggcaattctcggctaagcaaatgccagatgaagaccaaaagttcgtgctcatgtgagggagaaaactaagtttggtgtggtaaagtttcgaaactttgaaatggcattgtagtaagtaacatccctgctctcattgtccccctactgtttttggatacacacacttgacatggccgaggccctcggcccactgcatatgtatcttgtatcttgtatctcgttccttggggctgtgtgcgctgtgtttgtttagtgcatctaaaatgactttacactggataaacaaaataatatacgttaaaatctggctggctagtttcaacttccgcatttctattttgctgtcccccctccttagcttaactcgcacatatattttagtaattaaaattatgcacaggaaccagtccctaaagaaatcactgtcactctcccagaaagcggtcggttttggcccacgcctctttacaccagatacgcctgaacatggggtccctgctgttgtccggacacggctgtcggatttggttgctgctgctgctgctgctgctgttgttgctgctgctgatgggcggcctggctcgctttagagcccagtgttccggcctgggcctgctgaagatgcagctgctcccgcttgggtcgccaggtctgggccctctgggccgcttccatggcaagcccacccggtgcacccggcatcatcagcatgtgctgctcgttatccagggtcgagtagtccgaatcgatgctggagtagatgtgctccgatggcggacgcatcccgtgatgctggtagtactgggcgtgcaggtgatggtttccacctgatccagatcccggctgctctcctcttctctgtggccttggactgggcgtagccgtggtggccgtggagtagttctgttccgcgggaacagaggcatttactggtacaacttgtggaacagcaccaattccaactgcatccgctgggccacagtaggcgggtggcggagcttggcgataaagcagcccaggacttgccggctgtttcacccgctcgtggttgtgatggtccagctccagcgtgtagttgttgccccggaatgtgggatagtccacgggcagtgcgtagcgcaatttctcccagaagtggcgatccgagcggcgaattctatgaaccgctgatgttttcaaatagggcaggagttcaatatcgctctccgcctcgaaggcgacctcgggctcttcaatgatcaccagtttctgaggtcttccacgcagagcatcatgaacggatcgtcgaagctcacagcgggcccactccgtttgaaggaagttccgggtgagcagaatgaccactcggcgggagacccttgttgcctctaatagctgatagtgggtggcatcgtgggccaggtctctgtgctgcagacagaccctcagtggaggtcttccggtttccagctgggcggccaagtgctggcatacgaactcggaatctttggcggaatgcaggagcacggcatcgtagagcttctctgactcctcgcaacgtggaccgaatactcgaacgccataatgggcaaacagccagatccttagggattcgcggaaggcaaagaccatggcgatgaccacgagcagaaagagaagagccagtgcagcagccagcaagggaatatacgattctgggataccatgctgcagcatggagccaccggagtagtaatcagtgcaggcagcacctgtggcgttaaagtccagctctctcttctcaagggatcccgaattcgagctgctatcttccagtgcagcactgccagttcccgaacttgcggccatgcagtagatatcctgggcatcctggacaatcagggcattatccgccacatacgaggtgagggcctgcaagaactgacatctgcagctccattggtttctgcccaagctgatggactttaatcttgtgccgaaatgggttgcatgcatctgccaaatgggaagagtaaccagacggttgccatcaatacggattagctccaaggcggccaaaggtgccagagtggcgttttcaatggtcgtcagttgattattttgcagatacagttccctcagagcagaaagctgctcaaactcgtagccatgaagggtgcgcaatttattatcggccagatggagcaactgcaacgaggccaggctggcaaaggtgcgattttgtatggccgccacttggctgccattcacatagagagctcgcaggttcttgcgcccaataaatgcatgatttttcagcacagggaagttgtttccatccaggtagaccacactggaatccatgggaacgcgccgtggcagctccgtggtctgttggccgccacagtcgacaacattggtggaccagatttggtcgtggtagcaggtgcaattactcggacacgtcatctcgcagtcacaggcatcaaagtcacagcagtgacataaggcgaaacaatgcgactcgtagcggcagaggaagtcctgcggacgcagaccactcaaaggacgcactgcagcaccacgggcgtgaggcatcacgcattcgatgttggccatatccatcaccctaggatgctgacgggtggtcaagttgttaatcctctgcagccagtccatggtgcagtcgcactcgaagggattaccacccaggtaaaattctggcaacggcttgggagccaccactggagccactctcaactgttgcaactgtagtttactcagctgattggcatacagatcgactcgggccagatttgctttatccacaaaggcattgggctgcacatttccaatgagattattgttgatgaacagcagttctattgtgtttggaatcgacataggtccaatttctgtgatgcgattgtgcgaggcatccagcgtttttactcgaatctcctcctgaagcttatagtagttacccagggcctcaatatagtttccatggatatcaagccattttaggttcgatgggatgaatgcgtaatcgaaccacaccaagtggttctcggaaaggtttagccacagcagcgaaaccagagtagcgaaaactccatttatgtccgcgaggaagttcctgtccaggcgaatagcctccaattcgaagtttttgtcgaatgatccccgctctatgctctggatgcggttcttggccaagttcaaaacactcagcctaggcaaatcctggaacatgcccacggtgatattgccaatctggttgtctatcagccgcagaccagtcagctggtgaagattcttgaagctctggttgtcgaaggtacgaatttgattctcgcccaggtcaagagtgcgcaacatggccaaatcctgaagggcacgaggaacctcatttagctggttagagctcaggtccagctccttcaagtccgagcagttcttgaacacagcaggctccaccacgctaatgagattattgttgagcgtcaacttggacagcacatacaacccattgaatagtttatcatccaaggtgtgcaggcgattctcggcaaggttaagggtgtgcagattatacaacggcaggaaggcattatcctcgatgtgaccgatggagttattccgcaaatttaggatctgaagaaagtaaagctccttgaaagtgcggtaatcaatgcgagtcaaagcattatgggccagattcagcacaatgagtcgaataaggccggcaaaggtggtgttatccacgtggttggaagtcaactggttaccggacaaatccactaccaaaagttgctccaggcgatggaacagtcctttgggaagctcgtagagttcgttctgctgcaggtggatctcccttaattccttggaaccagcaaatagtccttccggaagggtctccaggtggttattactcaggttgactatcctcagagaagctagtccggctagcgcctccccagagagttccgatagattattgtatgctagattcaggtgctgcaatctccggagtcgggaaattccccaactttcgcttatggatctcaattcattatgactggcgtccaggacttgcagctcactgccagcacttccggaacccgcgccgcagttcatgtccgcgaatcccatctgctcggcagtgcgaatgcggttccgggtgagattgagcacctggaggttgcccaccggacagaggaagccggagggcagctgtctcagattgttgtctcccagatccagatcggtgagctgtttcagaccaccgagagagtcggggaagagctccagggtcctcgttggaccccattcactgttgtgggtgctcaagcgcagggatttcagagtggccaatccctcgaaggcattgttgggcaactggagcagcttgcacgagtccagacgcagcgcctccagggtctgcaacctggcaaatactgccacgggcagtgttgattcgaagaggtagagctcgctgcactgaatagtcaactggctactgccatcggcgccctggagatccagacccggctgtcgctcaatgagacgcagggcgcagtgcaccgaactggtgccgttgtaggaccaggagcactggttggccgggccactgggttgcgatggattggccggaaccggcgaggcggccggcacattggacagcagcgaggagtagtcgcctgatagcgatactgtggcagcggctcctgttccggcgcctaacatggcgctggcactcgattcgctctccttgggcgccagtgcggactcgaccgcgagactccaggagaacccgagcaggagcagcaggattgccgccatggttttgggtgttgtgcttggggggccaatggtatctgtatcttgcagataccttcaaggggtgtagttcgcgtggttttcgtgtggatttttcactcttggtcaattgacatttttcctggccactgtttcactaagcgcacatttaaactgggtgtatttttcacttttttccttttcagcgcattcgtttaatttctctttcacttgttctgatggctgtttctcttattttctccaatattcttatttgcttaactctgcgatctgcgaattgaattgtgcgtggcccacacgtccgaaccgtacggcactcgcactcgaactgttttcaggtttgccacaaactgacggctgagtctcgagttgctgcttcgacggacggcaaagtatctcgcagatacgaatgattccgccgagcaatggcgcatgagcactgacaaagagagcaattttagtaacatttaccgccgctgctgggcgttatggcgccactgttcttgagagaaggtacaaaatgagagagagcaaatcgtttgagtgaaagagattctttgagtcaagtcgctgtttgaatttgtgaatcaaacgtaaacattgaccaagagcaaatagcaacttgaaattcaatagggaataaaattgctattgtcaataagtagtaatcacataagtcaacaattatagcaatattaattaatatttttataaagggcttattgacatggtatgccaatggtacaacgattaaaaactatgtcttaatttcctgaaattataatatttagagcaccaatcactttacacattacccaaagcgtcgatttacattttgataagcttatgatgcctaatctgtactattgctataaaaaatcttctgaatgaaaataagcttagaggatatattttatgatatggttgccactttttggacgaaccacttttatttaagttattaatataataaatatttttgtttcaaccaggcataaagaat

SEQ ID NO: 18578 - DNA, 4341 bp, DROSOPHILA
atggcggcaatcctgctgctcctgctcgggttctcctggagtctcgcggtcgagtccgcactggcgcccaaggagagcgaatcgagtgccagcgccatgttaggcgccggaacaggagccgctgccacagtatcgctatcaggcgactactcctcgctgctgtccaatgtgccggccgcctcgccggttccggccaatccatcgcaacccagtggcccggccaaccagtgctcctggtcctacaacggcaccagttcggtgcactgcgccctgcgtctcattgagcgacagccgggtctggatctccagggcgccgatggcagtagccagttgactattcagtgcagcgagctctacctcttcgaatcaacactgcccgtggcagtatttgccaggttgcagaccctggaggcgctgcgtctggactcgtgcaagctgctccagttgcccaacaatgccttcgagggattggccactctgaaatccctgcgcttgagcacccacaacagtgaatggggtccaacgaggaccctggagctcttccccgactctctcggtggtctgaaacagctcaccgatctggatctgggagacaacaatctgagacagctgccctccggcttcctctgtccggtgggcaacctccaggtgctcaatctcacccggaaccgcattcgcactgccgagcagatgggattcgcggacatgaactgcggcgcgggttccggaagtgctggcagtgagctgcaagtcctggacgccagtcataatgaattgagatccataagcgaaagttggggaatttcccgactccggagattgcagcacctgaatctagcatacaataatctatcggaactctctggggaggcgctagccggactagcttctctgaggatagtcaacctgagtaataaccacctggagacccttccggaaggactatttgctggttccaaggaattaagggagatccacctgcagcagaacgaactctacgagcttcccaaaggactgttccatcgcctggagcaacttttggtagtggatttgtccggtaaccagttgacttccaaccacgtggataacaccacctttgccggccttattcgactcattgtgctgaatctggcccataatgctttgactcgcattgattaccgcactttcaaggagctttactttcttcagatcctaaatttgcggaataactccatcggtcacatcgaggataatgccttcctgccgttgtataatctgcacacccttaaccttgccgagaatcgcctgcacaccttggatgataaactattcaatgggttgtatgtgctgtccaagttgacgctcaacaataatctcattagcgtggtggagcctgctgtgttcaagaactgctcggacttgaaggagctggacctgagctctaaccagctaaatgaggttcctcgtgcccttcaggatttggccatgttgcgcactcttgacctgggcgagaatcaaattcgtaccttcgacaaccagagcttcaagaatcttcaccagctgactggtctgcggctgatagacaaccagattggcaatatcaccgtgggcatgttccaggatttgcctaggctgagtgttttgaacttggccaagaaccgcatccagagcatagagcggggatcattcgacaaaaacttcgaattggaggctattcgcctggacaggaacttcctcgcggacataaatggagttttcgctactctggtttcgctgctgtggctaaacctttccgagaaccacttggtgtggttcgattacgcattcatcccatcgaacctaaaatggcttgatatccatggaaactatattgaggccctgggtaactactataagcttcaggaggagattcgagtaaaaacgctggatgcctcgcacaatcgcatcacagaaattggacctatgtcgattccaaacacaatagaactgctgttcatcaacaataatctcattggaaatgtgcagcccaatgcctttgtggataaagcaaatctggcccgagtcgatctgtatgccaatcagctgagtaaactacagttgcaacagttgagagtggctccagtggtggctcccaagccgttgccagaattttacctgggtggtaatcccttcgagtgcgactgcaccatggactggctgcagaggattaacaacttgaccacccgtcagcatcctagggtgatggatatggccaacatcgaatgcgtgatgcctcacgcccgtggtgctgcagtgcgtcctttgagtggtctgcgtccgcaggacttcctctgccgctacgagtcgcattgtttcgccttatgtcactgctgtgactttgatgcctgtgactgcgagatgacgtgtccgagtaattgcacctgctaccacgaccaaatctggtccaccaatgttgtcgactgtggcggccaacagaccacggagctgccacggcgcgttcccatggattccagtgtggtctacctggatggaaacaacttccctgtgctgaaaaatcatgcatttattgggcgcaagaacctgcgagctctctatgtgaatggcagccaagtggcggccatacaaaatcgcacctttgccagcctggcctcgttgcagttgctccatctggccgataataaattgcgcacccttcatggctacgagtttgagcagctttctgctctgagggaactgtatctgcaaaataatcaactgacgaccattgaaaacgccactctggcacctttggccgccttggagctaatccgtattgatggcaaccgtctggttactcttcccatttggcagatgcatgcaacccatttcggcacaagattaaagtccatcagcttgggcagaaaccaatggagctgcagatgtcagttcttgcaggccctcacctcgtatgtggcggataatgccctgattgtccaggatgcccaggatatctactgcatggccgcaagttcgggaactggcagtgctgcactggaagatagcagctcgaattcgggatcccttgagaagagagagctggactttaacgccacaggtgctgcctgcactgattactactccggtggctccatgctgcagcatggtatcccagaatcgtatattcccttgctggctgctgcactggctcttctctttctgctcgtggtcatcgccatggtctttgccttccgcgaatccctaaggatctggctgtttgcccattatggcgttcgagtattcggtccacgttgcgaggagtcagagaagctctacgatgccgtgctcctgcattccgccaaagattccgagttcgtatgccagcacttggccgcccagctggaaaccggaagacctccactgagggtctgtctgcagcacagagacctggcccacgatgccacccactatcagctattagaggcaacaagggtctcccgccgagtggtcattctgctcacccggaacttccttcaaacggagtgggcccgctgtgagcttcgacgatccgttcatgatgctctgcgtggaagacctcagaaactggtgatcattgaagagcccgaggtcgccttcgaggcggagagcgatattgaactcctgccctatttgaaaacatcagcggttcatagaattcgccgctcggatcgccacttctgggagaaattgcgctacgcactgcccgtggactatcccacattccggggcaacaactacacgctggagctggaccatcacaaccacgagcgggtgaaacagccggcaagtcctgggctgctttatcgccaagctccgccacccgcctactgtggcccagcggatgcagttggaattggtgctgttccacaagttgtaccagtaaatgcctctgttcccgcggaacagaactactccacggccaccacggctacgcccagtccaaggccacagagaagaggagagcagccgggatctggatcaggtggaaaccatcacctgcacgcccagtactaccagcatcacgggatgcgtccgccatcggagcacatctactccagcatcgattcggactactcgaccctggataacgagcagcacatgctgatgatgccgggtgcaccgggtgggcttgccatggaagcggcccagagggcccagacctggcgacccaagcgggagcagctgcatcttcagcaggcccaggccggaacactgggctctaaagcgagccaggccgcccatcagcagcagcaacaacagcagcagcagcagcagcagcaaccaaatccgacagccgtgtccggacaacagcagggaccccatgttcaggcgtatctggtgtaa

SEQ ID NO: 18579 - protein, 1446 aa, DROSOPHILA
MAAILLLLLGFSWSLAVESALAPKESESSASAMLGAGTGAAATVSLSGDYSSLLSNVPAASPVPANPSQPSGPANQCSWSYNGTSSVHCALRLIERQPGLDLQGADGSSQLTIQCSELYLFESTLPVAVFARLQTLEALRLDSCKLLQLPNNAFEGLATLKSLRLSTHNSEWGPTRTLELFPDSLGGLKQLTDLDLGDNNLRQLPSGFLCPVGNLQVLNLTRNRIRTAEQMGFADMNCGAGSGSAGSELQVLDASHNELRSISESWGISRLRRLQHLNLAYNNLSELSGEALAGLASLRIVNLSNNHLETLPEGLFAGSKELREIHLQQNELYELPKGLFHRLEQLLVVDLSGNQLTSNHVDNTTFAGLIRLIVLNLAHNALTRIDYRTFKELYFLQILNLRNNSIGHIEDNAFLPLYNLHTLNLAENRLHTLDDKLFNGLYVLSKLTLNNNLISVVEPAVFKNCSDLKELDLSSNQLNEVPRALQDLAMLRTLDLGENQIRTFDNQSFKNLHQLTGLRLIDNQIGNITVGMFQDLPRLSVLNLAKNRIQSIERGSFDKNFELEAIRLDRNFLADINGVFATLVSLLWLNLSENHLVWFDYAFIPSNLKWLDIHGNYIEALGNYYKLQEEIRVKTLDASHNRITEIGPMSIPNTIELLFINNNLIGNVQPNAFVDKANLARVDLYANQLSKLQLQQLRVAPVVAPKPLPEFYLGGNPFECDCTMDWLQRINNLTTRQHPRVMDMANIECVMPHARGAAVRPLSGLRPQDFLCRYESHCFALCHCCDFDACDCEMTCPSNCTCYHDQIWSTNVVDCGGQQTTELPRRVPMDSSVVYLDGNNFPVLKNHAFIGRKNLRALYVNGSQVAAIQNRTFASLASLQLLHLADNKLRTLHGYEFEQLSALRELYLQNNQLTTIENATLAPLAALELIRIDGNRLVTLPIWQMHATHFGTRLKSISLGRNQWSCRCQFLQALTSYVADNALIVQDAQDIYCMAASSGTGSAALEDSSSNSGSLEKRELDFNATGAACTDYYSGGSMLQHGIPESYIPLLAAALALLFLLVVIAMVFAFRESLRIWLFAHYGVRVFGPRCEESEKLYDAVLLHSAKDSEFVCQHLAAQLETGRPPLRVCLQHRDLAHDATHYQLLEATRVSRRVVILLTRNFLQTEWARCELRRSVHDALRGRPQKLVIIEEPEVAFEAESDIELLPYLKTSAVHRIRRSDRHFWEKLRYALPVDYPTFRGNNYTLELDHHNHERVKQPASPGLLYRQAPPPAYCGPADAVGIGAVPQVVPVNASVPAEQNYSTATTATPSPRPQRRGEQPGSGSGGNHHLHAQYYQHHGMRPPSEHIYSSIDSDYSTLDNEQHMLMMPGAPGGLAMEAAQRAQTWRPKREQLHLQQAQAGTLGSKASQAAHQQQQQQQQQQQQQPNPTAVSGQQQGPHVQAYLV

SEQ ID NO: 18580 - DNA, 9546 bp, DROSOPHILA
gcacatggtcgtagaatgggccaaataaccatttgcattaccatgtcgcactccatccacaagtcctgctccttcgacagtttcccggataactaaacaatgcattattgttttgctttatctcttattgtacagacaacatcatttccccctagcttgttggcttggccgctctcttgtgtgtgtgcttcatcgcttatcatctagtttatatcctatgtaacatagtatgcttacagaactaacgaaaaaaaaaaacttgtatatttggatattcagttatgaactacatacgaaaaaaaaaaaacatttccctagggctaagtttcacattctaacgcaagaatcgagaacaaaaagagatagttggctgctcaagtttgagaaaacacttgactaaacactaggtttcttcagaaacattcgctatatatacacccctgtgcccactacaggttccaaatctgattcaaactcagcttttcccgaaagctagcagattttaagcattcatattgaaaaagtgcagttatatgtgattaactaagaaattaacgatgttcaacttcgataccaaaattattggaaatgatcaaaacgaaagcgttttcctacacggaaacctccatgaaaatgatggttttgcaaaatattacaacaacattaaagtttagcgaatagatgaaatttataaaccatatgtatatacggttctacaacaagaagatagttttgaaatgggaaaaataaaatcagtacagtttatccaaagatctgtacatttgaaaatattttgtttagcaaacactggagctttggggctaaatggttctccgattcggattggaatcgtaaacagggcgctaataaatatattcgatattccggcttacgacaagcgcaaaagaaatcaagtgatttaggtggccgccggtttttgagcctaaacgtaagtctatgtgctacaaactaaatttcgaaaaacaatgtacacgcgaatctagaactccttgaggctgccgccgcgctttagcttggtcagtcgcttcagactggcacccaacatgccccccgatccgccagcacctgacaatccgcctgatccgtaaccgcttcctccatcgctgccggcactgcgatcccgctgaataaaggatccccggaaccggacccgtccacggccacgacgctgcgcctgctgcagctgctggtgctgctgatgctgctcgcccacgcggcgccacagctcggttagcggtggatggtgctggtggggatgctgctgaagggtgcagcagcacaccagctcctgcgattataacttcttctcccagacaacgatgtgggcgtcattggagttggccgtcagcggtgagcagctgggattacccgactgcattgtttggccactgaatccggagccactgcctccgccgccgccggagctgctgttcttatggctgggcgaaccacccgccccgttgtaccacatctggcgccagtagccgcgtccgcccatcagggtgatcactgtccttggtccgtcggcgttctgttgctgctgctgcttggagttctgcttctgttttcgctttaaagtggccaccgcggcggctggcttgtccagtcccgagttccctgcgccgagtcggctcatctcatctggcttggcggagctattcagctgctgttgctgctgctgatggtgatggatgtccgccgtggtcatgaggccgttctctgatatgttgcccagatcactgcctgtgccggatgtcttgtggctggcactgctgctgttgcgggacacagaacgtccgccaaagtgccggatgcccatgctctcttcgctgcccgacgatgtatacagactggaggacttggagtccaccgaccagtttgagaggtccaacgaccttggtcgcgatgccttcatgcgcaaacgtctatccagggtgcacaccttgccgggtatagctgccaattctggatcagagcgtctcataccctcatacatcatgtccattaggttgccctgattgccctcctccgcatcgtagtcctccttcacgaatatcagcttgccatacaggccgtaaacgtcgcagataccgtgctcgccatgctgcgaagtgttaccactggctgttcccgatcctgctgcacttgctcctcctgctccgctgccggctgccgcggctcccaggccacggggtaaagttttggacattctattcggatcatcgcggaaacgcttgcggtggaaagccggcgaatttgccagcgaagcgcgtatttttgcagtaaaactctggtccagcgaattctgcttgtccagtttggagctgcgcggtgatgaggcagttgaatctgctccgggattactggacgacatctcttccttagcaaggtcacgacgcaacaccacggccccgtcgtccaactcctggatctttggatccgcatcaatggccggcagctggaggtcatctcccatgctgggtaccaatggagctgcacccacggtcggtggcttgtaggcgggataaacctttggaatcagtggcaacaaaaaggtgatgggtccaaagtgcgcgtgacaggacatgttgattccaccgctgatgatgggcactccctccagacggggcagtggaatggtcaccgcaatacccacattggtgcccacccacagcaaacccttgcaggccatcagggcggtcacatacaccgagctattgttcagcggctgctcctttttgccatcgtgtcgcagtacactggatgctatgttgatgtcctgcagatgcttaaacgtctccgtgtggtacaggcacaacattgtcgagtttttcagcgagatccacaaaccgatgccggagtgggccattagattcacctgctgagtggccccgtgctgcacttcaaagctgcgctggatctcgccgttcagggcgttcataacgtacactcggttgccgcacgaagcgtagatgcacatgttgatcggcaaaaggctgggcaccaccagatcggtgtcaccgagacggatggtctgcgggtctcgcaactgccaaacgccatcgtttcctctgcggaaaatgagcaccgtggctcccgaaagagccacataaaccgcatcgaagtgataaaggattcgctgaactgctcccggtaccgaatagcttcccagctgctcctcctgctcgggattccgtgccgagtagatcagaatcttgcggctatccgtgcccagccaaaccagatcgcccagcagactggccggctcatctcgcgacttcagctgatccagtcccttgacgaactccaacgcagagacctgggtctcaaaaaggtcaaaggcacccgcctcgcgaagattgcccgcctgctgagggtgttgggctaaaacggtgatgtgcgaggaggtgccatcgctgctgcacatccacaggtaattgagctgcttgtgccggcgtcgcgcgtttccgctctgtttggtgtcattggcgatgctgtagtaacatccacagcgcacctggaaggtaaacagataacattgtagttaggaaatataggattatgataagaaacttacctcggtttgatgctgtgatttgtagacaggcatcgccttgacaaagagcggcattttacgcgactgcttctgctgtacggcctcctgcagctgcagttgctcctgcgtctggcggggatcgccagctcccgcatgcggatgctgcagcggatgatgatgtgggtgatgatgggcgggctgaggatgggagccaccacgttcccaggctggcgaattgttcggatcgagggccagctgagccagacgcaactctgtgatccactccttcttcaccgcaggcgtctgcgtctggaatgtgaaggtttcctccttgccggacttgtgtcgtccaatgagctgcaggcagcaagagtccacccaggccatctcctcgtccttgcgctggatggagccttggataagattgagcacgttgcgcgtggtattcgcgtttagctccttgtagctgcccttcaaactggaaactagatcctgaatgcgagaaatcacctcgtagtcatacatcagcgtgctcatctcgctgcacaaattgtccgccccgtttgtcagctgtgcggctggcgagctgtgcggatccccgaagccggagaagcccgacacgccacctccatgtccaggaagagtactattcgcatacgggctgccgttggcaccactgctgccattggacttcaagctgccgccgcggttgagacctagaaattaaatatatatgagtatatttaagcttcacagatctcttgtatgacaatccttacccgccgtaagaatcctcgagagcgtggccgacgtgctgttgtccacaatctcgacatcgttgactggaaacatccacttgaaggtgagtttctcggtggccccgaaatcgtgcgactgcttgggcgccaccgacacgcaaatgaccttatcgttgagcaggagcagccgccgctgcttgcacttgacaatgaaaccggcctggttgaactccatatgggtgacgttgtcctcgcggagtaagtacctcggccgatggccgccggcagagtcgctgacactgacgctgctcaaactcagggatcgggcattgaaggtgcccgagatgggccaagcatctccttaaaggcctggtactgctccgcctcccgtttgctctcgttgaggagctccgccaggagttccaagctgcgacagggccaactgcagcgacattctgtcgtggtggccctgtggcgtgtatttcagcagatcctgcaggaagaggatgaactgggggaaacgctgcaccggcttcaccatcagtccgaaaaacgacaaccgatcgtgggcactgatctgcttgaccttaaagaaatcggccagtgccgacttgcgcttctcctccatcttggccagctccatggccgccgagaagttgttgatgaaaccggagtaaatctctagtagctgcggctttccaaacgcgctcacaaagcaatcgccgatcttctcatcgcgatcccagttccggacgcactccgccaacgagatccggaacaacttgtgcgagtgcaagatgtccggcaggcaatggaacagggtggctatcttcaccggattcaggactggcgggctgcactcctccagcggtttcttgtaatcctgcgggttgagaacagcacatagataattagttaagtttatcactccacttcacttagttacaccagcctgtggtatgttcctcacattttaatttaatttctcttatctacatttttgttaattttaatttaccttcttagttagcttttaaatacttatgcagtttgtcaggactggtgcaacagtgtttttatatttatttgattgattaccaagctctttgcgccgttttttctatcagtttctcacagttaaagcttagattttaatctgggttttgtatacgagtattacttgttttggattttctaattttgtaactacttgtgggtgaaatgtgattttgggttcaaattgggtgtgtacattggttggttagtgggcgagtaggtgagtgtgatttgttagttagttggttggttggttggttggttagatgtttttatgacggtgaaatcggcagttatggcatatgggaagaggatggcatgtaaagagatcaaatgatttgacatgagattaacattagtcggtggttaattggggtactaaggttgtctaactacaaaggcatgcggcactttatgaaaccaaaaactaaattagtagatctacttatcgataaattaaggcttgtacgcggctttcttaagacgcctgcatctctctattcatgtatattccaattcaaatcaagataagctagcaaaacactttcatccagtgacctttattttccaactacagtcttcaacaaatcaactagatattccctcttcgaattcctcccacatccataatcgaaataaaaatacaactcccgacgagcataatgaacttaaagtatctaaagtaaactaagtagcgatactgaagcctcagatagatactgacagaggtgataaaagaccaaacccatcagaggcattggagaatgtgcagtcctatgtggagaccaactaaatcaaccgcaattgcactaattttagattagctcgaatcctgaggccataagatccttggtatcgaaagagttcagtcgggcagagctcaatgaatttgctcgctggcaaacggaggtgatcgagttggattagatttcagccaatcgaattcaaggagcaccatagggatttgtagaactagagggctcttaacttttactgcatcccaatttggaaatggtgtacgtcaagtaaattgtatgtgaactaccctatttgacattctttgactatatttgtatcttacattttctaatttattaaaaataaatataataaatattaaaagttaaaatttatatgattccctaaaaattcgttgatgaaatggaagctactgcatataacaattacagatagtcaagcaataattaactaatacaaatttactcgaaatgctgtgatctgtataatcccatttcaaaatcaatcgagtgatatttataggacattcccactcacattgactagtcgctgcagggtggccacatacgagttctcactgtgcacaatggctgccacaatgtggcgcctcttcagctgttgctgggacagtcctgcgggggcgggcggcaacatgggtacaatcagccggttgtgggcggttcgagcagttccattggcccgactgccaggcgtcatcataaggtccacatcgaagcgattggcagtcgcctcgtcatcctccgactgcagttatagaaacatgttatatttcgctaatttgatatccaagttgactcacctctggcactccgggcatcattttgctggctcccaaattggccaatttctgtggtgaagctgcgtccagcgctactccttgggatcctgctcccccggttccagcgaccgcattggatccgtttttcggtgaatttcccgaacccgaatcgggcgtatcgaaactggaggcggtcgagtggcgtccatcgcgtcctccaacgtcatactggtgcgatgagccgcgcctgatggaaaaccagcgggacaggcgtcctccgggcgattcacccggtgtggtggcctcctctctctgggaactaccaacacctgctcctcctcctccgccactcgatggcattgtgcaggcactggcccgtcgcataatcatgttgctagcggcgttgttgctatcagtggctgatgatcctgggccggatgcggaacctgttgcgcttccggtggcggccgtgcgccatttgtcaaacgacaaatgctgcttggccttgttgaaggtggaacgcaattgcgaattgcgttgattgccggcacttagcgaactcacgctgctgctggtctgctcctcctcggtgagaacctcctcctcgcccagatcgtcgttcttgtcccgctcgcgatctctgtcccgctcgagattcctatcccgttcgcggcagggcgatttggtgtcccgttcgctactgctgccgcagctgctgctgctaccaacgccgacaccaacggcagcctggccaccgttggcgctgaagcttccgccggcaattgtggctgcggtgcagcccactgcttcccgctgatcccgctggtcacgctgatctcgttcccgctgctcggcaatcctccggctaaacgcactgtgcagctgggcggtggtgatgctggcactggacggcggtgatccaatgaacgaggtctgctgcagctgctgctgctgctgctgctgctgctggtgtcgctgactgaggtgcgagtggtgctggtgcagatgctgctggtggtgcgagtgatgcgcgtggtggtgatggggctcgtccaaggtgtcctcccatgagccggagttcaatttatgttcatctggaaaggggtaaatgaaataaaaattagtatattatagaataataattatatcaaataatatttagcattatagctttaggttaaattattcagaagtttgtaaattgacttttgattattacaacaaattaacaaagatttcaattcttttcttccatcttaaatttgcgttataaaaatcaaaaacttccatatatcaagcactttaaaaaaatggatgccattcaatattccgttgttccctggctgacgtcagtaccccaaagcattaccaattatgtggcgttggccaagtgagttaattgccagcaattgtgggccatatgcagatgaagtcggctaaaacagcagcacaaacaggatttggccatggccgtcatgtctccgttcgcgattaccgccaacttctgcggcgtgggactgggattgtgactgagtttcgggcgtgtggatgggggggcatcaaagccagaaagccgccaattctggccaagactcattctggcagagtgtgggttacttgccaagtggccatggccagaaagccagcagcaactcccacactgggccacgtactccgggcactcagactcggcacagacccacaccgaccactccgccagaaccaccagaacggtattagagagacaactgtcaggcccatggaatgcactgagagaaaaatgttggtgctttgtgataaaaaaggtttaacgagaagtaacacattcattatgcatgatcacacttttgcatttttttatatgaaatcagtgtggccaaatgttagaatattcattgtgtggcaattaccgaatgaaatcaccttttttctcgcagtgcggctagaagccaagctctaaacaaacattaggatagcgatttcgattccgattgagattcagatggagaaacacaaccatggccacagaaacaaaacagattcgagacaaactcgatgtcatgttcacgaccattaatcatccagcggacgactggcgttggaatggggatgtggtgacaagtcgggttcagttagctgtgataattgcaaattcagctcagtccagcgcgttagctgcaacatcccagcccattactccccttttaatccccattttccaatgtgtggaaaacacggagaagccgaacgaaatatggaaaaaaaaaagggaaaagcaaattgtgtaaatattttgcgcaaaatgtgaaaacatcttcaaaattacattatatatacggcccaaaaagggagacaaatttcgcttttacaaaattgagtttgtgtaactttcgaggaggcaggggcgaaaacacgcttttcacatattgaaaagagcagtcaaaaacggtgggcgggggggcgtggcatggcagcgtttaagttgattgttggcaaacatattttccttcgtttctgtgttttttttttttttttttgtattttgtcgtacacttggtttaacataatccataagcacgcaaatgcggctggcgtag

SEQ ID NO: 18581 - DNA, 5352 bp, DROSOPHILA
atgagtcttggccagaattggcggctttctggctttgatgcccccccatccacacgcccgaaactcagtcacaatcccagtcccacgccgcagaagttggcggtaatcgcgaacggagacatgacggccatggccaaatcctatgaacataaattgaactccggctcatgggaggacaccttggacgagccccatcaccaccacgcgcatcactcgcaccaccagcagcatctgcaccagcaccactcgcacctcagtcagcgacaccagcagcagcagcagcagcagcagcagctgcagcagacctcgttcattggatcaccgccgtccagtgccagcatcaccaccgcccagctgcacagtgcgtttagccggaggattgccgagcagcgggaacgagatcagcgtgaccagcgggatcagcgggaagcagtgggctgcaccgcagccacaattgccggcggaagcttcagcgccaacggtggccaggctgccgttggtgtcggcgttggtagcagcagcagctgcggcagcagtagcgaacgggacaccaaatcgccctgccgcgaacgggataggaatctcgagcgggacagagatcgcgagcgggacaagaacgacgatctgggcgaggaggaggttctcaccgaggaggagcagaccagcagcagcgtgagttcgctaagtgccggcaatcaacgcaattcgcaattgcgttccaccttcaacaaggccaagcagcatttgtcgtttgacaaatggcgcacggccgccaccggaagcgcaacaggttccgcatccggcccaggatcatcagccactgatagcaacaacgccgctagcaacatgattatgcgacgggccagtgcctgcacaatgccatcgagtggcggaggaggaggagcaggtgttggtagttcccagagagaggaggccaccacaccgggtgaatcgcccggaggacgcctgtcccgctggttttccatcaggcgcggctcatcgcaccagtatgacgttggaggacgcgatggacgccactcgaccgcctccagtttcgatacgcccgattcgggttcgggaaattcaccgaaaaacggatccaatgcggtcgctggaaccgggggagcaggatcccaaggagtagcgctggacgcagcttcaccacagaaattggccaatttgggagccagcaaaatgatgcccggagtgccagagtcggaggatgacgaggcgactgccaatcgcttcgatgtggaccttatgatgacgcctggcagtcgggccaatggaactgctcgaaccgcccacaaccggctgattgtacccatgttgccgcccgcccccgcaggactgtcccagcaacagctgaagaggcgccacattgtggcagccattgtgcacagtgagaactcgtatgtggccaccctgcagcgactagtcaatgattacaagaaaccgctggaggagtgcagcccgccagtcctgaatccggtgaagatagccaccctgttccattgcctgccggacatcttgcactcgcacaagttgttccggatctcgttggcggagtgcgtccggaactgggatcgcgatgagaagatcggcgattgctttgtgagcgcgtttggaaagccgcagctactagagatttactccggtttcatcaacaacttctcggcggccatggagctggccaagatggaggagaagcgcaagtcggcactggccgatttctttaaggtcaagcagatcagtgcccacgatcggttgtcgtttttcggactgatggtgaagccggtgcagcgtttcccccagttcatcctcttcctgcaggatctgctgaaatacacgccacagggccaccacgacagaatgtcgctgcatttgagcagcgtcagtgtcagcgactctgccggcggccatcggccgaggtacttactccgcgaggacaacgtcacccatatggagttcaaccaggccggtttcattgtcaagtgcaagcagcggcggctgctcctgctcaacgataaggtcatttgcgtgtcggtggcgcccaagcagtcgcacgatttcggggccaccgagaaactcaccttcaagtggatgtttccagtcaacgatgtcgagattgtggacaacagcacgtcggccacgctctcgaggattcttacggcgggtctcaaccgcggcggcagcttgaagtccaatggcagcagtggtgccaacggcagcccgtatgcgaatagtactcttcctggacatggaggtggcgtgtcgggcttctccggcttcggggatccgcacagctcgccagccgcacagctgacaaacggggcggacaatttgtgcagcgagatgagcacgctgatgtatgactacgaggtgatttctcgcattcaggatctagtttccagtttgaagggcagctacaaggagctaaacgcgaataccacgcgcaacgtgctcaatcttatccaaggctccatccagcgcaaggacgaggagatggcctgggtggactcttgctgcctgcagctcattggacgacacaagtccggcaaggaggaaaccttcacattccagacgcagacgcctgcggtgaagaaggagtggatcacagagttgcgtctggctcagctggccctcgatccgaacaattcgccagcctgggaacgtggtggctcccatcctcagcccgcccatcatcacccacatcatcatccgctgcagcatccgcatgcgggagctggcgatccccgccagacgcaggagcaactgcagctgcaggaggccgtacagcagaagcagtcgcgtaaaatgccgctctttgtcaaggcgatgcctgtctacaaatcacagcatcaaaccgaggtgcgctgtggatgttactacagcatcgccaatgacaccaaacagagcggaaacgcgcgacgccggcacaagcagctcaattacctgtggatgtgcagcagcgatggcacctcctcgcacatcaccgttttagcccaacaccctcagcaggcgggcaatcttcgcgaggcgggtgcctttgacctttttgagacccaggtctctgcgttggagttcgtcaagggactggatcagctgaagtcgcgagatgagccggccagtctgctgggcgatctggtttggctgggcacggatagccgcaagattctgatctactcggcacggaatcccgagcaggaggagcagctgggaagctattcggtaccgggagcagttcagcgaatcctttatcacttcgatgcggtttatgtggctctttcgggagccacggtgctcattttccgcagaggaaacgatggcgtttggcagttgcgagacccgcagaccatccgtctcggtgacaccgatctggtggtgcccagccttttgccgatcaacatgtgcatctacgcttcgtgcggcaaccgagtgtacgttatgaacgccctgaacggcgagatccagcgcagctttgaagtgcagcacggggccactcagcaggtgaatctaatggcccactccggcatcggtttgtggatctcgctgaaaaactcgacaatgttgtgcctgtaccacacggagacgtttaagcatctgcaggacatcaacatagcatccagtgtactgcgacacgatggcaaaaaggagcagccgctgaacaatagctcggtgtatgtgaccgccctgatggcctgcaagggtttgctgtgggtgggcaccaatgtgggtattgcggtgaccattccactgccccgtctggagggagtgcccatcatcagcggtggaatcaacatgtcctgtcacgcgcactttggacccatcacctttttgttgccactgattccaaaggtttatcccgcctacaagccaccgaccgtgggtgcagctccattggtacccagcatgggagatgacctccagctgccggccattgatgcggatccaaagatccaggagttggacgacggggccgtggtgttgcgtcgtgaccttgctaaggaagagatgtcgtccagtaatcccggagcagattcaactgcctcatcaccgcgcagctccaaactggacaagcagaattcgctggaccagagttttactgcaaaaatacgcgcttcgctggcaaattcgccggctttccaccgcaagcgtttccgcgatgatccgaatagaatgtccaaaactttaccccgtggcctgggagccgcggcagccggcagcggagcaggaggagcaagtgcagcaggatcgggaacagccagtggtaacacttcgcagcatggcgagcacggtatctgcgacgtttacggcctgtatggcaagctgatattcgtgaaggaggactacgatgcggaggagggcaatcagggcaacctaatggacatgatgtatgagggtatgagacgctctgatccagaattggcagctatacccggcaaggtgtgcaccctggatagacgtttgcgcatgaaggcatcgcgaccaaggtcgttggacctctcaaactggtcggtggactccaagtcctccagtctgtatacatcgtcgggcagcgaagagagcatgggcatccggcactttggcggacgttctgtgtcccgcaacagcagcagtgccagccacaagacatccggcacaggcagtgatctgggcaacatatcagagaacggcctcatgaccacggcggacatccatcaccatcagcagcagcaacagcagctgaatagctccgccaagccagatgagatgagccgactcggcgcagggaactcgggactggacaagccagccgccgcggtggccactttaaagcgaaaacagaagcagaactccaagcagcagcagcaacagaacgccgacggaccaaggacagtgatcaccctgatgggcggacgcggctactggcgccagatgtggtacaacggggcgggtggttcgcccagccataagaacagcagctccggcggcggcggaggcagtggctccggattcagtggccaaacaatgcagtcgggtaatcccagctgctcaccgctgacggccaactccaatgacgcccacatcgttcatccccaccagcaccatccaccgctaaccgagctgtggcgccgcgtgggcgagcagcatcagcagcaccagcagctgcagcaggcgcagcgtcgtggccgtggacgggtccggttccggggatcctttattcagcgggatcgcagtgccggcagcgatggaggaagcggttacggatcaggcggattgtcaggtgctggcggatcggggggcatgttgggtgccagtctgaagcgactgaccaagctaaagcgcggcggcagcctcaaggagttctag

SEQ ID NO: 18582 - protein, 1783 aa, DROSOPHILA
MSLGQNWRLSGFDAPPSTRPKLSHNPSPTPQKLAVIANGDMTAMAKSYEHKLNSGSWEDTLDEPHHHHAHHSHHQQHLHQHHSHLSQRHQQQQQQQQQLQQTSFIGSPPSSASITTAQLHSAFSRRIAEQRERDQRDQRDQREAVGCTAATIAGGSFSANGGQAAVGVGVGSSSSCGSSSERDTKSPCRERDRNLERDRDRERDKNDDLGEEEVLTEEEQTSSSVSSLSAGNQRNSQLRSTFNKAKQHLSFDKWRTAATGSATGSASGPGSSATDSNNAASNMIMRRASACTMPSSGGGGGAGVGSSQREEATTPGESPGGRLSRWFSIRRGSSHQYDVGGRDGRHSTASSFDTPDSGSGNSPKNGSNAVAGTGGAGSQGVALDAASPQKLANLGASKMMPGVPESEDDEATANRFDVDLMMTPGSRANGTARTAHNRLIVPMLPPAPAGLSQQQLKRRHIVAAIVHSENSYVATLQRLVNDYKKPLEECSPPVLNPVKIATLFHCLPDILHSHKLFRISLAECVRNWDRDEKIGDCFVSAFGKPQLLEIYSGFINNFSAAMELAKMEEKRKSALADFFKVKQISAHDRLSFFGLMVKPVQRFPQFILFLQDLLKYTPQGHHDRMSLHLSSVSVSDSAGGHRPRYLLREDNVTHMEFNQAGFIVKCKQRRLLLLNDKVICVSVAPKQSHDFGATEKLTFKWMFPVNDVEIVDNSTSATLSRILTAGLNRGGSLKSNGSSGANGSPYANSTLPGHGGGVSGFSGFGDPHSSPAAQLTNGADNLCSEMSTLMYDYEVISRIQDLVSSLKGSYKELNANTTRNVLNLIQGSIQRKDEEMAWVDSCCLQLIGRHKSGKEETFTFQTQTPAVKKEWITELRLAQLALDPNNSPAWERGGSHPQPAHHHPHHHPLQHPHAGAGDPRQTQEQLQLQEAVQQKQSRKMPLFVKAMPVYKSQHQTEVRCGCYYSIANDTKQSGNARRRHKQLNYLWMCSSDGTSSHITVLAQHPQQAGNLREAGAFDLFETQVSALEFVKGLDQLKSRDEPASLLGDLVWLGTDSRKILIYSARNPEQEEQLGSYSVPGAVQRILYHFDAVYVALSGATVLIFRRGNDGVWQLRDPQTIRLGDTDLVVPSLLPINMCIYASCGNRVYVMNALNGEIQRSFEVQHGATQQVNLMAHSGIGLWISLKNSTMLCLYHTETFKHLQDINIASSVLRHDGKKEQPLNNSSVYVTALMACKGLLWVGTNVGIAVTIPLPRLEGVPIISGGINMSCHAHFGPITFLLPLIPKVYPAYKPPTVGAAPLVPSMGDDLQLPAIDADPKIQELDDGAVVLRRDLAKEEMSSSNPGADSTASSPRSSKLDKQNSLDQSFTAKIRASLANSPAFHRKRFRDDPNRMSKTLPRGLGAAAAGSGAGGASAAGSGTASGNTSQHGEHGICDVYGLYGKLIFVKEDYDAEEGNQGNLMDMMYEGMRRSDPELAAIPGKVCTLDRRLRMKASRPRSLDLSNWSVDSKSSSLYTSSGSEESMGIRHFGGRSVSRNSSSASHKTSGTGSDLGNISENGLMTTADIHHHQQQQQQLNSSAKPDEMSRLGAGNSGLDKPAAAVATLKRKQKQNSKQQQQQNADGPRTVITLMGGRGYWRQMWYNGAGGSPSHKNSSSGGGGGSGSGFSGQTMQSGNPSCSPLTANSNDAHIVHPHQHHPPLTELWRRVGEQHQQHQQLQQAQRRGRGRVRFRGSFIQRDRSAGSDGGSGYGSGGLSGAGGSGGMLGASLKRLTKLKRGGSLKEF

SEQ ID NO: 18583 - DNA, 3883 bp, DROSOPHILA
agaaaacataatcctcaatggtggccaatggtgtttcttctatgatcagcattcgtgctttgatatgagcaaatagtggcccatatagacgaactagaaagagaatttgattcttcagcttaacagactaaaaggacgtgtagaagtacacaccgaaatgtcctctgtagatggtcaactcctcgatgggcataccaaaagaggccaaattctgaagggctacggataaggtagccaagtttgtattttcgcaccgaatgtagaggccattatcgctgcccttcacacattcgcaggggtacaaggcctttgatctgatttgaaaaaaaaacaccatataagtgaagaaatatgtaatatacaatatttggaataactcacttttttggacacttgaattcgggttcgccatacacatattccgaactggctagggcaatgaagtgcagcaaaacgagagtgcgcaggcgtagctgaatcatgttttaatgatttcgtcaccgttttaatttagtttatcccatggcccaaaaccaagttcgctgctcaagtcttttgtgtgggcttcgatttcctgaaacttatagttctttgtttaacgatgttccgcttgaatgaggtgggtttttttttgggatgtggagtaaagttaacttgtcttatcaacgaacaaaggtaaatggtttcttctacttttacttttcgctctgctggcgcaacaggttttcatgggccgctcttgtgcgctctttgtgaccagcactttggagctctaattgaattaatgccaactatattaactgctcccgaaagtcagagcactgtgaaccacagtttccacttcggttcccccatttattccgcggttttaacatatttttatttattttacccttggcgcacaatacaatcgatagatttcgggcgagttggcagccccgttgaaccatcgcttcagacaatcggcatcccaaatatcgaatcagccgcacacgctaatacaaccctgttgtgacatctcgctcgttggaaaagcaaaaaccaggcgcaaaataaatataatttgctaacgttactctacaattatctttgtacaatcgcacaagcaaacgtaagtaccaaaagacaaacgaacgcaacgaaccaaatggccaattcaaagcgcgcactttttggcattttgcaattgaaatgagtgggcattgttcacgttgctcgcctcgtcgacagggagaaatactgacttcgcccgttttagccgccatcgcgactgcagccaatcacgggccgcgctacacacacgcggcagaaaatccgtgtacatacacgtctgagcgctgtggtattggtggccggggagaacgcgagttactcgctgcatagagtagcccactatgtgtttattgcgcggcaaaagtgcgttaatcggttaaagccgctacttacattctgttctttgcatctcccccatccacagctataaagcaagatgagctacgccgctgatgtgctgaactcggcccatttggagctccatggtggtggcgacgccgagttgcgtcgtccattcgatcccacggcccatgatttggatgcatccttccgccttacacgcttcgcagatctaaaggggcgcggctgcaaagtgccgcaggatgtgctctccaagctggtgtccgccctgcagcaggactactctgcccaggaccaggaaccgcagtttctcaacgtggccattccccgcatcggtattggcctggactgctccgtcattccgctgcgacacggcggactctgcctggtgcagaccaccgatttcttttaccccattgtcgatgatccctacatgatgggcaaaattgcgtgcgccaatgtgctcagcgatttgtatgccatgggagtcacagattgcgataacatgctgatgctgttggcggtcagtaccaagatgacagagaaggagcgtgacgtggtcattccgctgataatgcgaggctttaaggactccgctttggaggcaggcaccactgtgactggaggccagagcgtggtcaatccgtggtgcaccattggtggggttgcctcgaccatttgccagccaaatgagtatattgtgccagataatgccgtggtaggggatgtactggtgctaaccaagccactgggcacccaagtggccgtgaatgcccaccagtggattgaccagccggagcgctggaaccgcattaagctggtggtgtccgaagaagatgtacgcaaggcctaccaccgggcgatgaactctatggctcgcctcaaccgcgtagccgctcgcctcatgcacaagtacaatgcccacggagccaccgatattactggattcggactactaggccacgctcaaaccctggctgcacatcagaaaaaggatgtctcctttgttatccacaatctgccggtgatcgccaagatggctgcagtggccaaagcctgcggcaacatgttccagctgctgcagggccactcggcggagacctcgggaggattactgatctgcctgccgcgagagcaggccgctgcttattgcaaggacatcgagaagcaggagggctaccaggcctggatcatcggcatcgttgagaagggcaataagaccgcacgcatcatcgacaagccccgcgtcattgaggtgcccgccaaggactaggtctccattgcctgaccatctgctattgtctaccttaagtatcttaatattaacgtaacggctgctacattcagttgtaaccggcatgatcggtctttgttttttataaaaaagcttatcaactacagattcactgatcattataatcttggacgtctctactgcaatacgagtgaataaaatgaaaacacttgaatcttttgtatcgagtaattggaatgcggggcatctgaatgagctttttccagtcaactttgttattaaattacagctcacagtttggcaaaaagtggagcatcttcggaatcgcatacattttgaacagttgtgtgttgagaatttaatcgacttatttaacccactaaataagttgtagaagtcacatttatttttgtttagttagtgcacctgcgctttgaggctaaaaactcagctggtgtaaattttaaatttgcttgctgattttagtttacagtcgcatgcttatgaaatcagcacgcgttttgaaagtcaaattgttggaggtttaagtgaattttaatcgttaagctttgtttcgcagttcaaacttgggagcgggttatcaggaaagtaattgtcaagtaccaagccagcaaaaagaagtgtcatgtatctcatttagatacgtgtgctgatagtaccttcagatagtttaaaacatgtttgagtacaggaatattcttactaaaaatatgatcattttgaactgaacttcatttgaaaattaattggttatgataagtttgagagtgaatttcggaaacatggacatttaaagagacatttaaaggacgttgatttgttgaggagaatttagcatgggttatcagataccctaacctcctaacctctattgttcgatcaatcggcattagttgcggagagcgaaaagctttgcaagctctaaaaaccaaaaccgagcgagagatgctctcgtgcgaacaggtctccggcaagttgccatcggatgggatcggatcgcactggtggggatcgggatcgctggtggcaagtgcggatcgtgggcctcagtaccgcccgagctagcgacgcgttaagatccgcatccgaatcgtaaacacaacgagaaacttacactgcgcgcaccgttacacttttgtgctgggagcgatcgaacactaatacactgaccaacgaatttcccgcacaacgaag

SEQ ID NO: 18584 - DNA, 1517 bp, DROSOPHILA
acaaccctgttgtgacatctcgctcgttggaaaagcaaaaaccaggcgcaaaataaatataatttgctaacgttactctacaattatctttgtacaatcgcacaagcaaacctataaagcaagatgagctacgccgctgatgtgctgaactcggcccatttggagctccatggtggtggcgacgccgagttgcgtcgtccattcgatcccacggcccatgatttggatgcatccttccgccttacacgcttcgcagatctaaaggggcgcggctgcaaagtgccgcaggatgtgctctccaagctggtgtccgccctgcagcaggactactctgcccaggaccaggaaccgcagtttctcaacgtggccattccccgcatcggtattggcctggactgctccgtcattccgctgcgacacggcggactctgcctggtgcagaccaccgatttcttttaccccattgtcgatgatccctacatgatgggcaaaattgcgtgcgccaatgtgctcagcgatttgtatgccatgggagtcacagattgcgataacatgctgatgctgttggcggtcagtaccaagatgacagagaaggagcgtgacgtggtcattccgctgataatgcgaggctttaaggactccgctttggaggcaggcaccactgtgactggaggccagagcgtggtcaatccgtggtgcaccattggtggggttgcctcgaccatttgccagccaaatgagtatattgtgccagataatgccgtggtaggggatgtactggtgctaaccaagccactgggcacccaagtggccgtgaatgcccaccagtggattgaccagccggagcgctggaaccgcattaagctggtggtgtccgaagaagatgtacgcaaggcctaccaccgggcgatgaactctatggctcgcctcaaccgcgtagccgctcgcctcatgcacaagtacaatgcccacggagccaccgatattactggattcggactactaggccacgctcaaaccctggctgcacatcagaaaaaggatgtctcctttgttatccacaatctgccggtgatcgccaagatggctgcagtggccaaagcctgcggcaacatgttccagctgctgcagggccactcggcggagacctcgggaggattactgatctgcctgccgcgagagcaggccgctgcttattgcaaggacatcgagaagcaggagggctaccaggcctggatcatcggcatcgttgagaagggcaataagaccgcacgcatcatcgacaagccccgcgtcattgaggtgcccgccaaggactaggtctccattgcctgaccatctgctattgtctaccttaagtatcttaatattaacgtaacggctgctacattcagttgtaaccggcatgatcggtctttgttttttataaaaaagcttatcaactacagattcactgatcattataatcttggacgtctctactgcaatacgagtgaataaaatgaaaacacttgaat

SEQ ID NO: 18585 - protein, 398 aa, DROSOPHILA
MSYAADVLNSAHLELHGGGDAELRRPFDPTAHDLDASFRLTRFADLKGRGCKVPQDVLSKLVSALQQDYSAQDQEPQFLNVAIPRIGIGLDCSVIPLRHGGLCLVQTTDFFYPIVDDPYMMGKIACANVLSDLYAMGVTDCDNMLMLLAVSTKMTEKERDVVIPLIMRGFKDSALEAGTTVTGGQSVVNPWCTIGGVASTICQPNEYIVPDNAVVGDVLVLTKPLGTQVAVNAHQWIDQPERWNRIKLVVSEEDVRKAYHRAMNSMARLNRVAARLMHKYNAHGATDITGFGLLGHAQTLAAHQKKDVSFVIHNLPVIAKMAAVAKACGNMFQLLQGHSAETSGGLLICLPREQAAAYCKDIEKQEGYQAWIIGIVEKGNKTARIIDKPRVIEVPAKD

SEQ ID NO: 18586 - DNA, 5231 bp, DROSOPHILA
ttcattttgataacataaagataccactaaattctgtttttatttttcttcgttttcatgtttacctagattattttaatatatatttacattgaaacgttgttgtcattcaaataatatacccttctctgtgggagccaataataatgcaagttccaattttttatacccgttactcgtaagggtaagattcgttgaaactggcagaaggaagcgtttccgaccatataatctatatatatatatatattcttgatcaggagaaatagccgagtcgatctggtcatgtccgtctgtccgtatgaacgtcgagaactataaaagctagaaggttgagagtcccaagttgagatccatgttgccacgcccactctaacgccataatacagccccgccaagattatcgccgtgaggtaacgatgtaatcgaaggattacagcggccgcgacatgggcgcgaactttgtggtgccggcgatggcagggcgacaggatcacacgattccgccggacagctgcggggataccttggtcggaatgcgtggattcgttacgatttccaggacatttggtagcatccacacaatggggttttgtcccataaaaagtaactgcgcaggatgcggtttgtgtaacgatcaccgatcagaggacactttatgcagcatcatatcgtgcggcatatcctgctacatccgctgcatggcgtgataaatgatcccagccgatcagattcccacaacgattcaatgcgcataaatgaaaatcatcacaaagtattataaagtatttaagaaagaaattctttagaaatgtcaatctgattgaacatctggtgtgtatgtagagctataatataaatttaaattatatttattaaaatgctaagaaactttgctatctgtgagtttctaaattttctgatcaagtgggcattgaaaataacattttgtgttttgtgactttcgtatcagtaaaacgaccagttaacatttggccagcaccatgaaaacagctccgaaaaacttaccaaaataagaccgttgaaaatattttacaaaagtaaaagggcaggaaaattagcctttttctacgtttatacatatttggtaaaatttccaaacccaagtatttgtatccaggaacagaaggtaagtttcaaatttaaaccattttgtagacaccaatcgcgtgctcacacaacctcaatcacaatcaaaattttcggttccaaataaaaaaaaaaaaaaaaaaaaaaaaaaaattttccaacttccttggggaaaagtaagctttgcgtagattatcggacaacattttttttcgtttagccccatccattcattttagttcatcgaaggcagttgtattttccaattcgttgtttagtttcgacatttcatacatttggttgataaaaaataaataatactacacacacgtacacgtactcgtactcgtatttcgaattgaaaatttcgccaaaacaagaaaaactaataagaacatctaaaccattcgtcggcagctagcaatccaagtgaagtaatcatgtttaaaatgaaacgaacgagagtaatcagacgcaaggcagccattatcagggcttcaaagagggccttccaggaaaagattcgcaaacagatggaatcgtgtggcgtgactcaaatgggaaacgcatcaacgcaacagtcgaatgtgccgatggatgtggatgcggatatgggacgcaaaatgtcggaagatggaatgactgatacatcgaatacggtcaaacagccatcctgttccaaggatcaaaagcaattgtcgcgaaaacaaaagccatccccatcctacaaccaccaggagcagatcgaacaaagagcaaagcgaccaaagatatgtaaaaaaaggtgcaaacagaaaagacgaatgccatcatcgctctccgatgatggaattgccggcagaaagccggccaaaattaataagtatagcgaacttagctacggcagcgaatccagcatgccgttcgaaatgaaacagcagagcaatgacaatcagaataacaatgacaatgctgagggtagtggatttgatcgacaggagagcgccaacgagtatgttatcggtggctatcatccggtggccattggcgatgtattcgtaaaccgctatcatgtcttcaaaaagctgggctggggtcacttctccaccgtgtggctatgctatgatacccagatggatcgctactgtgccgtcaaggtgtccaagtcggcgcaggtctacaaggaaactggtatcgatgagattatgctcttttcccaaatgagcctacacgatcagcataagtacagaagccacgtggtcggtttctacgatttctttgaaattaccggaccgcacggaaggcacatttgcctggtcctagaggttctcggtgacaatttgctaaaagtcatcgaaagatgcttttacaaaggtatgcccatttccaatatcaagcaaattgcccagcaggtgctcacgggcctaaagtttctgcacgaagagtgcgggatcatacacaccgatctaaagccggagaatgtgctcctcgcgtccaacgaggtgtccgttcggaccgagatcaagacggcaattgaagtatatttgaaggccaacgaggggaaactaagtcctaggtatgttagatatactcgtataatagcacacatctgaacacgtataaacgttatagctccaagatgaccaaaacggccaagagacggatgcaggcaaagtccaagaaggtgatatcgtttttcaagaatcatcgccgcatgctccgcaggcagggcatcgaggatctgctctatctggccgaacgtggcctcatcgaaccgattaccgccgccatggccgtctccgataacttaccattcattcccttcggcttcgacgggtttatgatgatgagcgatgccgattgccgtacggtgcagaattccaagttgcccgaaatggagggcatggaatacaaatgcgacaggataaacctgtgtttaaagagtccagagctcttcttgcgatatgtgctcgatattatcaagaatttggatgagaaggagcttagcactcaggacaagcggaggcgcttcacgcaggccagtggacgtggccagaccaaaaagaatgccaggtcccgattgagattggcatcgaatgctgcatatacggtatttattccacatttccattcaaatttgaaaagcttagtttaaaagttataggattattgaattcctcttgcatttgaatattttgtagtctacttctagtcgtctttatgaacgatttcaattctctgctaatcagaatgttaattctaaagcttgtcgcatttcttattagaatagcattagatgttttgtgcgtactcatcaaaaattcccaaattgaattaaccatttctttttcaccttccaaagactggaaccggttggcgatcgaacagaaaaatcaatttgaacgatatttaccccatcgatccggccaacaacgaatgcgatgtacgggtgaagatagccgacttgggcaatgcgtgttatttccatcatcacttcaccgacgacatccagaccaaggagtaccgggccttggaggtgatactcggtgcgggatattgcgagaccgccgatatctggagcgtggcctgtctgttgtgggagctggccaccgggacctatctattcgatacccattcgaaaaggggcaaatacaatctggatgaggtccatatagcgaaaatcgtcgaaacctgtggtcgcataccgtggtatctcatccgcaaaggcaaacactcgaggaatttcatcaatagcgccggcaaactatgcaacatagaaaccctgaagccccttaaactggccaatatcttaatcagatggtacggatggaggactcgccaatccacggaattcgttaatttcctgatgcccatgctgcagaccaatcctttgtctcgcatatccgcaagcaaagccttggaaagccactacttatgcaacattgctcttcctggcattgacattgacagttactactattatagtgtacgtgaaatcaaggactgcacacataccaagagtgaaagaaatagcgatgaggacagcagcagctgcagttccatagacagcagcgaattttccagcgacgaggtctgctatgaggacgatgtcaacgaagaagacatcaagaagttatattaaacagtgatttatttagccaaagcacagccagtaacccatataagtaactcatataacccatattagatatttcaagttataataaagtgctccggaggccatatatatacaaatttatttcatgtatgtttatttaaaacaaaggtgaaaacaaattatgatgaggttatattgtatcactttaactgaaagtccatctgtccgtatgaacgtcgaaatctcaggaactataaaagctagaaggttgagattaagcatagagattctagagacatagacgcagtttcttgacacatgttgccacgcccgctctaacgccctcaatgtgttgatattttttcacagttttattagtcttgtaaatttctatcaatttgcaaaaaaaaaaaaaaaaaaaaaaaaaaactgccacggcaggtttggcgcccacgcttttgaacaatttttaaattttttctcatcttattccccaatatctatcgatatcccagaaaatgataacatttcgcgttcgcattcacactagctgagtaatgggtatctgatagtcggggaactctcaatatgtttattgatcaattattttaattataaatagttagatggataactttaaaatagtttggcactgttaagcttttggtataatgaaatatggtgtaattttaaagataaaaccaatatgaaaataaaactaccaattcttttcaaggtatataattttacttttataaaatgtttcattttattcgcgtacacatgatgtcagtagtagaactttttacattttcgaaactggtttaaggcctagtatataaaagcattggcgcaacacagccgcagttgcctcgcacaatagaattcggctatgattgaccccaataatatcgccttgtttgttcttttcgatgcaataacaagagtcatagaattcggtgaacactgtgcacacctcgaagcaaaactcgcacaggaagtgcaggaaaagttcctttgagca

SEQ ID NO: 18587 - DNA, 2546 bp, DROSOPHILA
caccatgaaaacagctccgaaaaacttaccaaaataagaccgttgaaaatattttacaaaagtaaaagggcaggaaaattagcctttttctacgtttatacatatttggtaaaatttccaaacccaagtatttgtatccaggaacagaagctagcaatccaagtgaagtaatcatgtttaaaatgaaacgaacgagagtaatcagacgcaaggcagccattatcagggcttcaaagagggccttccaggaaaagattcgcaaacagatggaatcgtgtggcgtgactcaaatgggaaacgcatcaacgcaacagtcgaatgtgccgatggatgtggatgcggatatgggacgcaaaatgtcggaagatggaatgactgatacatcgaatacggtcaaacagccatcctgttccaaggatcaaaagcaattgtcgcgaaaacaaaagccatccccatcctacaaccaccaggagcagatcgaacaaagagcaaagcgaccaaagatatgtaaaaaaaggtgcaaacagaaaagacgaatgccatcatcgctctccgatgatggaattgccggcagaaagccggccaaaattaataagtatagcgaacttagctacggcagcgaatccagcatgccgttcgaaatgaaacagcagagcaatgacaatcagaataacaatgacaatgctgagggtagtggatttgatcgacaggagagcgccaacgagtatgttatcggtggctatcatccggtggccattggcgatgtattcgtaaaccgctatcatgtcttcaaaaagctgggctggggtcacttctccaccgtgtggctatgctatgatacccagatggatcgctactgtgccgtcaaggtgtccaagtcggcgcaggtctacaaggaaactggtatcgatgagattatgctcttttcccaaatgagcctacacgatcagcataagtacagaagccacgtggtcggtttctacgatttctttgaaattaccggaccgcacggaaggcacatttgcctggtcctagaggttctcggtgacaatttgctaaaagtcatcgaaagatgcttttacaaaggtatgcccatttccaatatcaagcaaattgcccagcaggtgctcacgggcctaaagtttctgcacgaagagtgcgggatcatacacaccgatctaaagccggagaatgtgctcctcgcgtccaacgaggtgtccgttcggaccgagatcaagacggcaattgaagtatatttgaaggccaacgaggggaaactaagtcctagctccaagatgaccaaaacggccaagagacggatgcaggcaaagtccaagaaggtgatatcgtttttcaagaatcatcgccgcatgctccgcaggcagggcatcgaggatctgctctatctggccgaacgtggcctcatcgaaccgattaccgccgccatggccgtctccgataacttaccattcattcccttcggcttcgacgggtttatgatgatgagcgatgccgattgccgtacggtgcagaattccaagttgcccgaaatggagggcatggaatacaaatgcgacaggataaacctgtgtttaaagagtccagagctcttcttgcgatatgtgctcgatattatcaagaatttggatgagaaggagcttagcactcaggacaagcggaggcgcttcacgcaggccagtggacgtggccagaccaaaaagaatgccaggtcccgattgagattggcatcgaatgctgcatatacgactggaaccggttggcgatcgaacagaaaaatcaatttgaacgatatttaccccatcgatccggccaacaacgaatgcgatgtacgggtgaagatagccgacttgggcaatgcgtgttatttccatcatcacttcaccgacgacatccagaccaaggagtaccgggccttggaggtgatactcggtgcgggatattgcgagaccgccgatatctggagcgtggcctgtctgttgtgggagctggccaccgggacctatctattcgatacccattcgaaaaggggcaaatacaatctggatgaggtccatatagcgaaaatcgtcgaaacctgtggtcgcataccgtggtatctcatccgcaaaggcaaacactcgaggaatttcatcaatagcgccggcaaactatgcaacatagaaaccctgaagccccttaaactggccaatatcttaatcagatggtacggatggaggactcgccaatccacggaattcgttaatttcctgatgcccatgctgcagaccaatcctttgtctcgcatatccgcaagcaaagccttggaaagccactacttatgcaacattgctcttcctggcattgacattgacagttactactattatagtgtacgtgaaatcaaggactgcacacataccaagagtgaaagaaatagcgatgaggacagcagcagctgcagttccatagacagcagcgaattttccagcgacgaggtctgctatgaggacgatgtcaacgaagaagacatcaagaagttatattaa

SEQ ID NO: 18588 - protein, 790 aa, DROSOPHILA
MFKMKRTRVIRRKAAIIRASKRAFQEKIRKQMESCGVTQMGNASTQQSNVPMDVDADMGRKMSEDGMTDTSNTVKQPSCSKDQKQLSRKQKPSPSYNHQEQIEQRAKRPKICKKRCKQKRRMPSSLSDDGIAGRKPAKINKYSELSYGSESSMPFEMKQQSNDNQNNNDNAEGSGFDRQESANEYVIGGYHPVAIGDVFVNRYHVFKKLGWGHFSTVWLCYDTQMDRYCAVKVSKSAQVYKETGIDEIMLFSQMSLHDQHKYRSHVVGFYDFFEITGPHGRHICLVLEVLGDNLLKVIERCFYKGMPISNIKQIAQQVLTGLKFLHEECGIIHTDLKPENVLLASNEVSVRTEIKTAIEVYLKANEGKLSPSSKMTKTAKRRMQAKSKKVISFFKNHRRMLRRQGIEDLLYLAERGLIEPITAAMAVSDNLPFIPFGFDGFMMMSDADCRTVQNSKLPEMEGMEYKCDRINLCLKSPELFLRYVLDIIKNLDEKELSTQDKRRRFTQASGRGQTKKNARSRLRLASNAAYTTGTGWRSNRKINLNDIYPIDPANNECDVRVKIADLGNACYFHHHFTDDIQTKEYRALEVILGAGYCETADIWSVACLLWELATGTYLFDTHSKRGKYNLDEVHIAKIVETCGRIPWYLIRKGKHSRNFINSAGKLCNIETLKPLKLANILIRWYGWRTRQSTEFVNFLMPMLQTNPLSRISASKALESHYLCNIALPGIDIDSYYYYSVREIKDCTHTKSERNSDEDSSSCSSIDSSEFSSDEVCYEDDVNEEDIKKLY

SEQ ID NO: 18589 - DNA, 3731 bp, DROSOPHILA
catcgattaaccactatcccatttattgcctgcccgtctacacaaatcggcacgtgaacgaggactggtatcgactttataggacctacgacaccgagggatttgttttcgggcagttttacgagcgtctccagcggtacgagttggactgaattaatgccctttttcagaaagaataagatttagacaaaatctgtgatatcgatactgtggtagcgttgcagagatcccaatcgcgtgtgtggcgaaggacgcagacagataacacattcctccgtgctgaaaatcaattataattagtcgtgggaaacaactaaaagaatataaaaatggcccgttggtttataaaaaatataatactttaatctgatctcttataatgtaaactatcatgcaatacttagggacgaacggatgtggtctacatgtatgtcgtatacgtatatttttgtgtggtgttcattcatagtgtccagtgggtataggacttgttgatgtcagtctacaataaacgataaacagaaaaaggaaaaccccaatcagaaacataagaaaataagtaagaataaaaaggatatctaaagccaaccaaccatgcagaataaacataacattaagaactgatgtagggaaatgcacggttttaagtagatcactttagttggcacgagtgtgttagtatatttagagaacgggtgcaatttaactttggaattatttggatgggtggatgtcaaagaagtagaaagcatatacatgagcattgcgtatacgcaccgtagactttcggttcgcgatctcagcgagtagtcttttgaggcgcgatgcctgaaatggaaattaattggttaaatgacaacaacaacaacaacaacatcgacgacaatagcgaacaactacaatatcagccatagccacatcaactaggtagtgcaaatagtgaaaagccaatatgtcgacagccagggttatataaatataatccaacaacaataatgtgctagaatgccaaatgagtgcagtcgcccctcaatgattggttagcccacctgcgattcttgatggaactgttccgatggatattcctgctctcccgccaccgggtgaatccatgcctcagcgtctggcgcacctctgagttaaggaaacagtagaacagagccacaaagaagccctaaagaatggattttcgaagatcaatgtttatggaaagactgtcacctaatctatatacctgcgtgcttatgagaaaggctcttatggcctcgaagagattacgactgataccctgttccgggcctgttagcaccaacagataggtgatgccaaagagaggtatcagcaccagcagcgccttcgaggccttgtaatactgccgcgtttccagggtatgagcagaacgtaatttagtgatgagtacctgtacgatatgatataatagcatgaagctaactcacttaagccagaagttaaccgggggactcacccacatgatgcgtatgaggaatactagattaaccagcaaagccagtgatgcaggtaccttgaatatccagtcaatgtgagattcacgcatccatgcacaatcaatttccagcttttgaaaaatcagaagaggttagcaagcatatctaggtaggtggcaattggtatcataccccattgaagtgctcgttctcgagatgcggagcaaatgccttggcaatggaccacaccaaaatgcatacggctggacagccccagccgatgagggcgtagataataaagctaatgttatcactggagaatgtttgcaccaccagcgtgtacagatagaggcctataaaaagcaaatgataaaaccgaggaaattcaattgataccgcctttgaacccaccctccacaaacatccagaaaaagttggttaggtaaaagtactgaaacatgattaccaacgttatgcagccagcctgactagactctgtggttatctaagtgaataattaattagtggagtgggatatatatattccagcttatcttaccacttgcaggaacagtgtgagtatccagaggagtgcggatgtgatgtaggtgaggaacaaattggcatgaatggtgtttcgcaggcaacgaagatctctgaagagttttaagcatgaaaatgatgcaactcatgtgtggcattacaactcacttaaagctgaggaatatgatgagagccaccaccaaggtggcgaagctcaggaaataaccgccggcatatatgatggccggcagttcgacgttgggtgagaagtcgggcaccaccggtatggagcccgagttctggtgacagcggtcatagtccgaatagtgatcccacgttccgtttggaaagcaaaagcgggtggcattgtctgcaaatatattgattttatttaagatctaaacccaatctggaatacccacctgtggtgtcgtagtgcacgcccttgaattcctcgaaacagggtagtacagccagactgccggcgtttgtgcgtggccagcacaggaccgaatcgaacgagctgggacattgtaaaatctgtaagaaataacaattgagaatatacaatgattggcaaggtaaacttcgttgagcatttactgcagtataattcgtgtttcccctctgtaaacgcaactgacctagcccaaaacccattaaatcagagtacataagattcatgccccgtttctgactcggtataataatgatgccttcattgcggatcctggtcatttatagctctgacgcatgattttctttaatcaaatttagtttccagactttacacacacacatacgcagcgtgagccaaatatcgatgtagtcccaaaaaaaaaataaagaaagaatcaccagctaccgctttatttatatatttgcaatggcgtgctaaacaatttcgtgcatacggatacacaagttatatgtacatatatgtatattaacgttaagtatacgacgacccggcgattgtttacccagttcagttcgtagcgccaaattaatcgcgacgcgctatggtagcggtgttagaaacagagcttcattgatattttttttattgaccttatcaggtgacgccgagagcgcggagcggagactcgtcgaagaattcaccaaattggcaattcttttatggccggtcttcccattactgataagcccgagaacctttttgcgacagctaatgcgatcggacttagccacgcgacaagtgagctgtcaacgagtaagccaaacactggagactggaaactccggcaatatttgtttctttgctcttctgattttcactcattagcctcgtcatttggacacagtcatagtacgaatacattttatgacattttcgaggaacaacgcccttgatcgtgcattcggtataaacaaaaatggctaaatgcagcctcaagtggatttccttgggtctagttttgtttacaggcgagaggaatacataaataaatatgtgctgcattttccggaaataaaatgccaaaataatttaatccgaaagcgatcgacagtttacttgcctggtttttcatcgtatcgtacttaaagtgaaagagattgacgggcggatggattgaagccaattatttcggaacagaagatggatcaattagcgggtgcgattaattgggaaattcctcaatcggcaaaagagatgaattcattggccaaacaaagggtaattagggaatatttattggc

SEQ ID NO: 18590 - DNA, 1167 bp, DROSOPHILA
atgaaggcatcattattataccgaattttacaatgtcccagctcgttcgattcggtcctgtgctggccacgcacaaacgccggcagtctggctgtactaccctgtttcgaggaattcaagggcgtgcactacgacaccacagacaatgccacccgcttttgctttccaaacggaacgtgggatcactattcggactatgaccgctgtcaccagaactcgggctccataccggtggtgcccgacttctcacccaacgtcgaactgccggccatcatatatgccggcggttatttcctgagcttcgccaccttggtggtggctctcatcatattcctcagctttaaagatcttcgttgcctgcgaaacaccattcatgccaatttgttcctcacctacatcacatccgcactcctctggatactcacactgttcctgcaagtgataaccacagagtctagtcaggctggctgcataacgttggtaatcatgtttcagtacttttacctaaccaactttttctggatgtttgtggagggcctctatctgtacacgctggtggtgcaaacattctccagtgataacattagctttattatctacgccctcatcggctggggctgtccagccgtatgcattttggtgtggtccattgccaaggcatttgctccgcatctcgagaacgagcacttcaatgggctggaaattgattgtgcatggatgcgtgaatctcacattgactggatattcaaggtacctgcatcactggctttgctggttaatctagtattcctcatacgcatcatgtgggtactcatcactaaattacgttctgctcataccctggaaacgcggcagtattacaaggcctcgaaggcgctgctggtgctgatacctctctttggcatcacctatctgttggtgctaacaggcccggaacagggtatcagtcgtaatctcttcgaggccataagagcctttctcataagcacgcagggcttctttgtggctctgttctactgtttccttaactcagaggtgcgccagacgctgaggcatggattcacccggtggcgggagagcaggaatatccatcggaacagttccatcaagaatcgcaggtgggctaaccaatcattgaggggcgactgcactcatttggcattctag

SEQ ID NO: 18591 - protein, 388 aa, DROSOPHILA
MKASLLYRILQCPSSFDSVLCWPRTNAGSLAVLPCFEEFKGVHYDTTDNATRFCFPNGTWDHYSDYDRCHQNSGSIPVVPDFSPNVELPAIIYAGGYFLSFATLVVALIIFLSFKDLRCLRNTIHANLFLTYITSALLWILTLFLQVITTESSQAGCITLVIMFQYFYLTNFFWMFVEGLYLYTLVVQTFSSDNISFIIYALIGWGCPAVCILVWSIAKAFAPHLENEHFNGLEIDCAWMRESHIDWIFKVPASLALLVNLVFLIRIMWVLITKLRSAHTLETRQYYKASKALLVLIPLFGITYLLVLTGPEQGISRNLFEAIRAFLISTQGFFVALFYCFLNSEVRQTLRHGFTRWRESRNIHRNSSIKNRRWANQSLRGDCTHLAF

SEQ ID NO: 18592 - DNA, 5273 bp, DROSOPHILA
tgtccttagtgtctcgtgtcctgcggcacagtggaggttcggtcgaattgataggtcctttggatgctccttcaatatctcctggaagctatcgaataaggtagggtgtaatacacacatgtattgatcagaaattacctcagtaataaaatccaaaaattaaaaacaatcttaattgctgtacctttacattaaatttgtgttgtatatatttaagaaataataaagctttaaaaacattgctaacgtatgtatatttcccccctggtaataaattaaatatattcagaacaggaaactgtagagccaaataacaaaaacaatagcataattctaggagcatgccgatactgtagctgtgcaaacaatttcgaccgccagtgtgctactcgcatgccttttcggttgagagcgcgagtgcgcatttgccaggctctcaggcgagtcctttcactcgctcgcagtccttttgtccgctcccgctgcacaaacaggagccgagtccgagttgagaatgaatcgccgcgccgaagagcacttcggattacagcctttgtgttttcgccctgaatgaaagtcagccagcctgggccatcagccatcagctggcccgttgggttggctgtgggctccaacgctttctgaattgcgctgcccacgcgaggcggcgtccaagtaaacaaatacatgtgcgcacggctgtgataatagggcgtcgcgcacatgttcagctgtaaggtcagagcacagcgtgtccttacagtgagccatggccacagcgacacacactagcaaacggccaacaatgggatcaaagatcaaggacaatctgatctcttttcaagattcattttatcacatcgatacgaacttaaaacgatttttacatacataaagtgcacaatttgtaacttgaagacaatcagtattacaatcattttcgagtatagttatctacttattaagaaaataatcttggtgcacagttttcccatgctaactacaatctggcaacaaacaaaacgagtattatatacaaaaggcaacgaggtaggctgctggaggtccgggaaacgccaccgcggacctgaaagtttccgaagaagaaagtccggggccgcttcagcgaaggtagctgctggcactgcccggagaaccacttgcgcgtatttccatcgctatcccgggatactatacatatctcagcgcctcgaagtttctcttctcccagcgtcgatagctcttccaccgggatttgggcagtacgattgttataggcatagtccgactggtgaagcacatcgttgctactgcttcggatataaacgtggaagtctgagacgtctgaaaagccggagacataccagcatagggtcaacatgcccgctttgttgctatttgaaaaatgtacaaggattataagttactttaagttcaaactgcaaaatatgcatacgttttcacttctcggaatcggacatctgtaagctgttcatagtcaatgcccttatacatctcctgctcatcctcggcgcagtgcagatactcatcgtccaaagatataagctgcttgtccttgatcaaagccggcgttccgcagtaaatactcttcaaatcctctccagctatcgtttgctgcagcataaagtatttcaacggtcgtgcattgcatccgcagtgcagaggatttccggccagaagtacttggctaccattacgcatgctgcccactatcgaagcgggcacatcctccagactattgttggtaagatcaacatatttcagggatttcactttcaccagattggcgaacggcaagtggtagattttgttgtgggaaaggtccaaccagctcaggttttgaggcaggtcaaagatgtgctcttcagacttcagattagatagttcattataagacatatccaaactttgaagtgaagtaaaattagagataactcctctccttagatcgttgatctgattgtgagatacatccaaccgaaccagctttttggtgccgaatgtaatatcataggtcagtattggcatcaaattgtagcttaggttcaggtttcttaggttgtacggaatgtactgatgagagggaaaggttttcttggtaacaaaacttatacgattgtgactcaaatctaaggtttccaaactgagtaaatcatccagaacaccattggttttgttgtccaacttggtgagagaattgaaggacagatcaaggtttcgcagagatggtagaccaacaaagatgtcattttgcagagtctggattccgttcgatgacaaatttaaagtgagcagctgcagcagtccctcaaaagctcgcttgctacaagttataaatgggttattagtcatattataaataaaaaatgtacagattttagataaatcttaccttatatccttaacttggttaccatacagatttaactcaaacaagacgggcagcttaccaaaggcacttcgttctaaggtcgtaatattgttgttctaaataaaaagttggatgagtttggaggttagaattctcatagcatttgctcacctccaaatgtaagtactgcagtgttgacatgacagccaccgcatcctttggtggctgactgatgccattgttttgcagcttcagtcgttgcaccaccaacagacctgtaaaactctccccgtttagagtgtctcccagctgattatggcttaggtccaagtagatcagtgagttcatcactggccaggtgcccgatggtatattagtcagcctgttatggctgaagtacagctcatttagggaaataggcaactggaaaagtttttccaattgattattatttaaatacagctgtcgcaaactggtcaacttggccagcgatcctcgcactacggataccagttcgttatgactcagatccatttccaagagggttggcaaagtgccaaatgtcgacgacttgatttccctcatgctattatggctaagatcaattgagcgtagcgagaatagggtttgaaaaactccattaaatatactggagatgttattgtgcgagacatcgatggtgtgcagttcatagagctttggaaaacaatttttgggtatttcggtaatgctattgtacgaggcattcaagactttcaagccagtcatattttgaatgggaatctgtgccaaattggtaagattgttgtagctcagctgaaaataggtcgcgaaagtggtctcatcgaagctgcgacgcgaaaagttggccaaccgattgtgagacaagtcaagaaccgtgatgtttacacaattttcaaatgcagctgtttcaatgagttccaaagcgttatgcgatacgtttatgatagcctggtaaatatccttgaaagagttcttttcaatcttggttatgttgttctccgccaaatcgagcaactgaaaagcagcaattagttaaatttttcaaattttatattagcaattgtacctccacatagttcatctgggtaaacatctggaactcgatcttcttaagacggttgcgtgcaagatcaatagttccaatgcgggcaattgagccgaaagtaccacgaccaatatccgtgagcacattatcgctgaggaaaagacgacggaggaaacgcatacccctaaaactattcgcatctaggcgtgcaatctggttgtgggacaaatggagcaccttcaacacagagtttctggcaaaagttccgcgactaagttcgcttagggcattatgagaaacgttgcaccatcccagctttgtcagatcagctatgtgctgtgcctccagctttttgatctggttgtgacttatatccaagacctccaactctcttagattcttaaattggtttcgtttcagattctccaattgatttccatgcaagtcgagcgtttttagtttccgcaatggctggaaagtctcaataggcagatcacttaggttaccattggtcacacgtatgattcccagactattggcgatctcttggccagcaaatagatccttgggtagctgttggaacgcatggccatcgattacgagttccttagcttttcctagaatctgaaaaaagaatttcccgtttagataacgatggtatcggtatattgtttaattcttacgccgaatcctagtaaaccaacgtggcttagatttgtgcgaagtaaatgcagttgctccaaagtattatttactccatagaaaacataatcctcaatggtggccaatggtgtttcttctatgatcagcattcgtgctttgatatgagcaaatagtggcccatatagacgaactagaaagagaatttgattcttcagcttaacagactaaaaggacgtgtagaagtacacaccgaaatgtcctctgtagatggtcaactcctcgatgggcataccaaaagaggccaaattctgaagggctacggataaggtagccaagtttgtattttcgcaccgaatgtagaggccattatcgctgcccttcacacattcgcaggggtacaaggcctttgatctgatttgaaaaaaaaacaccatataagtgaagaaatatgtaatatacaatatttggaataactcacttttttggacacttgaattcgggttcgccatacacatattccgaactggctagggcaatgaagtgcagcaaaacgagagtgcgcaggcgtagctgaatcatgttttaatgatttcgtcaccgttttaatttagtttatcccatggcccaaaaccaagttcgctgctcaagtcttttgtgtgggcttcgatttcctgaaacttatagttctttgtttaacgatgttccgcttgaatgaggtgggtttttttttgggatgtggagtaaagttaacttgtcttatcaacgaacaaaggtaaatggtttcttctacttttacttttcgctctgctggcgcaacaggttttcatgggccgctcttgtgcgctctttgtgaccagcactttggagctctaattgaattaatgccaactatattaactgctcccgaaagtcagagcactgtgaaccacagtttccacttcggttcccccatttattccgcggttttaacatatttttatttattttacccttggcgcacaatacaatcgatagatttcgggcgagttggcagccccgttgaaccatcgcttcagacaatcggcatcccaaatatcgaatcagccgcacacgctaatacaaccctgttgtgacatctcgctcgttggaaaagcaaaaaccaggcgcaaa

SEQ ID NO: 18593 - DNA, 2862 bp, DROSOPHILA
atgctgatcatagaagaaacaccattggccaccattgaggattatgttttctatggagtaaataatactttggagcaactgcatttacttcgcacaaatctaagccacgttggtttactaggattcggcattctaggaaaagctaaggaactcgtaatcgatggccatgcgttccaacagctacccaaggatctatttgctggccaagagatcgccaatagtctgggaatcatacgtgtgaccaatggtaacctaagtgatctgcctattgagactttccagccattgcggaaactaaaaacgctcgacttgcatggaaatcaattggagaatctgaaacgaaaccaatttaagaatctaagagagttggaggtcttggatataagtcacaaccagatcaaaaagctggaggcacagcacatagctgatctgacaaagctgggatggtgcaacgtttctcataatgccctaagcgaacttagtcgcggaacttttgccagaaactctgtgttgaaggtgctccatttgtcccacaaccagattgcacgcctagatgcgaatagttttaggggtatgcgtttcctccgtcgtcttttcctcagcgataatgtgctcacggatattggtcgtggtactttcggctcaattgcccgcattggaactattgatcttgcacgcaaccgtcttaagaagatcgagttccagatgtttacccagatgaactatgtggagttgctcgatttggcggagaacaacataaccaagattgaaaagaactctttcaaggatatttaccaggctatcataaacgtatcgcataacgctttggaactcattgaaacagctgcatttgaaaattgtgtaaacatcacggttcttgacttgtctcacaatcggttggccaacttttcgcgtcgcagcttcgatgagaccactttcgcgacctattttcagctgagctacaacaatcttaccaatttggcacagattcccattcaaaatatgactggcttgaaagtcttgaatgcctcgtacaatagcattaccgaaatacccaaaaattgttttccaaagctctatgaactgcacaccatcgatgtctcgcacaataacatctccagtatatttaatggagtttttcaaaccctattctcgctacgctcaattgatcttagccataatagcatgagggaaatcaagtcgtcgacatttggcactttgccaaccctcttggaaatggatctgagtcataacgaactggtatccgtagtgcgaggatcgctggccaagttgaccagtttgcgacagctgtatttaaataataatcaattggaaaaacttttccagttgcctatttccctaaatgagctgtacttcagccataacaggctgactaatataccatcgggcacctggccagtgatgaactcactgatctacttggacctaagccataatcagctgggagacactctaaacggggagagttttacaggtctgttggtggtgcaacgactgaagctgcaaaacaatggcatcagtcagccaccaaaggatgcggtggctgtcatgtcaacactgcagtacttacatttggagaacaacaatattacgaccttagaacgaagtgcctttggtaagctgcccgtcttgtttgagttaaatctgtatggtaaccaagttaaggatataagcaagcgagcttttgagggactgctgcagctgctcactttaaatttgtcatcgaacggaatccagactctgcaaaatgacatctttgttggtctaccatctctgcgaaaccttgatctgtccttcaattctctcaccaagttggacaacaaaaccaatggtgttctggatgatttactcagtttggaaaccttagatttgagtcacaatcgtataagttttgttaccaagaaaacctttccctctcatcagtacattccgtacaacctaagaaacctgaacctaagctacaatttgatgccaatactgacctatgatattacattcggcaccaaaaagctgtctgaagagcacatctttgacctgcctcaaaacctgagctggttggacctttcccacaacaaaatctaccacttgccgttcgccaatctggtgaaagtgaaatccctgaaatatgttgatcttaccaacaatagtctggaggatgtgcccgcttcgatagtgggcagcatgcgtaatggtagccaagtacttctggccggaaatcctctgcactgcggatgcaatgcacgaccgttgaaatactttatgctgcagcaaacgatagctggagaggatttgaagagtatttactgcggaacgccggctttgatcaaggacaagcagcttatatctttggacgatgagtatctgcactgcgccgaggatgagcaggagatgtataagggcattgactatgaacagcttacagatgtccgattccgagaagtgaaaaccaacaaagcgggcatgttgaccctatgctggtatgtctccggcttttcagacgtctcagacttccacgtttatatccgaagcagtagcaacgatgtgcttcaccagtcggactatgcctataacaatcgtactgcccaaatcccggtggaagagctatcgacgctgggagaagagaaacttcgaggcgctgagatatgtatagtatcccgggatagcgatggaaatacgcgcaagtggttctccgggcagtgccagcagctaccttcgctgaagcggccccggactttcttcttcggaaactttcaggtccgcggtggcgtttcccggacctccagcagcctacctcgttgccttttgtatataatactcgttttgtttgttgccagattgtag

SEQ ID NO: 18594 - protein, 953 aa, DROSOPHILA
MLIIEETPLATIEDYVFYGVNNTLEQLHLLRTNLSHVGLLGFGILGKAKELVIDGHAFQQLPKDLFAGQEIANSLGIIRVTNGNLSDLPIETFQPLRKLKTLDLHGNQLENLKRNQFKNLRELEVLDISHNQIKKLEAQHIADLTKLGWCNVSHNALSELSRGTFARNSVLKVLHLSHNQIARLDANSFRGMRFLRRLFLSDNVLTDIGRGTFGSIARIGTIDLARNRLKKIEFQMFTQMNYVELLDLAENNITKIEKNSFKDIYQAIINVSHNALELIETAAFENCVNITVLDLSHNRLANFSRRSFDETTFATYFQLSYNNLTNLAQIPIQNMTGLKVLNASYNSITEIPKNCFPKLYELHTIDVSHNNISSIFNGVFQTLFSLRSIDLSHNSMREIKSSTFGTLPTLLEMDLSHNELVSVVRGSLAKLTSLRQLYLNNNQLEKLFQLPISLNELYFSHNRLTNIPSGTWPVMNSLIYLDLSHNQLGDTLNGESFTGLLVVQRLKLQNNGISQPPKDAVAVMSTLQYLHLENNNITTLERSAFGKLPVLFELNLYGNQVKDISKRAFEGLLQLLTLNLSSNGIQTLQNDIFVGLPSLRNLDLSFNSLTKLDNKTNGVLDDLLSLETLDLSHNRISFVTKKTFPSHQYIPYNLRNLNLSYNLMPILTYDITFGTKKLSEEHIFDLPQNLSWLDLSHNKIYHLPFANLVKVKSLKYVDLTNNSLEDVPASIVGSMRNGSQVLLAGNPLHCGCNARPLKYFMLQQTIAGEDLKSIYCGTPALIKDKQLISLDDEYLHCAEDEQEMYKGIDYEQLTDVRFREVKTNKAGMLTLCWYVSGFSDVSDFHVYIRSSSNDVLHQSDYAYNNRTAQIPVEELSTLGEEKLRGAEICIVSRDSDGNTRKWFSGQCQQLPSLKRPRTFFFGNFQVRGGVSRTSSSLPRCLLYIILVLFVARL

SEQ ID NO: 18595 - DNA, 5402 bp, DROSOPHILA
tgataatgatactctggacgtcgcactgctgttggtcgcgcagcttcttccaaagtgggcgggacacatgggcggccagctccttctggcgtcggttgatttgctccaggacgtccctgtgctgatgcataaagggacgcagggattcgcccaaggtgtcttcgaagacggcgaggctctaatggaaggtgatatttcaaaagctattttcttttaagcaatctattaacaaaatacagtgagatattaacaatgaccctcaccctttgcttgatcatctcgaaccgcccgtgggcaaactgtccgccaaagggacgtccgtccgtataaagcgtggttagggcgttctcaaattcgttggcattgaaaagctcttcgcacttcttggcaatgatgtcggcggtatgtgaatgattgaaactcaattcccttcgatgaccgaacatcgtttcaatggcccgcttcgatatctggatgtccaggagggcgagatccggacgcaccagcgattgctggctccgaaggagcaaggacttgtacaggccactcgtccatgacatgttgaattttgtacggctaatttcatgcaaacgcaactggaatttggcaagatactaagtgaaaccagtgaacaaaagtgtaagtttaactggtggagcaaagccaaaatgatgggaataatgtagagatcagtgaaaaaactattattagcagctttcgattttgcatttggcttcagggcagcttaaccaccgaatacagatattaaaataccaggagttgtggcttaaatttcaaccaggcaagcctcgaaaaatacctgttgttaacttggaatctcagtgattaaattacaattaacgtttatttcgcttgagtttggctttgagttggtttcaataaatacaataaatacgtattaattaacaggcttcaacgtttagcattaacaattcattaacaattacgaattacaataaattaagctaaggagtggggcctaatggtgtttcctcagggggcgcggcaggcggcgggtgcgcagacggcgacgtcgggacaacgacttcgctgccggcgtcgcatttgcatttccatatgcatttccacttgcattttcattcgcatttgcataggcattttcatagccattgccattttcatcaattttcacagcgctttcttcgggctttgctgcttcagcggattcttcagcagcgtctacctcgccttcttccttttcatcgtcctcctcatcttcttcctcctcgtcgtcttcatcttcctctccttcttcatcctccccatcttcttcttcttcgttatcttcatcttcttcagcggctgtgtcatttggattgaccttttcttcatgacttgccttcacctctttctccggctctatctcctctttctgcacgccctcttcggacttttcttccgctccctcttcctgtttcttctcctccttcttcacctggcttgggggttccttcacccggttttttttctccacctcatcatcatcgtccacgtttatctcattatcactatcattttccatttcaacagccactgttgtcgagtcttcttcgtcgtcttctgcctccccttcttcagatgtctcgccctctttctctggctcttctactgtcttctcaccctctgcttctactgtcttttccccattgtttgtgccatcaataacaatgtttggcttgttaaatgtcgtagctgttgtcggtatttttgtcgttgttgttggtattttcgttattgtggctgttgttgttgttgttgtgggcgcttcagtggcttttattgaattggtaattgtttcaattacctgacttggcctcaggccactctcgccataaccattgtcattgtcaggtgtctcttgctcagactccgtccccgtctctttctctttctccgccgcctctgctgccgtctcttttgcgtcttcagctggcatttcttcggcctcttcttcgaaaggtgcttcttctgcctgatcgctggccattagcatttcactttcgattggcaggggctccacatcttcaagttcttcgtcctcctggtgatctccctcgctctctaaagtcttctcctcctcttcttgaagatcctcagctagaggctgttcttctggaactttttggggaaccatcgccatcgggggttgatagcccatcggttcatcttcatccagtgtattttctgaaggctgttgaatctctggctgcttttctgcaggcttttcttctttttggtcttcaaccttaatttgacctagtgtttgataacctgattcttcattttgtgtatcctcctccttatctacctgatcctgtttagctggctcgcttagagtttgattcttttgaggttggtagattaattcttctagatttaattgaggctcaatcttctgtgcttgattatttatgatgagaggttgatagcccattgattgattcttctccatctcatcctctttaacctgatcagtggtcagtgttgtattcttctgctgctgattgttatctggttgatagccctgggatggagcctcctccttgacatcctcttgataaggatactcttccggttgatcctccagctcggcgtactcgtactcctccggatcgtcgctctgaccatctcccatcggcagtacgggcttgccattcttgtccacatactgcagaccatccagacccattcgcatgcactggaaatgcatctcgaagagatcggtggtggccatccgaaccacaaagtccatgcacatgtttaggttgttcccaaccactgtgacgtcggtcatttggacgcacatggccatcggtacacccatcatgacgggaatgcagaagggcgccggattgcgcaccgagattccgtatttcgaggagggcctgccattaagaaagacctccagttgggcctcctccagatgcggcacgaagctcacgttggcgcacactgcaaacagaggcaaaatggaaagaaaacgttgagtcaaaattacagataggcacaacaatgaaacgattcgattcaatgaatgaaagtggcgggtggcaaactgtcgacgaatcccaggcaaatggtgggtgctgggtgctgaatggtggatggtggatgaggcgatgagggggtggccaccgctggaagcgccaacaatttgtggcattttgattggcaaatgctggcatgtcacgaagcgaagcggagcgaaatggaaaccaagccaaaccaccgatcgcattgtagtctccggcatgcgccgccaacccgcggccaagatcggtttcttggccaaggaaatcggcctggaatccagccgaaatcgcagccaaatatgtgtggccaccacccgcaggccaggagccacgattccgaccaggctaagtgacggcaaagatcccaatttatgcataagcatatggccgacggattgatcctacggcgattactaacctagtgcccattagtgtatattaagatattaaggctaaatagcatgctgaaaatgaaaacccattaatggttttcttcaccaaataaataacaagtgcactgtgcaaaaaatctactaaatgcatatcctttctcgcgtagatataatacatgttattcgtaatcaatgttcttgttggtttcaaaccataataatatacatcaatacaaaaccatttctttctaaagaaatgagaaatatttttaacattctgaatttgaaattataactaaggttgtaattttcataatgtctcgaatgtcacactgtttcatattactaatctcctaatcaataatctactaaacatttaaagtattgcaatattctattccccattaatagctaacgaagcatgggctttctcacctttctgatcgaatcggtactgatcgaccttgagaccggcgcaacatccgcaggtgggtccgctgcactcgcagggctggccaaaggtggaccagatggaccccttttcggagtacttgacgctggccagatttcggcccctggacacactgaccgtgggcggtaggtagggtcggtgggtcttcagttcgtagaagatcagaccgttgctgtagctgcgcgaggatgtgtgaagggggcacaggatgagcacaatggccgcgcttaggcaaatccagggaatcatggccactgtggatgtcaaactgcacactgaacaaaaaactgatgaacactgaacaaaaaagggtgctgcaacgcgtttcaggtatggtattgtgtgtggtattctcttggcgaattcccggatcacttcacgattaacggtaacggtacagccgtggcaatcgcaatccaatggcaatggcaattcaactattattccagtggagcaatgacaaccgctcgcgatcgacgacaattaaatattaaaacgctgaacgcgacgagcgttagcttaaaaatgaaatggaaaccgccgcccgaataagtggacgtcgacgtcgacggcagcgactgcgacggcgagcgcggcagaggccaaaatgttgctgctggggggacaccgcagcaacagcagcaccacgcagcagcaacagcaacagcagccgcagcagcagcaatatccaacggcagcgcggcagcctcgttaaattgtcgctcgttgcggctgtttgctgtttttgcgggcaaaccatttgtacactactcgaaaaagggtagcacagtccagtgaatagctttgtacattccgatatgcttaagaacttcaaatagtaaaatccttataattctactctaacaaatattgagtatcataatcaaatgtatattcagttgaaattaaataaagtattatatatatttaacaaacaagatatttaaataatatataattataatataaaatatataatatataaattctttataataattatgtatataacccaataatatatattcttagtattattaagtttatgatcctattttatttgtgatttggtttaatttaaaacttttcttatgatttgcatttatttcactttgcgacttgaatttttttggcagcatggtttgttttttaaaaaatattattatttttatttaaaaatccatagttgtttaaacatatcctaactccctgattagggtattccatattcgcattgatctcagacgatttagttcttatcagcagcggcgaatcgccaatttctgttgttgctgctgcaaccattttttttttttttttgtattcctctttactattgttgttactgtttctgttactgttactgctgctgttcgtgcagttgcagtttttactgtggcagccgctttgtttatttgtcttttaagccgatgttgctgctgttgctgctttgctttgttgcgt

SEQ ID NO: 18596 - DNA, 2495 bp, DROSOPHILA
gttgtcattgctccactggaataatagttgaattgccattgccattggattgcgattgccacggctgtaccgttaccgttaatcgtgaagtgatccgggaattcgccaagagaataccacacacaataccatacctgaaacgcgttgcagcacccttttttgttcagtgttcatcagttttttgttcagtgtgcagtttgacatccacagtggccatgattccctggatttgcctaagcgcggccattgtgctcatcctgtgcccccttcacacatcctcgcgcagctacagcaacggtctgatcttctacgaactgaagacccaccgaccctacctaccgcccacggtcagtgtgtccaggggccgaaatctggccagcgtcaagtactccgaaaaggggtccatctggtccacctttggccagccctgcgagtgcagcggacccacctgcggatgttgcgccggtctcaaggtcgatcagtaccgattcgatcagaaagtgtgcgccaacgtgagcttcgtgccgcatctggaggaggcccaactggaggtctttcttaatggcaggccctcctcgaaatacggaatctcggtgcgcaatccggcgcccttctgcattcccgtcatgatgggtgtaccgatggccatgtgcgtccaaatgaccgacgtcacagtggttgggaacaacctaaacatgtgcatggactttgtggttcggatggccaccaccgatctcttcgagatgcatttccagtgcatgcgaatgggtctggatggtctgcagtatgtggacaagaatggcaagcccgtactgccgatgggagatggtcagagcgacgatccggaggagtacgagtacgccgagctggaggatcaaccggaagagtatccttatcaagaggatgtcaaggaggaggctccatcccagggctatcaaccagataacaatcagcagcagaagaatacaacactgaccactgatcaggttaaagaggatgagatggagaagaatcaatcaatgggctatcaacctctcatcataaataatcaagcacagaagattgagcctcaattaaatctagaagaattaatctaccaacctcaaaagaatcaaactctaagcgagccagctaaacaggatcaggtagataaggaggaggatacacaaaatgaagaatcaggttatcaaacactaggtcaaattaaggttgaagaccaaaaagaagaaaagcctgcagaaaagcagccagagattcaacagccttcagaaaatacactggatgaagatgaaccgatgggctatcaacccccgatggcgatggttccccaaaaagttccagaagaacagcctctagctgaggatcttcaagaagaggaggagaagactttagagagcgagggagatcaccaggaggacgaagaacttgaagatgtggagcccctgccaatcgaaagtgaaatgctaatggccagcgatcaggcagaagaagcacctttcgaagaagaggccgaagaaatgccagctgaagacgcaaaagagacggcagcagaggcggcggagaaagagaaagagacggggacggagtctgagcaagagacacctgacaatgacaatggttatggcgagagtggcctgaggccaagtcaggtaattgaaacaattaccaattcaataaaagccactgaagcgcccacaacaacaacaacaacagccacaataacgaaaataccaacaacaacgacaaaaataccgacaacagctacgacatttaacaagccaaacattgttattgatggcacaaacaatggggaaaagacagtagaagcagagggtgagaagacagtagaagagccagagaaagagggcgagacatctgaagaaggggaggcagaagacgacgaagaagactcgacaacagtggctgttgaaatggaaaatgatagtgataatgagataaacgtggacgatgatgatgaggtggagaaaaaaaaccgggtgaaggaacccccaagccaggtgaagaaggaggagaagaaacaggaagagggagcggaagaaaagtccgaagagggcgtgcagaaagaggagatagagccggagaaagaggtgaaggcaagtcatgaagaaaaggtcaatccaaatgacacagccgctgaagaagatgaagataacgaagaagaagaagatggggaggatgaagaaggagaggaagatgaagacgacgaggaggaagaagatgaggaggacgatgaaaaggaagaaggcgaggtagacgctgctgaagaatccgctgaagcagcaaagcccgaagaaagcgctgtgaaaattgatgaaaatggcaatggctatgaaaatgcctatgcaaatgcgaatgaaaatgcaagtggaaatgcatatggaaatgcaaatgcgacgccggcagcgaagtcgttgtcccgacgtcgccgtctgcgcacccgccgcctgccgcgccccctgaggaaacaccattag

SEQ ID NO: 18597 - protein, 759 aa, DROSOPHILA
MIPWICLSAAIVLILCPLHTSSRSYSNGLIFYELKTHRPYLPPTVSVSRGRNLASVKYSEKGSIWSTFGQPCECSGPTCGCCAGLKVDQYRFDQKVCANVSFVPHLEEAQLEVFLNGRPSSKYGISVRNPAPFCIPVMMGVPMAMCVQMTDVTVVGNNLNMCMDFVVRMATTDLFEMHFQCMRMGLDGLQYVDKNGKPVLPMGDGQSDDPEEYEYAELEDQPEEYPYQEDVKEEAPSQGYQPDNNQQQKNTTLTTDQVKEDEMEKNQSMGYQPLIINNQAQKIEPQLNLEELIYQPQKNQTLSEPAKQDQVDKEEDTQNEESGYQTLGQIKVEDQKEEKPAEKQPEIQQPSENTLDEDEPMGYQPPMAMVPQKVPEEQPLAEDLQEEEEKTLESEGDHQEDEELEDVEPLPIESEMLMASDQAEEAPFEEEAEEMPAEDAKETAAEAAEKEKETGTESEQETPDNDNGYGESGLRPSQVIETITNSIKATEAPTTTTTTATITKIPTTTTKIPTTATTFNKPNIVIDGTNNGEKTVEAEGEKTVEEPEKEGETSEEGEAEDDEEDSTTVAVEMENDSDNEINVDDDDEVEKKNRVKEPPSQVKKEEKKQEEGAEEKSEEGVQKEEIEPEKEVKASHEEKVNPNDTAAEEDEDNEEEEDGEDEEGEEDEDDEEEEDEEDDEKEEGEVDAAEESAEAAKPEESAVKIDENGNGYENAYANANENASGNAYGNANATPAAKSLSRRRRLRTRRLPRPLRKHH

SEQ ID NO: 18598 - DNA, 16006 bp, DROSOPHILA
tggttttgtatattgctgagttatgttttccctttttttttgcaatgcgtatttaaatatgctatataatcgcaataatacataattgttttgttgtttgtttgttggttgctcgagtacataatagctacgcgcataaatatgttttggtatgctgtaacgcttcgcttcgtttatatcataagttgatgcatgtctgtctgtctgactgtcactgtcgccccccgatgcctgatgcctgtttcttgaatcgtgtcacctttgacccgttggccacttggccacttacaggtgtgcttgctgctgtgtggttgtgttttcttgtagagtaggtccataggactaacgcctaggtagcaattcaaaagtctattcacttcgttatcgttacaatatcgtgggcataaaacttatatgtagatttacgttatatgtcagtatttgctgtttgtgatggcggcggtggtgtgtggagtgtggtgtatggtgtgtagtgtgggtggcagatcttctatggccgtgggttgtgattttctgatctgtctgctggctgctgagttctctctatcgcataatttatctctgtatgtactcgttttcattttttttttttttgtttgtttgttaatttttttttcgattcttatattaaagtcatcacagttagcggagctgaaattatgaataattattgaggacattttttgtgtaattgtttttatcttctttttttgggtttttagtttttaatacgttttctactaaatcgcaattgcatatatagagtgtctaccataaattgattcttttttagtgtactcttatcgcgtcttggggttccttttactaaattattatatacgcagtgtgtgtgtgtgtgtgtgagtggtagtcctgtgtggagtatggatgtgggacttggtgagtgagtgtccagcgaactgctgcttcagatggttgcccggtgcccgagggcaccgcttgtcactgctcctcagtgtcatggagtgttaccctcgaacaaggcccggaactccccgctccgtggcctcgggagaccctcacgtatcgtctgcaccggctcagcaatgctcgactctgacccatgcagtaaattctccttgagatccatgtcactgaaacagatagcaaaagtattaacaaacatatttaacgcagttgttaaggaagccctatagaaagagttatagatttgtatttttataagatgagcaatatgaaaagatggtttgttagaagagtcatgtatgtattgcttgtaccccagtcaacttactcatctttgcagtcatccgcctcggcagccagtgcattaaccacagccgtaatcgtgttcgactccggattgctcagctgctcgtccttctgatgcattatgtttggattcttgccgatcttgtttaaccgctcggcggccacagtctccatggtcttgcgcatcagcggatactgatccagaacgcaattgaaatgatccacgctcaacgagaatagattgcaataggtttcggctcgcacgctggccacacgacgcgcattggtcagcagacagatctcaccgaaataagacccatccgaaagtgaggtggcaacctatagaggtcggttattagaagggcggattttggagtttgaactcaaaagttttcctcacctcgccgttggccatgacaatgtccaccacgccctcctgtatgaagtacatcttagtaccgatcgtaccctcctttatgataatatcacctaaaatatccagaattggttagttaacagcacacataagcaagttagtttcacccacctggttggaaaacttcgtatttcagtttggtaactacgtcggaaacgaaattcgaatcggcattagcaaaaaaaggcactgacgccacgagggatctgtggaatatggaaagaccacaagtcattagtaataaactaggatatagtgcaaaatactaatccaagaggttactatactaattatgaaagctgaaagtagaaacaattgatagttcactggtcagtgacagatcgcccacctgcagttgtagttgatgacatcctcgcgcagtttttcgctcaactcgccaagtatcaactcttcatcgaagaatttaccctggtaccgatgctcgaaatattccgtgatgcgctgccgcatgtcgcgtggcagcttgcggtaggccatgtactcctccacctgtttgaccttctcgcgatactggcgccggctggagtccaagctctggatgagattggtcgcgtgaccgaggaacaatgcgtaacaggtggccccggatatcatcgatagcatcgtcagccacatgtctgtcagtgattgtggcgggaatctagaaaaaatacgagattattagtgataatacaagttatagtaacgagtgcatatattgctagtatattttgtcctgtgcaggatcttcgcaatggaacgtagatggggacagcagtagagtagattgggacattaacaactcacctgccgtagcctatgcagagcatgtgcgacatggccttgaacaatgcccacgaatactgctccagccagtacgattcctgcaatggaacagcccatttagatatccgttaacagctagaggggttttaccaatctggcgcacctgcaactcgttgatggagacccaggagttggatggaaaaccctgcaacattggcactaagaactgcaagcaaccgctccaatggccgatcaggagcatcatgcaaattaaattgaagatcctcatgaagaccgaggccatattgaggaactgcaaccagagaggtcaatcaaaaggagtgcactttaaccaaagcccaacaccgctcgtgtatgtgtgtgtgtgtctccatgtgtgtgagtgggcgtgtctgtgtgtgtgtttttggtggcttgtgtgtgttcgagtgttttttatgcatgtgttacatatgtgtatgtgagttccacatatataaaaccaaatgtctcaagtaaagaagagaaaggaaacccaaacgaggaaatgaaatttggaacttggttaaaatttatttgcaacttggcggcgtcattggcgtttccagctaccggtatagtaaacatgacagttattgcattatgccaatcaaagcaactaaaacaaaaccagaccacagccattaaaacaagaaaattactcaatctcgccactctgcccgataagtatgcaacggatacttttattcctcggcctccagatcatcggattagattggatcggagcagagcggttcgaaatacatggtatatccgataagataaaataagataagattagtctagtgttaggcaatacaatagtgtccggtggtgtactttgtgtactttgtgtacagtgtacaacctgagcaatcaattcaaactcaatcaattcaaattcaaattcaaaccatttctacgtttcgaataggtgcaaaatcagctgctaatttatggtacaagtgctcatctttacttttgtttgtttcattttttgtttgttttgttttgttttacgtttgtttaaacactaagccgttcaaacgttcaaaatatcgaaatcgaaactcgtattttacaatgaaagcgtttgttttttctgactctcgcagtttgttagtaattaaactacgtaattctgtacaaagtacggtaaacaaaccaacggaatatacacgagaaattaacggaaaccaaacgaacggtaaataaaaaacatagagcaagagcaggaacacagagcttgagaaaaagttagagagagagagggagcggtatcgagataacaaaataacggtagttgcattcaagaattcagtggttggagctgcttgtgtgcgtgtacatgtgtgtgtgtgggtgtcactccaagaagcttatttatcagtttttaacgcgctcctgctgaaatcttttgtacaaaacaagagaagtggggaggcagattaaataaaaaatcagaaaaaaccaaaaccaaaccagtaacagtaaccaaacaacaagtaacggtagcagaggcagcaaaatagagttgtatttctacacagagaaaaaatagcattacatctgtataggatcctatatcacattgaacatatctgtttatttcaaagccattttcttggaaaacatgtacgtaattggttgtattgaatcagttagattttctctgtgtagttgggagagggcaagagagagttcgagcggaaagcgcgcagcacaaaagcagaaagcattgaacagtgtcaagtgaggttaagttgaatacgaaatatacgatacgatataggttaggatatgtggaaagcatttggcacgggcccacaaatgtatgctatatattacgagtagtatgtggctagatatagtacagtgttcgtgttcgatctgattggtcgttggatcagtttccccgtttcagatcgcttgactactatattggatgtgtgtcttgtgtccgtttctaagacctaaacttctagcgtaagcagcagcagccattaatctagctactagattatcaagtgcggttttgattgtgtctttacagtggcaatcttttgatctgtgctgcctagtccctttaaagcaataagcattcaacacactatacatttcgaatccgtaatatatcctgagatctgtggcgttttcatgctcttcgcagcggtatagtataacccagctaatctgcggttcataatgatagatatagcagttctataggatttccgatcatgcccatgcatggagtccaaaactacggaatctagcgagatatattacattatccttctgactgattctacgtcgcgtgaagagcatgaaaaaagcttcgatttggcaccgaagattcataaataaaaagcttggtttttcgtatgctgcttttgggctaaactctcttcttcattattgatttaacaagattttcattatgcatcaaatgagaaatagagattatgtatggcaatatcaatcaatcatcaatatgtaaaaaatgcagtctcagaaaatttacagaacgtacgaacgaacgaacattaaaatcaagcaaacatgatcaacgaacaatcgaacgaacgaacaatcgaacgaaattatgcactaaaactcaattttggcttgaacattcctcaaaaacgtgagttatgttgcaccaataatacataatcataatttcaatcaatcaaggcttttggtttttgtttatcaatatatactgaagttgttgtgttgttgatttttgattttgggttgttactttttattggatggtttaccttgagaattaggttgctttttgtcaagccatctttgtcttttctgttcattctccctctgcgatcagcactttttttctgtagattctgcagaatctaaaaaccatatatacacaggtattttaggccctgattcagctaagttgaatttttgcattgtatttgtaatttgtttattttatttttgttttgtttgttgttcttaaactgattgtcaaaagcatcattagttgttagtcgcatttagcagaatacttttcttatcatcgcttaagttgagcgcatcaaaaacaaaataaacataaatcataatatacggtggtttccaattttaggctatcttttacaagggattacaggagctgtacttgtacgtatctcagggggtgtggcatgggaatcttgggaagtggatgggagtttcggtttttggacgtagatattattatataagaattgcggaaatgccttcaaagaagatcaaagagttgtacaaagtgcaatgaagaatatcgatttgagtgcttcaaagtcggcaagaaatgaataggaaatcgtaaatcgtatacagaatatcagaacaacagaagcgataaatcgtagactcaactgaagaaatgtgaaagaaagcaaaggaatcttcccgcggcacaaggaacaagttctcaagcttagcgagcgcgtcagatggtttgagaaaaacccaaaaaaaaaaaaaaaaatcagagagatatatattttcgattcgatctgagtgtgttacgaatagaacatgtgggtgtgtggtgggtgtgatatataggtatgttcttgcagttatcggcctgggggattattctggatctggtcgggtggacccgaagcgcagcaggcgcacaacacgaaacaaacatcggggtcacacattctgtataatgtacaaactgaattggcttatggtacagcgattgtctggttctatgtttgattggctttatagacacacataggttggagggaggtatatcatattttggtaaacaaaacgattgataatcgaacgcaaaggatttaaacgtttaacggaaatcatagacacagagcttccagataataactcaaagaaaatacatagtttgaacatttctgcgcgcgccatccacaatttggtagttattttttttttttttaatgccacacacatgtacgcacacatgtaacaaagaaaagtgagcacttctgggaatatattactcccctgatctctgaccactgtgctaagcctaactgcagttgcctacatatatcctagatcctcgaatctgtttttgtggtgtggagtgaacgagtagtatgctgatcttacggtcgagaatttggagcaaactgaacggaaatcggaactaaagaaaggtcgctcagggaccaacgatccctggggtaaaaccgataaagtggtgacgttaacaaatatatacacagaaaaaaaaagttgtgaaaagaaatttttcaatgcaatttgtaggggtttataacaatagttcgatatgaactattgtttttagccccaaaatattcaagtgaataagcttttgttaatctgattagttgaaattataggcacggcattaaaagcgtgaaagtaatatatgcaaatagggtatatctcgaatatcactatattttctgtgtatatattgtacaaatgtgtcgtaaaactgaaaaccagggggtagttacttctttatgcaaactgaagatgaaacggtaacgaaacgaaacgaaactaaaggactgagcgttgccaaaatgagccggatgtactcacatagacctcctcccattgggacacgtagcgcacgaggcgggaaaggcggagcagtcgcaccagggataacagcttggccaggcgcaggatgcgcagggcgcgtccggcatgcaatatttgaaaagaatcagagaaatcctgcaatttcataatcttaaattaaaatgttgcgtactgtttcttaaatacattgacttacttgattgaaaattaaaaatatataatcgagcggtatcgacgaaatcaaatcgagaaaaaaccaagttcttaaatagtgtttagctataagctttggatccaatattacttgttcagcgttgtcttgttgcataattcctgaaatcagacattcgggcaaaagtttttcggttaagcaggggcacagaaatcggggacattggtgatattgggtggttacttagttagttaattagttagttagttggcttggttgagggtgcattacctgttctaaaattgactacaatatctattaaaaaaatagtatcacttaggcagttgaaggcaatccatcgtgtgctcagatcatcgttgaagaatgatattgcgactggcaggataataagatttgctactaataataaaagcatgcaaaggtcccagtaaaacctgtatcgaaatataagatatcattggattagtagagctcatatcccgggatctctcagtattgatagtgggaactcacctgaatgaactgcacgggtgtatgacccagtgcccggaagttttctgacgtatgcgctccttgaccagcgcctttcggctgccaaacagtttcatggccagtcggttgtccgtcggctggaaccatgattgcaattgactttttaggaaattcgcagagactttttccgacacgatcggtatgttgggcatgggctcctctttcggagtgccgtacaacgacacgtcatcaaagtgtacctgcatcgaaggatcagagtggagagtcattagtcgtgcgctgttccaaaccaattgcctggctggcagtcaaggtcaaatgataatgtgggttttgctcggtggggggttagtgtctgtctgtcctggtctagttgtataaataaaacctttgtccttgccatttcggttccttggtcgcatattagcagggcttcatcatcgaaagcggttaccagcgaatcggtgcaggtgttctcgaacgaaatgcgcaggtcgttgtcgttcacattcagcaccgagcaataggagcagcgcaccgattcctcactatccccgctcagcagtctgaaatggcattggcaagaacgggatcagtaaacacggaagtgttgccatcgaaaaaaaaaaacgttacacacgactcaatgccacaaggctgttgtgcccaaaatgaaagtgaaactacatcgaataatgtagtttctgtcaaggtgggcgggatggcgcgatgtcggtaaacgcaccgttttttttttttttcttacgaagggtattacagtttacggaggcatgttaagtaacaatatgtgtgggctattttcaaatgaattgacacaaagtaggccattatgtttacaatcttgttaagtttaaagtaaaaacgtaaatcatatgtaattgttagcaatgatattgcaataattagtatttcatttggtcacaatttcaatgaattcaatttatcgtaggtagataatagtttcatttatgattcgagtaaatttggaatcttttacaacttaaactcgatactatacactacataaggtttttgcacatgttgaaagggtattgcgaaattcgaatttggaaactagctagtttttcttgacacttttgtttacttttaattgcggcacacgcacaatgcaggctgaatcagagatacggggcagctgccctcaccttgcccacaaaactagatggtgattgtcaaggttttccggggcggcagccagtgaaactggaatctggtttccccagccccttcttaagtttttcgtattcgcgttttttttttttttttggagcagcaaacactgaaggcaccaactaaaggcaaaaaaaaaacactgaacgacaaatcgcgtggcacggatatggatatggatattattcacgttcacggcggacccccattgttaaagcccggagagatggagacgcgtgctcgcggttacgttggtttccaattcagtttcagtttcagtttggatacgagcatgggcatgggcatgggtatatgggtatatgggtatgggttttcgcgtcacggttagacgtactgatattttcgtacattgataatacttttttcgtaattgtgtctgtgcttctattattattataaacagcgctctcttttcgcctcttcacactcaattgagtgtactttgaaattggaaagtttcgttttaattaagcctgttgaagctgatttaatttaatcttggcattagcctaatgaatttattagtgattgctattgttaaccgccgtcgactattgcattacacaaatcaaatgaaatcaaatcactttgctacaatctacatttcataattgtggtttcgaattcatcgcacttcactggcgcacttggaattttcgttgatttttgtttgatgttttgcattcgaaactattgggtttgtttccctagcaacttggaaaaacgtgctgaagcagatgtttttccgccgttttgatgcagattacacaaacgactcacaaagtgcggctgccgagaaacggagaatcgtagaagtctggaagcgtgctatatagctacgtatgtatatagagtagaacccggcacttggagtgattacagcggcaaactttttgcgactagcgaccgccggccgagttgccgctcgcaaaccgcctggaaatcgaaatcgccggcaaacactccgaaaaacgagaccagatcgtggccagttcggaatggaatgcttcgtatcgtatggtatcgtatcgcatcgtattctattggatcagatcggatgggggatctcgtgcgtcctcgagcagcgaaagatggaatggggggtttgcttactattctttatttttactttccgtactgactggttggttgagcgatattcttacctcgaatatcaattggtacaggaattgcagttcgcttccgaaattggctggcaattgcctaattaaataattgagatattgacaccgtgcacttgtcgccgggtttttttttccgtttctttgtatctcaatgttttctatcttttcctgtcttttttcttcgctattatggcaactagttaatttgctatttgccagacttttattaagctactgctgctgatgggtgatgctgatgctgcggcgacttgataacctgttctgaaccccgctgccgttgcacaataaataaataacgaatttgtgctgccttttaattgatttcgcgacgatcgacgacgcaaattatggctgcttgtaattccctggaccgggctgtcttcacaaaaattgatgccaataaaagcaaaagaccatacagtaaaatacagtacgatacagtacagcaaaactatccgaaaagtgagcgaacagcacatggaacataaacataaacagtgatgggcaaatatacatacatatgtctggattttatgcaaatttatgcggttaacgcgttcgattcacgcgaagattagattggatatcagtggtcaggaaaggaggaagctatatattgtcggtttgggtctcgttcgcaatttgtgatcttgagtggaggcgacaaattgtgcacttatgttattcacacggaccgattgaaacattgtttacttgacaaacattgtttactcgcaatcaggctgataatcgagctcgattcaattacttatacgaaatcacgcacaatgacaaacgtttgtttgggtaatccagtggactccttattaataaaaatgctcaaggttttggaaaaatatctaaatatttgtaaacttctatttggtttatagagtgcggtttttggtttaacaaccaaagcacgtaaattcattttagaacgcgttcatacatatgttctttccgaacgtaaaaagtttaatattacttttttttaactttagcactaggcacacaccgactgtagactgtgtagaacagaacccttgggattattggtatttccgagctgacgctccaactttcgatccgctcaaaatgtggagttcactgctcgacgggcattagaagtttattgcgcgttccgaggcgaaaggcaggtcggcggagtgagattccctcggtctgcgacgacggaattatgcaaatgcccggcgataagcggagcggagaccaaggcactcaaaaaaaccggtagtagtaggcgatcaggcgctttgaatgcgcgtaatttccacttgtaagccggggtaatgtcttgagtttcgcgctctcttttcgggggaatccgccgaactgagaaacaagtcgtcgtggtctctggaatccccttttctttcagttttttacaaaagttttgttgtttctctttttaaagtacactgtgattccattgaaagaactttttccactaggaggtaattggtaaaatgatattgattatacatcacagtgtttttgcatttcacgattatacaacaaaatatttgactaagcgaatggccttggcctttggcaatattaaatacttcaattaaatgtgcactgttattgttatgactaattccactgaagtatctgagagataagctaagagatggtatctaaaacatatggaacgaaactataggaccaaacacaatgttattatgccatattaaaaacgtagaatattaacattgtagtaaatataaatagaaattcagaagaatctcatgtacagtactcaccgatcgccgagcttgcccttgtgccggcgaatgtggcgccggttgaagctgttggtgcacgacgtggacgtgggccttgccggataaggacacggatggtggctcccgaagctgtgcagctgcagcgacgccttgagattggccggcgctgtggccgaggaggcgtggtgcgcgtaatgatacggataggagtacggatgcggatacgatacgccggcactggctacggtgatggtggactcgccgaccggttcgtggccctcgttggcctccgaggagccctcctgctgcgatccgttgctggaggagtggtgcgtgtagtccgtgggcgcgctcagctggcgattgaactcggccttgcggcgcgtgaggtccgtgaggcagtacttgttcaggtgaccgttgctgctgaccgaacttttgggcgaggcggccgcgtagtgactgtgtccgggtggtcctgatcctgatcccgatccagatcccgatcctgctcccgatccttgggcgtgggcgttcagcttgtggcatgagttgctgctggcgctgagcaaattgcagttcttgctgccgcttgccgagctgctgatcttggccgccagcgagtgcggcaccggcggactctttcccgtcgccggaatggtgtggctgctcccgcttccactctcgctcctcaccgacgcccgatggccgggcagcgtctgccggctctgcccctgactctgactctgtcccttgcccttcagcgatccgtttagtaacaactgctgctggcgggcagcaaccgccgacaaggcgggcaactgcggcgccttggtgcacgtggaggacgaactggctggcgccgaggaagcctgcggatgcgtggtgttgatggaactcgacgtggaggccacttgcggctgcagcgagtgcttcttctccaccagatacaagttcaggtacttgtcgcccggatgcaacgagttatccgacaccgcgttcgacttggagataatctggcccttcttcttggcggtgcgtgtcttgagggagagattccgcagcttcttggactgctccttgatcttgttggtgcgcaggaacgatggactgttggcgatgcacttgaagatgtacgtctcgttgaccagctgctgcttatcacttccgctgtagtcgtactcgctgcttagattgagattgaggttggtcaggtggcgacgctcccgttctcggtctctatccctatccctatcccgatcccgatccctttccggatccggttctgggtctggctccgtctgcgccaattgctggtcactgtagtggctcttgagcagcgaagcggctccttcagcggcagctgcactcaagctgcgtgaatactcgtgacaggcatcgtagagcgccgactggccaccagtgctgctcacgctctgggtgccacagctcaccggactgtggctgctgtcaaggatgcgcagtccgctcctgctgtccgatgagttctgcttggatatgccacttgtcgatagtcgactgctgctgctgcggtgccgttgctgttgctgttgcaggtgctgctgctgctgttgctgttgctgcagatgtggctgctgtggatgctgctgctggtcatcgcccgctcgcagcagcgagacgctgtccggcgccgccgatgccgccggctggccgttgctgagactcaccagagactggcgcaccaagtgctggtgcgagtgcgagtgccgctgctgttgctgctgctggttgtccgggcacaagttgtcgcggctggcactgctggcggaatcatcacgggcggcccaaggagccgcatgtggagtggggggtggcggaaagaaagaggagacttcaatgagtaccgtgttcgatggcagaataaaaatggccagcgtcgctggcaaacactcaaatttatctatttcaaattggcaggcaagcattggagggagacgaaacgcaggtttcgtcggccagagggccacgctaaagtgagcaggaaacagtgtgtgcgagtgtggaaaaccgcgagacaaacaaagaaaattcttaattattataaatattgattgtgcaacatgtgagcggtgaggggcggtagtggtgggggaaggtttgtatcgcattcccggcttctatgtgagttcaccgcacagaggacactggatatactgaaccactaaaagtctgagcattaatgataggatatagtatggacgttattcgctaattattgttgacttcagcggtctcgtgacttcaagatttttgctgtataaagtgtgactcaacctgatcatcattactgtcaaatggacttaagttgagctaacgactacagaaagatattaggtaaataatgacgaaagtttattattgattttatatttttaattgtctactttgcatctcgatgctcttcatattttacaaaatatttaaaataagctgttttttttaacatccttttcaatgtttgttctttaattgttcaaatgtgacatcttatttgttcagaatgctttcccttatatcgagtgcccaatgtgaccgcgatgtgtgatacaatttatagagacatctatatacaatggttgacatgctcatctggtttctgatcgcgcgaaaaattcaactaaattaatgtatggcggcacgcaggccaagcactgatagagccacagatacacaagcggtaacaaacaactacagatagagatagagatacaaatagggatacagatacagatacggatacaattacagatgcagaaacacaccgattcgatggagatatatggctggaagcgcgtgccccaatggcgctgaaagcattccgcacggtgggcggcggaagtgccctaaatcaaatggccaaatggccgagataagataaggctgcgccagacggacatggctgataagggagcgtgggagcacagcggcgcacagtggtgcatagtggtgctccatgggaagctgtatcgagtgtggcccacttatatggaaatgagctctacctgtgcggccaagcccactgtgccttgggcaatcaatgctacgaaacgtgaggcaaactattgttgatatagctaaacaccggcgcaggcaggcagggggaggggcacgttttcaaacaaaggtaaacatttgttggggaaggaggaggggatgccctattctcggtgtgcgtgcatcgaacttttccgattccgatgccggatgccaagctcgagagttgagcgcgaaaaatggggcgggaaattggtgcagagcaaatagcattttccagccccggaatcgagtcgaatcaatttcggtcaattaggcaaaggctggctgcctcacgccagaggcgcaattatcccaattctgattcgaattcgaatgggatttgtgcaaatacaagtaaatatgtcaaatatttgcacgctaatgctcagccgatgagtgtgcactttgcagttatcgaacgagatgcccagatacaatcgcacatccgccaccgagtggcggcctcttgccaatctcggacctaatctggccgaaagtcacttttgagaaggcaatggcaatggcaaagccaaatcaaagcgaaagcatcgagtgccccggggaataccagctcttcggcttcctgtctgatggctttttcatcttggcctcgagtatttgccacctgtcaagtgctgcagtcaaatgtggcccttgccccaatccaccggctaagttgggctcaatgagtgagaaatctcacttaagttatttattacaagtaaatgtatatattcagtcctaaccttaagctcctactaaatttaataatcattgctataaatatttatagagacctctgctatgccaagaaaaaaattgaatgtaaaatgttttgttgctatgccgcatctaaggcatctccacatacgtattattctatttctctcagtgtaaccttctggcgtggcctgcgtcc

SEQ ID NO: 18599 - DNA, 3924 bp, DROSOPHILA
atggagcaccactatgcaccactacttttagtggttcagtatatccagtgtcctctgtgcgataaatttgagtgtttgccagcgacgctggccatttttattctgccatcgaacacggtactcattgaagtctcctctttctttccgccaccccccactccacatgcggctccttgggccgcccgtgatgattccgccagcagtgccagccgcgacaacttgtgcccggacaaccagcagcagcaacagcagcggcactcgcactcgcaccagcacttggtgcgccagtctctggtgagtctcagcaacggccagccggcggcatcggcggcgccggacagcgtctcgctgctgcgagcgggcgatgaccagcagcagcatccacagcagccacatctgcagcaacagcaacagcagcagcagcacctgcaacagcaacagcaacggcaccgcagcagcagcagtcgactatcgacaagtggcatatccaagcagaactcatcggacagcaggagcggactgcgcatccttgacagcagccacagtccggtgagctgtggcacccagagcgtgagcagcactggtggccagtcggcgctctacgatgcctgtcacgagtattcacgcagcttgagtgcagctgccgctgaaggagccgcttcgctgctcaagagccactacagtgaccagcaattggcgcagacggagccagacccagaaccggatccggaaagggatcgggatcgggatagggatagggatagagaccgagaacgggagcgtcgccacctgaccaacctcaatctcaatctaagcagcgagtacgactacagcggaagtgataagcagcagctggtcaacgagacgtacatcttcaagtgcatcgccaacagtccatcgttcctgcgcaccaacaagatcaaggagcagtccaagaagctgcggaatctctccctcaagacacgcaccgccaagaagaagggccagattatctccaagtcgaacgcggtgtcggataactcgttgcatccgggcgacaagtacctgaacttgtatctggtggagaagaagcactcgctgcagccgcaagtggcctccacgtcgagttccatcaacaccacgcatccgcaggcttcctcggcgccagccagttcgtcctccacgtgcaccaaggcgccgcagttgcccgccttgtcggcggttgctgcccgccagcagcagttgttactaaacggatcgctgaagggcaagggacagagtcagagtcaggggcagagccggcagacgctgcccggccatcgggcgtcggtgaggagcgagagtggaagcgggagcagccacaccattccggcgacgggaaagagtccgccggtgccgcactcgctggcggccaagatcagcagctcggcaagcggcagcaagaactgcaatttgctcagcgccagcagcaactcatgccacaagctgaacgcccacgcccaaggatcgggagcaggatcgggatctggatcgggatcaggatcaggaccacccggacacagtcactacgcggccgcctcgcccaaaagttcggtcagcagcaacggtcacctgaacaagtactgcctcacggacctcacgcgccgcaaggccgagttcaatcgccagctgagcgcgcccacggactacacgcaccactcctccagcaacggatcgcagcaggagggctcctcggaggccaacgagggccacgaaccggtcggcgagtccaccatcaccgtagccagtgccggcgtatcgtatccgcatccgtactcctatccgtatcattacgcgcaccacgcctcctcggccacagcgccggccaatctcaaggcgtcgctgcagctgcacagcttcgggagccaccatccgtgtccttatccggcaaggcccacgtccacgtcgtgcaccaacagcttcaaccggcgccacattcgccggcacaagggcaagctcggcgatcgactgctgagcggggatagtgaggaatcggtgcgctgctcctattgctcggtgctgaatgtgaacgacaacgacctgcgcatttcgttcgagaacacctgcaccgattcgctggtaaccgctttcgatgatgaagccctgctaatatgcgaccaaggaaccgaaatggcaaggacaaaggtacactttgatgacgtgtcgttgtacggcactccgaaagaggagcccatgcccaacataccgatcgtgtcggaaaaagtctctgcgaatttcctaaaaagtcaattgcaatcatggttccagccgacggacaaccgactggccatgaaactgtttggcagccgaaaggcgctggtcaaggagcgcatacgtcagaaaacttccgggcactgggtcatacacccgtgcagttcattcaggttttactgggacctttgcatgcttttattattagtagcaaatcttattatcctgccagtcgcaatatcattcttcaacgatgatctgagcacacgatggattgccttcaactgcctaagtgatactatttttttaatagatattgtagtcaattttagaacaggaattatgcaacaagacaacgctgaacaaattatgaaattgcaggatttctctgattcttttcaaatattgcatgccggacgcgccctgcgcatcctgcgcctggccaagctgttatccctggtgcgactgctccgcctttcccgcctcgtgcgctacgtgtcccaatgggaggaggtctatttcctcaatatggcctcggtcttcatgaggatcttcaatttaatttgcatgatgctcctgatcggccattggagcggttgcttgcagttcttagtgccaatgttgcagggttttccatccaactcctgggtctccatcaacgagttgcaggaatcgtactggctggagcagtattcgtgggcattgttcaaggccatgtcgcacatgctctgcataggctacggcagattcccgccacaatcactgacagacatgtggctgacgatgctatcgatgatatccggggccacctgttacgcattgttcctcggtcacgcgaccaatctcatccagagcttggactccagccggcgccagtatcgcgagaaggtcaaacaggtggaggagtacatggcctaccgcaagctgccacgcgacatgcggcagcgcatcacggaatatttcgagcatcggtaccagggtaaattcttcgatgaagagttgatacttggcgagttgagcgaaaaactgcgcgaggatgtcatcaactacaactgcagatccctcgtggcgtcagtgcctttttttgctaatgccgattcgaatttcgtttccgacgtagttaccaaactgaaatacgaagttttccaaccaggtgatattatcataaaggagggtacgatcggtactaagatgtacttcatacaggagggcgtggtggacattgtcatggccaacggcgaggttgccacctcactttcggatgggtcttatttcggtgagatctgtctgctgaccaatgcgcgtcgtgtggccagcgtgcgagccgaaacctattgcaatctattctcgttgagcgtggatcatttcaattgcgttctggatcagtatccgctgatgcgcaagaccatggagactgtggccgccgagcggttaaacaagatcggcaagaatccaaacataatgcatcagaaggacgagcagctgagcaatccggagtcgaacacgattacggctgtggttaatgcactggctgccgaggcggatgactgcaaagatgatgacatggatctcaaggagaatttactgcatgggtcagagtcgagcattgctgagccggtgcagacgatacgtgagggtctcccgaggccacggagcggggagttccgggccttgttcgagggtaacactccatga

SEQ ID NO: 18600 - protein, 1307 aa, DROSOPHILA
MEHHYAPLLLVVQYIQCPLCDKFECLPATLAIFILPSNTVLIEVSSFFPPPPTPHAAPWAARDDSASSASRDNLCPDNQQQQQQRHSHSHQHLVRQSLVSLSNGQPAASAAPDSVSLLRAGDDQQQHPQQPHLQQQQQQQQHLQQQQQRHRSSSSRLSTSGISKQNSSDSRSGLRILDSSHSPVSCGTQSVSSTGGQSALYDACHEYSRSLSAAAAEGAASLLKSHYSDQQLAQTEPDPEPDPERDRDRDRDRDRDRERERRHLTNLNLNLSSEYDYSGSDKQQLVNETYIFKCIANSPSFLRTNKIKEQSKKLRNLSLKTRTAKKKGQIISKSNAVSDNSLHPGDKYLNLYLVEKKHSLQPQVASTSSSINTTHPQASSAPASSSSTCTKAPQLPALSAVAARQQQLLLNGSLKGKGQSQSQGQSRQTLPGHRASVRSESGSGSSHTIPATGKSPPVPHSLAAKISSSASGSKNCNLLSASSNSCHKLNAHAQGSGAGSGSGSGSGSGPPGHSHYAAASPKSSVSSNGHLNKYCLTDLTRRKAEFNRQLSAPTDYTHHSSSNGSQQEGSSEANEGHEPVGESTITVASAGVSYPHPYSYPYHYAHHASSATAPANLKASLQLHSFGSHHPCPYPARPTSTSCTNSFNRRHIRRHKGKLGDRLLSGDSEESVRCSYCSVLNVNDNDLRISFENTCTDSLVTAFDDEALLICDQGTEMARTKVHFDDVSLYGTPKEEPMPNIPIVSEKVSANFLKSQLQSWFQPTDNRLAMKLFGSRKALVKERIRQKTSGHWVIHPCSSFRFYWDLCMLLLLVANLIILPVAISFFNDDLSTRWIAFNCLSDTIFLIDIVVNFRTGIMQQDNAEQIMKLQDFSDSFQILHAGRALRILRLAKLLSLVRLLRLSRLVRYVSQWEEVYFLNMASVFMRIFNLICMMLLIGHWSGCLQFLVPMLQGFPSNSWVSINELQESYWLEQYSWALFKAMSHMLCIGYGRFPPQSLTDMWLTMLSMISGATCYALFLGHATNLIQSLDSSRRQYREKVKQVEEYMAYRKLPRDMRQRITEYFEHRYQGKFFDEELILGELSEKLREDVINYNCRSLVASVPFFANADSNFVSDVVTKLKYEVFQPGDIIIKEGTIGTKMYFIQEGVVDIVMANGEVATSLSDGSYFGEICLLTNARRVASVRAETYCNLFSLSVDHFNCVLDQYPLMRKTMETVAAERLNKIGKNPNIMHQKDEQLSNPESNTITAVVNALAAEADDCKDDDMDLKENLLHGSESSIAEPVQTIREGLPRPRSGEFRALFEGNTP

SEQ ID NO: 18601 - DNA, 4036 bp, DROSOPHILA
ttatccaaggtctcgcactgtacgtttgtaaattccactagggaataaacctaaaagaagcttttaaaatatgacatttcagttataataattcgttacctctgtgagataataaatacaaatcaactgaaaagcgacgcacaatttcagcttgattgccattatttccttttagttatacacagtacaaaggccttcgattctttttaaaataataatacttttgacttgctttcttgtttcctttttaaggtataaacttaactattcactttagtgattcgcttatttggtatatgtttcttgcgcacttttttaaatagataaattgggaaccttttttataagtatggctgtgcaagacgactgcgggaaaacagatcttgctcatggtttaaatattgataaatcgaataaaaccatttaaaattagagcagttaaaaaccatgaatttaatgagatactattcaaaatcgattggttttatcgagaaagaaactgtcattaaagttttccatgtgtttcaattgtaattatttaagtatgccacgaaaatattgtggatgaacaataatttgtgtttattattatgaatacagctggcacgaaataatacccattcttataaaatatgtatatattttttggtaggaaacaagtttttatattgttagtaacaagtacaagtaagttccacgcccacacttttaaagtattgtacgttttttctgattttttataaacgtaatatgaatatggattaatatgatcaggtggcgacacctagcggaaacagtgctgcccatcataagaacggaaaaggcgccattttcaaatatctcattgataatatttttcattaatacaagtttaacattctttatcttctgaaaatattgatgcatatcttaagaacggatacatttgatacaaaaggatggtaacaaacgagatgttatcactttggacatagtttccaatttcgtctgtagtcctaatttaatgagtaactttgcaggatgcttggtggcgtctcttatcacgtcgctggcattcaacgctgcagtaggacgcagtaaagcagcagttaaaaacggcctcatccaggcaatggtagcaccattgcttccttttcacttcggccagcttcctttgcgtggccgagagctctcttcggcaatttagcagatcgttatgcgcctgcagtatttcggcggttagactatcatatgctacggagtcaggaatcccacgaatgggcaccggcgatgaggtattcgaagtggtgttattaagccgtcgattctttgcagcgccgggagtggctggagtcggcgggcgtcctcgtttgccggacgcactcgtttccgttgactccgtgcagtgggatagagccaccttaatgagattctcggcaacggtgggatctgcatggaagccgaatagcgaggcggaatagtgggacaacatcatgtgacactgcagttcttttatcgcagcgctcagagctcgggagttccgtggtttgatatgcgactgaatgtccgactcgatgggtgtaatatcacgttctgagatgagggcccgggaatgagtgccaccgaagaagcggacgtcgtacttgatgggctgacgcttggagacgctcatcacctggtaaagaaattatatttatgtgtatatattacatagtaatgataatatcgtacgtacctttgcaggccacggtggtgagcccacctgcttggcaaataccaactcgtgccgctgaagacatggcttggcgaaccagagatccgacaggctggcctcgttggaatacctatagcagtcggggcaacgacggatttcgcgaatgtcgtgcgtcacatctctcatcagccacttggtggcattgtactcaacgctcttttgcccaaagaacacggccatgttgtgctgcagatcgagcagatccattaggaattctgttaggtacgtatacttcgccgccgctatgttgcgctcgatgtcgcccagacccaaaatctttgtcttgaagagtagccgcttaaccagcgccttgtcgcgttcgttccaatgcttggccatgtacttggccacatccatggagatccaggagtgatgctggtcccaggagtacttcaataggcagcccagctcttgcttgtcgagttgcggtgggttgtggagagcggccagggcgagcaaacggcagtgggtgcagcgctccagatcgcttccctcatcgctatccaaactgctttgtagttcgtccttgatcctgggcagctttcgctggcgcgcgcccttttgttcgcacacaaagaagacgtcgtcgtcccactcgatgttctcgtgcttcaggaaatccgtagtggctagcaaagtctgattgatgttgctattatgatcgagcaggggcgttggcgtttggggagtctccaagttctgagtgttattcaggggctgattgtccaattcgttgacgggaaactggtaaggttggcccttgtccgagggcactgaataattgggcttctccgggtcctgtcgctggcaattctcgtggaaggagcgatggcaggatatgcatttcttaacggctccgggcaaatggcactcgaagcagaacggatcaattggtgagctgggcagccggcttactttttgacaaaaggcgagggccagacgcttggaccgtccgccgcctgctctggccaccagtatgcctcgctccgtggcatttttcaccgataaactggctgcttctgaagttggatttttagatgtttgagacaaacgttatggattggacattcaatggttcacttacctgcactcattaaattgagcagggaacgctctaggactgtcgccggctgcccaacgccctttttcagcttgtccatccaaatacggatggctgaaggtggaatatcgctggccatttcatttgcgttttaaagttttcttgcaaatgaaatcaatttttggctaactggaagcgttgccggactgctggattgggtgaactcgcgttgccaactataggcaacaggagctgccacgtaggggtaactttaaatttacatacaaatttatggatttttaaatgactctacttaaaagtaagtttgtaattatatgcagcattccatttttaaacatttgtgaaacaaagtatctgagtttatttcagtaacaacttgctatgattcgtaataatggtattcctcgatggcattttcacacggatcagcgacggtaacactgttgaaaacaaaaaatatacacaacttatacaatccgagacaaaaacggggcaaaggaggcgtgtctagaagagcggaggacgcggaggtgaccccaagtcatggccatgctgacgcgattgaccagcagcggcaccaccacggtggccggagcacccggttcacccaagggcctgcagcgtttccaaaactacatctcggccttcttgtggccgggaacgcagcggcaacgtcggaagtccacacatctcgatcccatggactgtttcaccaacgacttggtgaccagaaagacccaaaagtgggaggagctgcgcgatagcctgataaagaggccatcgtccggaaatctggaggcggacgccaattgcaatgtgggaacgcagcgaaaggctggtagtaccagctttagccagaacgtgggtcttatgtccaagggcatgatgagtgatctgaaggcgctgcgctccccccaactgggactggatatcagatccctgtcgcaggcgcagctggacaacctgctgatggccacgttggagatcaagaacaagctggactttctctacctgatacgtcagtgcatccgctgcaacctgttgccctccaacgaggtcttcgtgtcctgtctaaagtatttgagcgcgcagcgcaagctccagcagttggaggcactggcggagacctgtcggcagctggagcacccgttctcacagacctacgcggatctggcgcccttccgcgccatcgccctgtggaa

SEQ ID NO: 18602 - DNA, 1911 bp, DROSOPHILA
ttcacccaatccagcagtccggcaacgcttccagttagccaaaaattgatttcatttgcaagaaaactttaaaacgcaaatgaaatggccagcgatattccaccttcagccatccgtatttggatggacaagctgaaaaagggcgttgggcagccggcgacagtcctagagcgttccctgctcaatttaatgagtgcagaagcagccagtttatcggtgaaaaatgccacggagcgaggcatactggtggccagagcaggcggcggacggtccaagcgtctggccctcgccttttgtcaaaaagtaagccggctgcccagctcaccaattgatccgttctgcttcgagtgccatttgcccggagccgttaagaaatgcatatcctgccatcgctccttccacgagaattgccagcgacaggacccggagaagcccaattattcagtgccctcggacaagggccaaccttaccagtttcccgtcaacgaattggacaatcagcccctgaataacactcagaacttggagactccccaaacgccaacgcccctgctcgatcataatagcaacatcaatcagactttgctagccactacggatttcctgaagcacgagaacatcgagtgggacgacgacgtcttctttgtgtgcgaacaaaagggcgcgcgccagcgaaagctgcccaggatcaaggacgaactacaaagcagtttggatagcgatgagggaagcgatctggagcgctgcacccactgccgtttgctcgccctggccgctctccacaacccaccgcaactcgacaagcaagagctgggctgcctattgaagtactcctgggaccagcatcactcctggatctccatggatgtggccaagtacatggccaagcattggaacgaacgcgacaaggcgctggttaagcggctactcttcaagacaaagattttgggtctgggcgacatcgagcgcaacatagcggcggcgaagtatacgtacctaacagaattcctaatggatctgctcgatctgcagcacaacatggccgtgttctttgggcaaaagagcgttgagtacaatgccaccaagtggctgatgagagatgtgacgcacgacattcgcgaaatccgtcgttgccccgactgctataggtattccaacgaggccagcctgtcggatctctggttcgccaagccatgtcttcagcggcacgagttggtatttgccaagcaggtgggctcaccaccgtggcctgcaaaggtgatgagcgtctccaagcgtcagcccatcaagtacgacgtccgcttcttcggtggcactcattcccgggccctcatctcagaacgtgatattacacccatcgagtcggacattcagtcgcatatcaaaccacggaactcccgagctctgagcgctgcgataaaagaactgcagtgtcacatgatgttgtcccactattccgcctcgctattcggcttccatgcagatcccaccgttgccgagaatctcattaaggtggctctatcccactgcacggagtcaacggaaacgagtgcgtccggcaaacgaggacgcccgccgactccagccactcccggcgctgcaaagaatcgacggcttaataacaccacttcgaatacctcatcgccggtgcccattcgtgggattcctgactccgtagcatatgatagtctaaccgccgaaatactgcaggcgcataacgatctgctaaattgccgaagagagctctcggccacgcaaaggaagctggccgaagtgaaaaggaagcaatggtgctaccattgcctggatgaggccgtttttaactgctgctttactgcgtcctactgcagcgttgaatgccagcgacgtgataagagacgccaccaagcatcctgcaaagttactcattaa

SEQ ID NO: 18603 - protein, 608 aa, DROSOPHILA
MASDIPPSAIRIWMDKLKKGVGQPATVLERSLLNLMSAEAASLSVKNATERGILVARAGGGRSKRLALAFCQKVSRLPSSPIDPFCFECHLPGAVKKCISCHRSFHENCQRQDPEKPNYSVPSDKGQPYQFPVNELDNQPLNNTQNLETPQTPTPLLDHNSNINQTLLATTDFLKHENIEWDDDVFFVCEQKGARQRKLPRIKDELQSSLDSDEGSDLERCTHCRLLALAALHNPPQLDKQELGCLLKYSWDQHHSWISMDVAKYMAKHWNERDKALVKRLLFKTKILGLGDIERNIAAAKYTYLTEFLMDLLDLQHNMAVFFGQKSVEYNATKWLMRDVTHDIREIRRCPDCYRYSNEASLSDLWFAKPCLQRHELVFAKQVGSPPWPAKVMSVSKRQPIKYDVRFFGGTHSRALISERDITPIESDIQSHIKPRNSRALSAAIKELQCHMMLSHYSASLFGFHADPTVAENLIKVALSHCTESTETSASGKRGRPPTPATPGAAKNRRLNNTTSNTSSPVPIRGIPDSVAYDSLTAEILQAHNDLLNCRRELSATQRKLAEVKRKQWCYHCLDEAVFNCCFTASYCSVECQRRDKRRHQASCKVTH

SEQ ID NO: 18604 - DNA, 4177 bp, DROSOPHILA
tggtgatgctgggcagtgtcctttcaactcggttgcaatatcacgtggtgctttattaatgcccttctctttcagcttcttggacaatcccatggcattgttgcactgatagtcgccgaatttcgcagacgtactattaactggtgcaattataacaggcgtatctctgaattccgggaaagctgatgcaatcgcctggcgaaagacgctttccaggtgttcggtgatcgaagaggattccttgggcttcgaaacgtcgccgccggcggcagttgattcctcagcaatggactaacagggaaataaaagacatgaaattcttaagcttaaacacattgggggtcataaactcaccttctttaggataaacaggcggttcttcagcttcttattttcaatttgaagctgaacaagatcgacgtccaactgttcaccgcttttggcagtttgtattctggcggcaaggccttgggtcttcagttcctttaaagccggcatgtcatgtcaaaatgttggcgtaaagtaacagctattcgcttaccagctccctgagttttttcagctccatatttagctcggacatgtttccaaattgtgacttctgttgctccgctgattaataacaacaacacaacgatgccacatggatggcaagtagtgtgcacacgtcgcctatcgataacgataacagctggtgatgtcacgcctcacagtcacttctaggatgtcgtttttcccactggcatttaaaagattttctcatttgacagttaaactatgcaacagacaaattgtattgtgtgtgcattttaaaatcacctctaaaattgtagatgtcggtatgtatggcaggctttttatggcacatttgagagcattgcttagataaatgtcagctgtgtgcggtggaaaaatcgcatcgggttcacatagcacttatgatttttatcgatagatcgacttatcgaccacctctattatgattaattgtgattgttctttcgcttaaggtgtctcttaaaactttttatgtgtatgtgtgtttaattaatttatagattttgtcacctttgtgtaaatacctatagtctagtggggccgcaacctaaactctttgatgtgtgctacacacagtccccgaaagatacgtgcgtgaaaacttgggaaaacagatgtgtgtaacgccgctcccattaaaattaaaactgcaatgcagacggtttttttttgttttacaaatataaatagtggataaaaacatattcaccgggaacgacggacggatacatcctatttataaacaggagataaactagttttcttgcatctgtgccaccaaattgccaagtgtcgatggggaatttgtaaaagttaaaaaagaaaaaaccattatgcagcgcaatgcaaaaaaaaagtttactttattttcatcatctgatacgcattttatctgcatgttcgcttgcttggtgacaatgggactatatattcaccggtttttatataagtgagtcagctctgctagataacaaagtgcgttccgatgataaggtatccattatcataccacacacgatcatcaattaggacattccaaaatgtttaccaatataggaggtttcaacgagctggacaccgaaagagcagcaccagaaatgctgtctctgcaattattatatttatttataagttagtggctgaattcaatggacttttctttggaattatcgcaatatgatccttgttatcactttcaatgggttcaaatcgaaactgaattcttagtgcattcttatagacttgaaactaacaagttgcttctttttagcgtgcgatcgcttgcgattaatatataaaatatagttaaattgagcacagattcaatggaaagtatcagcaccacaggtcggcgacggaacaacatgcgaatcaatgccgaagacaatgcgctggatcaaattacgaaagaggtgtgtattttacatcccaaaacatagcattcaatgtaaatattaaaattgttactatcaactgcgatttgtacgtgctcggttaacacaagagaattacagccgcaaagggtcgcataattgaaactctatcaattagttgatttaaatgaaactgattcccttcttttcaggcggaagcgcgacttgctgcgcgtcgacaggcgcgcgccgaagcccgcgagattcgcatgagggagctggagcggcagcagaaagagcaggagatcaccgccgaccgggtcttcgacatgcaaaactccacggcagtgggcagcgaaactctgtcggcgcatcccgtgcgcctcgcctacggcggactgttaaacgtgacccgtgcatcagcatcccgccgcagcagtgaggactccgtggaggaggagggcagaagttttcgcgacttcaagcacgagcttaaggtgggtgctgacatcgcagccatcacttcgatgtgatttaagtggttctgctttcaggatgttgaggagcggtttcgcaaagccatgataacgaacgcccagttggacaacgatcgcgcctcgcaggcctacgaagtcaagctactgaaggacaaatgcgaaataatggaagagtcgtatgcacaactacagcgcgagttcaaggagaagatgcgtgactgcaatgccctcaaacgcaacctggatcgcgccaatctcgagcttaagctagtacaagggcagttaaacgagcgcgactcgttgatcgccgaacagggccttctaattgtagcagttgaaaatgccgatggcagcgatgccaagcgagctctagtgagtgtcgagaatgccaaggtgctggcctccgtgcagggttctttaggtgattatcccccatttgcacctggatgagatcatttaacaacagttcgagttctttgcagacgttagacttaaaaagttcagtgacgagaagcagcggctgctggcggaggtgcagaagcttcacgaacaacttgacgagtataaaagtgatggaatttccggacgccgcagtctttcgcaaggttccttcggcgatgagaatgattacgaggcccaacgtacgtgtaccatacttacttaatgccaactaaactttcagcatgtaaagtgcaccgcagtgattatcttttttataactagcagccctttttggcagcacacaataactaaccgagtcttgctcaaatttgaacgatattcaaatcgtattatttgtagtttttattatttgataacatggcttcaagcaatatatatatatatatatatcatttatatttccgatcgcattgatcggccacattctctcgcacttttgtgtatctccatatatcttcagttttttaaaacaataaattgtatataactattgcagtttggcactataggactgcaacatatttgtactatattacgagcccttcctttttcttatactatccgacaggggaaacaaacaaaatcatttcagaccataaatataagctgcaaaaggcggaacaggaaatcgccaacctacagtcgagcctagcgcgctccgaaactcaagtaatccgatacaaaagcaccgcagaagctgccgaaaaggcggaggctgagctgaagctggagcgccgcaagctgcaacgcgaggtgagtggtgggaatgccaagcgaaatgagcagtttatgatctagctaatccatttcgcagcaccgggaactcttggagaagttggaggaagctgaaacgtccaacaaccatttgttgaaacgcctcgataagttgaaaaacgcaaagagtgccattctaaaggacttatgatctaagatgggaaatgcaatctcgccaaccattgaaggatcgcacccgatgacataggaaacgcaagtacacgacatcatcaacacacaaatcaacatgctgcaattgaaatagcacttcggtagcaatttaatcggtcttagtggtagcaaatcgataatttttgaaggataatccaaaatactctaccttaaaaatatatatatatatatatttaaattaaaatataaactaactggataataattaacataaataatgtctatatgtgtatatttaaagcgcaaaatataagtaacaattcaattggttcagcattatgtgtataaaatcattctatacaaatatgcgttgacaaaatt

SEQ ID NO: 18605 - DNA, 1006 bp, DROSOPHILA
ttcgcttaaggtgtctcttaaaactttttatgtcgtgcgatcgcttgcgattaatatataaaatatagttaaattgagcacagattcaatggaaagtatcagcaccacaggtcggcgacggaacaacatgcgaatcaatgccgaagacaatgcgctggatcaaattacgaaagaggcggaagcgcgacttgctgcgcgtcgacaggcgcgcgccgaagcccgcgagattcgcatgagggagctggagcggcagcagaaagagcaggagatcaccgccgaccgggtcttcgacatgcaaaactccacggcagtgggcagcgaaactctgtcggcgcatcccgtgcgcctcgcctacggcggactgttaaacgtgacccgtgcatcagcatcccgccgcagcagtgaggactccgtggaggaggagggcagaagttttcgcgacttcaagcacgagcttaaggatgttgaggagcggtttcgcaaagccatgataacgaacgcccagttggacaacgatcgcgcctcgcaggcctacgaagtcaagctactgaaggacaaatgcgaaataatggaagagtcgtatgcacaactacagcgcgagttcaaggagaagatgcgtgactgcaatgccctcaaacgcaacctggatcgcgccaatctcgagcttaagctagtacaagggcagttaaacgagcgcgactcgttgatcgccgaacagggccttctaattgtagcagttgaaaatgccgatggcagcgatgccaagcgagctctagtgagtgtcgagaatgccaaggtgctggcctccgtgcagggttctttagacgttagacttaaaaagttcagtgacgagaagcagcggctgctggcggaggtgcagaagcttcacgaacaacttgacgagtataaaagtgatggaatttccggacgccgcagtctttcgcaaggttccttcggcgatgagaatgattacgaggcccaacccctttttggcagcacacaataa

SEQ ID NO: 18606 - protein, 305 aa, DROSOPHILA
MESISTTGRRRNNMRINAEDNALDQITKEAEARLAARRQARAEAREIRMRELERQQKEQEITADRVFDMQNSTAVGSETLSAHPVRLAYGGLLNVTRASASRRSSEDSVEEEGRSFRDFKHELKDVEERFRKAMITNAQLDNDRASQAYEVKLLKDKCEIMEESYAQLQREFKEKMRDCNALKRNLDRANLELKLVQGQLNERDSLIAEQGLLIVAVENADGSDAKRALVSVENAKVLASVQGSLDVRLKKFSDEKQRLLAEVQKLHEQLDEYKSDGISGRRSLSQGSFGDENDYEAQPLFGSTQ

SEQ ID NO: 18607 - DNA, 37091 bp, DROSOPHILA
aaagtatgcagcaatttcaacatgaaacgcttgaataatctggaagtcaaaacgtgggaacttctacgttgaaaagtaacatttttttgagtggaaatcaacttataatgcacattagtaataatttcacgctgattattataaaattatttgaaaacgaaatacgaaatcaatgagctatagctaatgattggaaattatcgataaacatttgatttgtaccacaaaacaggtgtttttgcaacacagtctttttggaataatggcggaacttgcatctagcagattgattctagtaaccgctgctattttgtgcagcttgagtttaggaagcgaatgtcggtcgaagtcccgatttatcaacatgcagtgcgaatcctacaatgagtcgtatgcagtttttgagaaatgtaaactcaatttacttggaagaggtcgtgtgggagccgacatgtatttaaagctgtttcaaacgcccgtagagaactgttgggtgagctaatattgtatcaaactatatcctattttcactttcgtttgtaatgtactcaaaaattgtcctagattaattgggccatgtaccgccgctataatggctttcagccgtttctgtacaatgtcagcaccgatctctgccagcttttgggtaacccgaatgctatatcgtttcaaggactcgttattaatgccattaagaagggttcgaatttaaatcactcgtgtccatataacgtaagttgaaaatgcacaaaaccgctgcaaagatcacttattttgtacatacatatagcacgacattattgtggataacatggaattttcagatgatttccttaagactttgcctctaccgcaaggtgtctataaaatacaacttcgttttgccacttacaaagtttggagggtacaggtggcagtgttcatagaaagaacagaataaaatgtatctaataattaataatcaaccacaacgagacttcttttcacatattctttatatatttagcaattttcttttgattacaaagtttacgttcaatacaataaaaatttcacaattcgtaaatgcctttagtgtgcatttgcgtcgtttgaaatgttttgctgattttaatgagattgttgtgcaaagcaatgttgaatacagtgtttttggtgaacaacgcataaaaaacagtaaactttcttggcaataaaaactttgaacaaatcaaaatcttttaaaaaagtttaattacaccttatgcggtaaaacaggcaatgcaatgccaccattttataatagtttagtttaaatcgtaaatgctttgctggcttagtcaagaccttgactttatagcttaagtagttttgttggattggcgacaaatcattgaatggcacgtatcaaactcatacgtatgaatggataaacaaactagaagaacactttaggggacaagtctagatagaatgattttgattgtttgattgggttacaatagattaaaagtacgttcttagggtctttactagtatgaaacttagctaagatgctgcttgcatatgaatatagaatggcatatgtatgtagacttagactatccgcactcggttgcggattaaattaagatgatgcagattgataaatatgaaatgtcgtgtgacagtttagagacagaaccgatcctgcacaatagacgctactgttcgcctaatttcttatttctctgttttctgtccccgtttttacactcttcttatcggataattaactatgcctaatttatatttattgttatgaatgtgtgtatctagacttaaaaatttatatggcggcgtcgttcgtatttacaattcttttcggtcattaatatatcgcacatttgtttaacttaagctaaacgaacctcgctggagggaaacacaattcaagtcggttcactgcatttcacaaattcgagttaaatcaataaaataaaacagaaactaaaaaacaagtaacatccactgtttgacgactaatactttcagccagccggacattattaaggcggcttcagtgttaacactcgaactcgttggccgtgattgcgcttagatccttcatgaggccctccagattggccatttcttggtttagctcctcggtagatgtgctgggggcaagtctttgaatctcatcggttgagtgcactaccgagccaccgccctgcaggcgattgggcgtggcagccgagaaagatggtttcttgtagggcgattgattttgtggacgtattgtgacggcgggagctgtagagcaaagtttgcgattagttagtctgatcttagtctgattgggctgttatatataaatatactcactatgcttggtaactggggtggctccgccagtgggtggtggccccggcacactaaagctctttagaggatggccacgcttagaactttcaatggtggacacacagccattgcctgcagctgcatttcccgcgttactgtaacatataagcagaacagcattttaatggaagaatttatgtttattcaaaacttttgtatgctactaaacaaaaaccaagactgtcctaaacaacaatgggacattgtggattcctcttggtcaccgaccgactgctgtggcccagaaagcgcagcttccgcgattgctgaatctgctgcgccaaccgggccaaccggatgtacggctggcgatcggagatggacatcacgttccacgtgtagatggccagctcggtaatggtggccgcggtgcgcatgctgtagacgcccttgtactgatggttaatcaggatctcgtccaagcgaaatttattcataaaattgaggaacggcgacggcgaggccattagaaggagctgctgctcgacacgtcgtggcagcgtttggttgtcaagcttgataaccttgctcgacggtccgtgcaccaagttgacctccacactgggatcgatccgtccccaacgagtcctcgggcacattctcgtatcttggtctttttcgcagcgtagatcaaaaactagggtaattttttagaatttctatctccaaaatatgtgtgcacttgccaatgtgagagccgaaaactaaaaaatcctactaacgcaccgcacactgtactcaccagaagttggcatcgtagccgccataaggatgctctggggtctgagccatcgagttgctttgcggttgggtgagactctgctgggagaggccagcctccatggtcatgtgagaacgattttggtggctgtactgggtgcgcgggtactgaggtcgctccatcgttccgttcattgatgtggctgttgaagaaatgagtctttaatattcagttatcttacaaagaagttgctgccacgcactcatatatcctggcacataggaccgcttgtccagagaattggtcacatgaccgggcactggcgtctccacctcgtattcactgtgcaccactgatcgtggcagggtgagggcaccactgctcgaggctccatcgctgcagacgggtgtcactgtgtgcaggcccttgtctatgtttttgagctccatttgatcatggtgtatccatagatctggtggcttgggcacgccaacattgttcttttgatagctgcaagttcataaagtttataaaaaggctgttgacgatattcttaagagagacccacctcttcttagtgtgttctggcgaagattgtggcttacgtcggcagagcaataggacgcccaagagcaccacaagtagaactacagcggtagctgctataattatatacaacagcttctcgttgtcgattcccttggctatggtgtcgggctcctgcattgtaacggctgcacttgtggtgtacgataccagagccgagaaaggagcattattagcccccttggttgttctagcctgaaccttaaagtaatacgttgtgtaaggtttcagattcggtagcatgagcatagtttcctcgccggcaaatgcttcaactgaccagtcgcgatctcttttcgtggtgtcggtggtatagtaaatattgtatccggtaatctgaccaagagtatgtttcggaggtatccactggacgatcacagtgggcggattcatctcatccaagcgcacagtaacctctcgaggcggggtgacaggaacattctgatatgtactatttaacacagacatcgaccaggaggactcccttcgtcctttgaccactttaactgcaaactcatactgcgtattgggtcgtagatcattaatcatgcagtttagatccgtggtgttgtgatagcgatagcgattggatcccgtgatgccataactaaccgtatagtggcgattatctgttacatgctgatttttgttcagcatcgtgtcaatccagtagaccacaatcgacgagctggacatggtaatggctcgcagaccgaccggaacctcaagtggagtgggtgcgtccacgggctcctcgtcgcgtgtcttaatgttgtcatatataggcggaccgtcacctttaacatttctagcccttagcgacaccacataatccatattcgattctagattcttgagtatatgatagcgctcagtctcctttagctctatggtgttctcatcgggaatgccacggccccagcccagcacgtagttgcgtatcttgatttccggatgctgtgggggaccccaatgcagggcaatgttgttggctccaggatgaatgctaatccaaattggtttgcccggaacttgggtctcgtccagatcgttttccaaggtgttagcacgattccattccgtgaagggtccggaaccgttcactgtcattgcagcgatcttcacctgatactcggcattgcggtccaagttgctcaactcaaagtaacgaatattggcaggagtactcttgacctgcggtgcatccttgaacttgcgatagcgaatcttgtagcccgtaatttggccattgcgatcttcctctgcaggcggctcccagtggacggtaatggactggtttgaaaataaatttaatatgggccgagaccttacatttggttatctacttacgctggagctggtcacctcgagagtaacattattaggaggttccgacggcgtggacgaaaacgtcttaacacgtatctccgctgaggagtcacccattccgtttcgattaaaaggcactacggaaatcacgtaatccgtgtggggacgcaactcggtaagaactgcttccaaagcagtactatcgtgatatagatcggcaccactgtcgttctgcaagatagaatagatcggaatgtgagctttatgtttatagtatttggtgtcttgtatctcacctcggaatagtacactcgatacttgagtatttctccattggttaccgtgggctcttcccatttgacgtagatctccttgtgactgcgtgcatagccttcaaagttgcgcggcggacctgcaatgttcacctccggttgggtactaacttctagcggagcagaagatgcaccgctgccgaaattggtattggcctccactcggaactgataggttctaccgggcagtagcgattgaatattaacctgctgatcgtcatgggacttggtaaccattttttgctccctaaaagggttggaaacatcaaattgattaggtattttctaaatagtgtgaatttattttattgtttttgtattcttctgtatagagatatatgtaatctacacttttttttttgggtatctactataattctattttgattctagcctttttcataaactgtaagtaattttaaacaaaaacatgtcttaaatgttgtgcttattcttatagctacatatttctgaaaataatttcgttttcacactcaaacaccttgcttaaaagcgctaaggaaatggccacaggatggaatccagacagaaagttagattcaatcgaatgcaaaatcatttccgcttcactgaggagatgaagtcattaggcaatgggctaactatgcaaacagggttaatctctgctaattgctgactaatggagcggatggcaattatgtgggtaatgcgatgatttcccgccactcacctctcgctgttgttcatcttgtagtagaccgtgtagtagactacatcgccggcattttggagtggttccacccagctgagggtcacgaatcgggacttcactatctgcgccaccagatcgcgcggctggctgggcaatcgggcctggagtccgctgtccaacggcttgccacctggatgcggaacactcggatcctgttcgggggagtctggggaagcaggggattgtttttgctgttgggatttcttgctcttggactgctgccaggagtccagtattttatgtgcgtcctcgccctgtttgtaggcctccaggagagcctccttagctggatcgtcctcgtcatagtcgtcgtcatcgtcctcgtaactcttcgattggttgtccagcggcaaagcacttcccgcgtttaggatattgaatctgcggtcgttgagcggttgctcaaatttgggaagctttccggatgggatccttagtcgagtcgtaccgctgtcattgtcgtctaggtcatcgtcctcgtccggaaagggaaaactcccgccggacttggttcgcagctgctcacccgaattgaagggtttgcgacgcttggtcagattgtcaaaggtctgaagggatttggtggagtggccttgggattttcgttttttgattttcactttgggagtgggatttgttggtggttggatggttgtgattggggtgatattaaatggaaatgaggcgtggaaaaaggaaataaaagaacaaacgaaataaacaataagttaataaattatattcgaaattaataaaattcatttcatgtggttaaatattgataatgtgtactgaaatctctcttgtgtgctcaatcaataatttattcacttcacttaagccgattgactgtttgagttgtttaaatctatttaaattatgtgtgcattcaaattgctaaatggtaagcaagtttaatactttcagaacttaaagtacaagacttaattggtaactgctacaattgttaagaacacacacaatagagatttccatattttaagatcaaataatctgagtaatttaatttatcactatacaaacaatacacacatagaagcataggaaattattttacaaaagcaggatgaatgaaaggatatttgtacaacaaagtgagacaggggaagtttgggttttcggctttgaatttcgttgggtcaatttacaggcctacaagaggcgccaattgtttaagctgcacaaatactggacaccgagctagttctactttgaatacatctccagatagtccactcacctccttgcggaacaactcgcagacgagctgcagcatgaacactgccagcggcattggtgcccacgcactggaacattccagcgtcggagttgagaagtccgaggatcttcagattgtgaccatccaccagttgcatgtagtcattgggcgttatgagatctccgttcttaagccaccttattacgggctttggctttccccagatatcgcacttcaattccggttcgtccttctcgtgggcagtggtatccttgggcgccttaatgaacttaggtggttcctgtacctgcaccgtggcctgagcatcaagagaatccaccgtattgctggcccggcactggtagttccctgaatcaatgtcctcggcactggagatttgcagtgaacccgttccaacgatggaaaagcgtgagtccaggtcgttaaaatccagatccatgccatttcgcagccacttaatctgcggctttggcactccgttggccacacagtccagggtgacggtgtcgccctctctcacggttttgggcgaaggtcccacaaggaacgatggtgccactgagttctcggcacccggatcactgggtttcttaatgttcaagttcgttttgctgcttagccgggaggaactgcccgaagtcacgttgcactgataggatccgcgatccgatggacccacttcgtcgatctccagcgctccgttgggcagcaccaccatgcgcagtttgtccaggggcagtggcaggtcatccttgagccactgtaccgaatgcttaacgccctcctgccagttggcttcgcccagcatgcaacggaagtaggccgtctgacctggcagcaggtaggtttccaggaagtcctgattcagatctggctgtcggacaatggccaccagtgcgggtcgactgagtatgctgcccacgccctcggcagtcaacaggcattggtaggctcccgtcagtccacggttctcctcaacggagctaatgtacagtgatccattcttcagctgagtgcggaacgtatcgcccacgatgaccaggtcctgcccatcaggtcctcgccaccggatgctcactgagctgggtaagttggacttgctcttgcctccacgtccaatggatgcagtgcctgcacactggagcagcaccgagtggccctcgggcaccacggcatcctggggctccaaggtgaacgaaagagctgtacaaaaaaaaaaaatgtacaaagtggttgatattaatgcactgcaaaaaataaaaatgctatatatataataaaaggcataaatgtatgcttctttaatataatttatgggattatgtatagatacgtttttttaatagacaaaattttatatagatttactgaggaagattaaatatattctttgtacacttgggaattcaaatttctttggatgatgcagtcctagaacttttatatatctatttctttgcaatcttacacaatcccttatggaacttgaatactattgtgactttttccaagtggggttggcacagtcgaatggggggtttgcgctgcggctcaagtcggacgcccccagtttaccggagtgtgcctccactcgaggaacggcagcttctgcaatctgtcaacttgtaaacatggttgaataattgaggctacaaaggccaactctctctcgaaggcatgcagcggcaaaggcaggggcagagtcggaagaaattgcaaaggggtcgccggaggcacgcaaatatttgcatttccactttgcctgggctcgacgggctggaggactaactgaatgcaccggggcaccggaggatgtaagggtggcaggacctgccaatgaataacccaacattcctgaaagaaaaatcgggtaatgcagggggcctgttgccctgatatcctcaaaggcttagatgccaaggataaaggtgatacagacagacggtcttcaagtgctgagacttttagccattaaaagcttagattattagccaaaaactggcattcaaaagttattatgcactcattgagaattttgcaatgtttaaactggattttaaacacacactttcgagctttaatcttttttagatgatttataaaatgaatgctacctgcctagacagacattttcagagtcatcactggacgaaataaattatatatgaacgataagaacaaccttaattagacatcgagtttcgacgttgagaagcgtgagttaaatgtcgctggaatgatgacttaatttacgagatttattcagctgtacaaactgaaaacgcttgcgtcatgaattacacattacatttcattgcaattcagcgtgcgaggactcaggcaggacactgtgcacttaggatccagactgcacctgctttgactgctccggactgctggactgtttcccctgcggatcagaatcacatttccatagtcccgctgaccgctcgtgaacttagccgcttttggccaggaatttcacaaaagtatgcctgccatttatttgctctgtttccgccccattcctgcctgcaattctgagccaaagttgaaacaaagttatgcgaaccctgtgcagtgggtttcggtttccatattaactcgactcaactctattagggtaaactacttaacgatcctggtgctgccaccactccactccaatcctcgacagctctgctcaccgcgttccttgtatttcacattttattcgagtatttcagactcaacgtgtggcttttatggttattgcttttggactcttggtctgatggagccgaacctcaactctttttatttacttgcacatttcacttgatgaaattctctttttcccccgttttcccttcgaattgccagcttttgtttatggccaacttttaggagctgttaagacaaacatgcaggcataaagacatgaaatggatgcgtaattgatctatataatttactgtatataccctgtattatatacccctttttaacccccgtcaactgtcaaggtgaactgaactgcatgaaatcttgaattcgagtgaattcatttcacagccagctgcagttcaactgctacctgtacttttcaacccttttgttctcacttttttttttttttaatgcaactcaatttcgagaaacagacccgcatttttggacacggggttgcaatatatttcagaaattttaatgcttattaaacaattataaagtggaaaggagaatgtgtggttctaaatcaaatggagacatctagctactattcgatttttatggcttcttcgcagcagcagggagctgaatccaattaaaaactttattgctcgaattgatttttattgtacgcctctttggcagcagataaatagagaaagggagatacaatttcgaaagtcggaggggaaaagaggctatcgctgctcccaaaaaattgtgtcaattggttttatttccctctttcgttttcgctttttttttagtgccgactttccatacatttttccatttctcgttatctattggacgcttttaattatgagtgtgggggcggggaagtgccacgccccgtgcactcacaccacaatacatgctcgaaaaaatccataattaataaattaaaccaattatatacaaaagactcgatttgaagtggcatttcattaaactgcaattgcgaagagaaattaatttgcattttgcgttggtgaacgagttcaattaattatggagttgcggatttatgtgcattaccattattataattattctgcacttgaaaatcgtcactcagtgcggctcaaacaaaagataattccacaacttttatgcaaatgcaagtttcgtgagcccttggaagcttaggaagtgcatattattatttcagggtacttttgtgtaaacctttaccttatgcatttttgccaaactgttgttggcctttgtctgctgaaacaaaacaaaaaacggcaacaggaaacgaaccctttttacattatttgaaaaactcccccaactcaaaaacgccccacctcaaagttttcaccggctttttcatcgtgaaaatcctttttttgcggctggcaaattaaagtaaacacaaaaaaaaaaaaggaaaacagcaagttaaagatggaaaaaaaagagttgatttgctttaattgagcaaacatattgtacaaattttgtttttcaattgagtttgccatttccgtaattatgctggacgcgttcattgaatcaaattaaacaattatatttcagtcagatttgtgcgttcgttttcctagaaattccactttaaaaaattggagctcttcgtccgaagatggaaaaatggcttaattgagtttaattgttgcaccggacccacaaaatcaactcgacaagtcacgcagcaggcatttacataagattaacgacaatcaacggaaaaagaagagggaaaattttgaaaatttaaaaatgaatttgatgcactttgtagctgtttgccgtcgttttgagtgaaaaagtgatccgcatccgtggacgcagaaagcgagggagagactaccgactggctatcggtacatgaatatttatgatgctccaatgaattagcatattttacgattttcgtttacagacgataaagcccaaggatggagcagtgctggctttgatggcgacagtctctccagctcctttaaactaaagtataaacacaactcgcttttgccgtatgcaaattgcagtttgttggtcgataaaaaattagcagttcggtggtgaggactttgtaaacatcggtctagtgaaaaatgcctgaccaggaaagacatgacagttttgtgcaaggtgaggaaaaattagatacactgaaaggaaactcagctttccacgccaaatatcacttttataagcttttctcttaatattataacttttttagacgcatcttccatttctttagagttcgaaaccaaatcaacaggctgctgttcgcctgggaaaatcatctatttagctttcagtacattcacatgatttccaatcaaacagcagagccagcggagaagccaatcaaattagcatatggccaaaaggggagaaaactccctaaaaaggagccaagagcacgcaagagaagcgcacaattagccagaaatttccatttgccagtcaggcgattcccgggcaaacagaaaatatttgaagagacaaacaaaatgagcaaaaatgttcgcatatctgcggaccacgatcgcagcgacagaggggaggccattagagccaactaatggtagcaccttttaaggttaaattgggcaggccgaggctccaaactggccaccttatcgctggccaaatttatgcacagctcgcaaactaagggttaaatgtgccaataagccagatgcgggcgggtgtttgcgaatgacgcagctagccgggaacagagaaacgagatgggataccggataaggttagagccggtcctaacgaaaaggtaccctatatactcagtacttgaagcaaaaagtataataattaggaatatctttataatgacattcagaaaacagcataagaatggcaataagaattcgtttcgctaacgaaatttctttggtgaattcgttactactctaaaaacatctagccaacgccaaaacacaataccccttctccactttgaaaatccagggtacactaagccgaaaatcgacaactaaaatctttgagcttcgcagcagttggccgcatttgcattttgtgccccactatcgaaatgcgcatcgcacgctcacgcgactcgaaaaatggccacaggctgcactcgccactgcagcagcgcctaaagtcgcaactgcaactgcaactgcagcagttgcagcaacatcgacttcgggcgcagagctgggcatccgtccgccatcgattggcttgccaatgttgattttccgtttggttagttcacctccaaactccagaccgccccccccctcctcttcaaaacaaaaaaaaggaaatgcgcccgcaaaataagaaggaaaacgcaaatgtatgcacaaaaaaaaatgcagaaaaggaaagagtaagggaagaagaaaaataaataaaattgctgcgaacggaaactgcatcgccaacgactgcattgaccccttttccacccacgtgcgtgtgaattcgccatggaggcagttcctccttcctttcactcaactccccaccatcacttgctgggtattttattgcaggagttcccccgaaggaaaaacgaaagaaaatcgcattgctcacgttggccaaagtgcaaaatgcgcaggggaaatgaaagcaaaaaaaattaaaccaaattggatgaatatttaattggccagcgaggatcgcacagggagaagagattaaagtgtataacactcggaataataatgcatcccaaaagagggttaggtaagtttccacatgcattcgatttaggtaaaaggttaagtgataaaatagggtctaataaattttaatcaatcatgaaacaacagctaagagaactgaataataagatgtattcaactatctgaaactacgaagaacgttcttatagatattttgtataaattctttagctattcattgtgataactttgttaacttgtaaatttagctcacatttgcttaaagttaggcggctgaacacacaattttctctttcgatcataaaccaattcccacctaaccacagttttccgctcgattgactgtcactttcttcgttttgattaacaccttatgcgacacttttctctcggtccactaactaagccacaaaatggcaagaccaaagagggatagagaaaaaaattaagtgaaaagctgcccagaggctggaaaccttttatgttgagtggcggtgtgttaaaaaaataaaatgtcagacagacagacatcagacagacggatgagaaacgagggccgtgactttgaagagcaacagagattcaaattcaaaagctacaggataaagttgaagccgcaatgccgcatcctgaatcccattttcgccaacaaccaggcaaccaaacgttgtacataggtccgaaaagctgcacaaatataattataaacgtctgctcggccattaggttctgcgttggaaggccacccacctctgcacaacgaatgccgaaacaccccccccccccaccattttctgctccaatttggctcggggcgtggcattacaccccctcccaaccacgccgagaccatgtttccccattagatgggtctaaatttagtctggtctgtctgggcaggttcatggaaattgtcgcatcaagtgaaaacatcaatggagattttgaatggagtgggggagcagagagtagcagctttgattttgattcaattttttatctgcatggcgcttgacatttcatgccatttcagttcaatggccaggcaaaaggcaatcaaattgatgactttacttttcaccccgttgcgaaccccggtttctgtggctacatttcaattatgctaattacaagcagccatcaaacacctaatggcgatggagcgagcaggatttatgtatgtaagtccaaccccaatttatcccattccacctcagactgtctctttggcgctttgtcattgagctattgcggtttggctgctaatttatgggcttgcagtgaacccattccataaaccccaagagcgttactcctccatttgtaaataaaacatagcgttctgggcctggagtaaagtagtttcttccccttccaggttgtaaacatgccgtacacacaaaagattcccaccttcccttttttttgcccctgaaattctgcgcaaaactacagagaagaaaggaacagacaggagatttgcgccttttgtcctggaaatgaagtactcaaattacaagcaaagtgtgtgtgtgtgtgtatgccataaagctgtctgcagcaatccgataatcatctaagggcttcctccacttcatttcggaacaacaaattttattatgcagaagagatttcttttcctttcaggctcccgtctttttttttacccctacattgcgtgtgaagcgccgccacaaaataggatatgttgtagatggctagatatgggtgggcattaaaaataaactattccttattgttcctgctccttggcagcaaaagtgccgcaggctgtgaaagcctcctcacaaaagactcgctatgcaaacacacaaaaaaccagtgacgatgacagcaactctgttgcaggttcccaagaaatataccatcttctctgcagctaatttgctgctggctataataatgcttaagccaagtaataaacgatgacttttttgccggcgtttggcaagcaaaatcttggcttgacttttgtttacttgttggaggtgaaaacgaggagccgttcgttcgctccatctcgaatcattcttcaagttaattaaagttttatcaagccaagaggtaggcacgcagacttctggaggcatttcctggaatgcagtcatcgttctctgtgctatgcctcaaaaacttcatgttttattcaatttaaactgttgcttttgttgttctcgactgtgtgtaactagccaaagtcttgcattcgcaagatggctttcaaatgcatttcgtctcaaatgctgctgggagttggcccaagttatatcatcgtcatcatcatcatcttcatcgtaattatggccatcatggaattcaggttgtgtcattccacatttactcgttaccgtcttcgatttcaatcaatgtgcagcagcttattgagatctttccatctctttcccttctcattttcctttcagcgcacggcttttgttttccctaacctgcgagtttttccaaagcagcgactacaacaaaagaaaattcattgaatggagagtacagagttaagccttcagcagtttatgacgcgtcagattcaatgagttcgtgcctcaatggatcccttcttcttcttccatgatggcgatgatgatgatgatgatgatagcgttgcagctgctgtcgagtggagattaaatggaaaatcgttcggaaaatgtatgtgtttaactagcaggatcaagttcactcgactcgcagcttaactaagctttccatagcaataaacctaaggtttccacgttttcaaagagttttttctcatataagtggcaaagtttaaacctcaaatgcaagacttttttttctgaaagttattacagctgaaaagcatgtgccgtttagtttcatacctgtaatgaaaagagaacgaaatacaaatcaattagtaattgatacacatgcataaaattaattggaaattaatgtaatatgggcagcataacctcgattcctaaatgttaacgactttccccaaccaccagttacatggaatcgataaacggtgttcgattacatgcacgataagatatgatatatgtagcatatacagtatgtggcatatgaagaccacacagcacttggggtcggtacaaaagctccatgttgataactctaccttatcgatgtgtgtcaaagagcgcggtctgtcattggaaattataaatcaatttccaggcattcagcgccgatcgtctgtgataagattgccggcaagggaaaaggtcggatcagtgggctttagcataatgacgaaatgtggcagccgcaaggaaagggcaacttaagcggcttaccccgaggtttgaccacgtctcaagttgtccccacgaatggctgactacaaatgtatatgttagtgcctttctgcttctatgtgtgatgttttaattaaggcaaccgacgacgacgacgacgacggaggcgactgtccggtcggagcgtcgccagttagcaggcacaactatcggtcaataacttggcccaggcacgcgccacatacagtggagcctcagtggactaaactttagataacgttttatagtatagtatgatgggtattttaatctatttattattaaggcatatttcacttcaaatataaatcattagttaattgctttaagccccttttctaatgaattgaaaaagcttgtagctatgtaattttatgagatttgactaaaacgaaattccactgtacaccttcggtggtccgactatgtgtgtgtggtgtttatttagggctgaggccagagtcagcgcataaaagagtttgcttgattgctgggcaaacggagccgaaattgaattttactcgccatctaactgggcgaatgttcaattattcgaggacaaacgagttttttgcatgaccatcgcaaaaggccggaaagaaatgggtaatcttgggagcggctgcttcggtctgctcatccattccatttgcctggcacatttaattgcagcaatcaaatggttttttggggcggtggccacctgggaaatttcctctggcgcatacatacatatatcatttcatttgcctttaatttgacacatgacgtgggggcatttcgacttcttcctgttgctgccatttgcaaaatggccgccctaactgttgttgtctaacaaaatggccgccttacgtcttccgctcaacagcctgcacacagaaaaaaaaaaacccatatactcacacacccacccaccaagaacctagagttcattggtttctgagcggcatttttcacttgctctggcaaatgactttggccacatgctgggtcctgctctacacccactgacttccacattttctcgcattttcccaccgcccgaggaaagtcgctaagctgggctaagttgagcgcttttccgctgccggcgttgccttttctttgtcctttggcatccagcgacagggaggacgttccttgttgcgcagcaaaaacttttgcattatgaaattgtaaatgttagccaacagacaatcagaaagtaacactcatcagccaggtggctgtaatgtttttctgctaacaaaaatctcagaattatttaagccaaagtttgacttaacaagtaccccacaatcagatttgcagtttcagcgaaatttagaaatatatttcttttgaaaatggtcacacttttgattccagtgttaccaactgtaataatgaaacagacttactcaaaccccaaaattgttaacttttttaatgcttgaaactagaacgtgttcaacagtgtaactacgcacttcggttgcctcgagctgtccgaacgttttagaaaaatcgtttgcagtttgccaaggagaaaaacaaacttttcaccccttaaaacgaattttcatctatatacatatatatttggtttgtggtataaggaattaaattcttatcttttgttcaaagttttcgcacagcatttgttttattaacttatgctattttcatagctcgacttaagtctatttctccctagccgaagacaaacaaataaatgaagcttttattgaacctttaaatttcatttaacttaatacttattttccacattaacgtcaaaatacgtattaaggaccactctccacacatcgtcggtggccaatttaatactaaacatgtagtttcccgttggaagcggaattttcgcgaacattgtatcggtcaagacaaagtcctttaccagtatatcatgctatgaaaaatataaaaggattgccttgctaataaacgataatagtatttaatacgtatgattcacttacgttgtaaggacaagaatgattgaaattactatagggcttcacagcggtgtagaagtagtgaaaaatgttcataggattgggatgtttcatatagtgacagaaatcaacggtgacattgaatagaaacggatggtatcccgacaacttcttatagacagtaaagtttacactaatttttttaataggaagctttaagaatttcatgtacacgctctccgcgattataccacgacccaaaacattgagtttacaaacggggaactctgcaaacgatttgtccaatacttcacacttgacatttgtatgccgggtaatactctctccgttgatctctaaactcaatgttatagtgcaaaacactctaattattataaacctcatggcaaaaagagcaccaactaaatattctaaactactcactattagcaacctattttgtgtatcaatccaatttcaatgacttcatgttatactattttctaatttgattctaattgaaaagtaatttttgtctgcgatttgaattatcagttggttaaatctcttcatgctcaccgtaagtgttttttaaactgtttaataaacttttttggcttcacattttagccattttaggatttccgtgcggcgagtatgattatatgggatatatatatttaatacatgggattggattttctatattaagttcaaaattgaaaaatattcccccgattaacgtcgtctaactcaacctatcaacatttgaagtacttgtataaaattggcttcattacgaaatgtttggattttgctactcatcaggatctagatatattgtttcagtttcaaaggggaaaaatcagtttcccaatcgcgacagggtgattcactgatgcgattgccgggcgctggattaaaatgcattttccgagactcgtaatgatccgggccctatgccaattttccatttgaagggtagttttccttttggacacgtgtgccacagcagtttgtgtaaatatccctttattttattttatattttttttttttagcctgtttttccatttcaagtctgctctatgaacttatgcatcgctgcgctttgacaaaccataatcccctggcagtaaaaatatggatttcatttcatgttccatattttatgggctcacagcgaaatgagaacgacgatggaaatgagaatgagaaatagttcgctccagtgctaatggccagttgttaaactttcaaattgatccatggatttcacagtcggatgcggcacacattttcctgcccctcctttgaagttgatgttgttcttgaatgcgtaaaaaagaaatgcagagggccgctccccgagtaacgcgtataaatcgtggtgtcaaagagcgctggagaatataaatttatgatttatcgaaagcatatgcgctacctcctacaggaagtatccacagaccagcgagactttgtagcggcgagttattccccaattattattagcattttacaatcgcttcgggcatgtttcgaatggctctttagcgcacatcgaagataccacgcccccaagaaaaagaaagtcgaggaaaacaccgacagatgtcccagcgaacagatgcccatattcctgggggatctgcctacaaatcaacttcactttgtccacatcaagtgacaagaatttcacatagaaagtttacctcaagaaccaaagatgtgtgtgtgtgtgtgtgtatttatttccgcaattgaatcaaaacttagcggaagttggcagctgttgttgtagctgtcggaagcgctctccaaaaatatccaaaaaattcagaaattatgtgcagtttaagtgccgccgacagattttgacacattgcggcgaaatgcatatgctagattgtgtcaagtcattgctgctgctttgattagagccaaaatgtgcaatgtgaaagtggtctcgattgagttggccaagttggctgtgttggaagcgaacacttctttaattaacatatgctgcgacgtcctgttgttgttgtttttcttttccaaacagctgctgcggtctgcaacttttcccaggcggtttttgttgtttcggttaccgtttatgctgtcggtggttgtctaacaaattaatttcatattaccaccgcccgcttatgtatgcacagcagcggccaaaatagtagctacgttttcgaaataacttgtgccttttatttatgatttacagtggatttaaaaattcgctgtacaaaagagtagtaagtaagagtagttactcaaaaaaaaacctcaaaatataattgatctttcatttatttgtatatattccattaacctcagctgtgcgtgaacataaactctggcattgcagttcatttgccactcgggttacatgtgtgcgggatggccgattggatggatcccatcctgtgctatcccatcgtatcccaacctatccctccgttggcagcagttccaattgaaattaatgttttatggtttctgcagcgaccgcacacacacacacacacacacacacagaaacacaatgaataggacagctggacattggacaaagggggggagtaatttcaacagttttctgccttctggtatttccactcgcttttcctaatgccaatttgccatggagagtttcctgtgagtgacaaaagaaaatgccaatccttgggtccgactttcttttccccctttttccgggcttcttatttcttacaggctgtcgccgcgtctttgtttcgcttttggccatggcaaattggacattcttcttcaaatttcctgtttatgctccataaaatccatcgaagcgtttaatattggcaacttacgttcgatggaaataaaggaagcggcaggaacaacgcgccaagtacgtggtctgggattcaaattggtttgttgaggcatccaccgtctatatatatatgtatgtatactttatgtaaaatagggagctggcgtctggcattgaatttattttccacagtctgagtgagtagatacaactgcttggctaaattatgtaccctatccaacttatctgccgtgatttaagtgaaatgtgagcgatttgaaagcatttcaatttatcttatgccatagttgacagctctaatttgaagcgacatttccccaattttcagacaacaggtagacatcaataactcgaacaactatcagtcacaaatgcgagctaattggtaaggaagaaaaatttcatcaacctcgacaaaaatgacatttagtgaatttcatatttatctagtatgtttttccctttaaaaataggttcgactgtagtttgcgaataataatttgaactgaaaagcctgtcaggcaaaagagagagttgagttaccatcataatcaaagcttttttttttttgtgttttgcatatcagtgcaagtgggtttggttcggggggattatgcaactcgtctggggcagctggaaaatgcagttgcatttttgggttgcagttgcagtggcattttgcagttgcatcccacgcacgacttggacgactggcgcctgcccacgtttagtctgttaattgaatttttcgcctaacgatatgagcttcataaataagcgtgtacaataataataataatacaaataataatattaataccaaacgttgcccaaaaatgaaacgggtttcatttcgatttgatcaaatttatgtcaatttcagcaagtgttaattgcacttgacgtcgatttatgtgtcgcattattttatcggggataatgacagccaaccgcaataacaagtgcatacttagtggggcattatggcgtaaaaaaaggaaggctttttaaagtttagctaaccgaaattcaaatttaaattggcaaatgcaaattaaggggcgcacatttgggcggaatatttcacaataagaggacattacattttgttgatttatatttgatgaaacccgaattcgaaataagtaactgtcaaccgtttggttatttatcgttcgattgaataatactattcttcatgattttgattggattttgtgttttgattttaatgttccattttattggtgtagagacaagtcactcgaaagccataaaaaattgaaataggaatattgaaatttctccatttgaaacttacgtgagagcgggtgggaaaatgcttttttcccatttatcatcataattttctcattatcaaatttattttcgttgctctgtgcactcacctgcaaaggagaatggagaaaagcgaaatgcaattaatgaataatgagttctgtagtttttcaaataaagcaaaacttttaagcagcccataattcaaaccgagtgcgttcacacctccgaacagacacacactttggctaacttaattttaagggcataaaagtttaataaataattcccttacccccccccccccctttattttttgtttgccccaaacacccacacaaaaaacggggagtgccgagggcagttcttgataagacagagccagctatttgtgcgttccagttggcaacaaattatggaaaatgaaaaatgccatcaaagcagcgtaaatcatctgactttgacatgcattattatttacgaccagggggtcgcccttaaaaacaaaagaaaggggaaaaaccaaacctcttgactgttaagtacaaatcgagctgccggccaggccataaaggtgtataaaacatttcagataagtgcgattgtttattcaaatgacagcgtttaaatcacatttaactgcctaaatgttgtgtggccctgtgctgctgcatttaaataaatatgtacagcaaatttccccaatacgcatagtgcgcccattatgaatcatcagcattcggcggcacaaaaagatgagcaggaaaagccggcaggaacaggagcaggaaaaaccgaaagcacttgccatttgacttctgtccccggtttctcgtttctgaattttatggcattttattttagctcaacttcagacccatggaaaaccccaggccctctgccacttctcccgatgtctcggcgtttggccccgtcaaaacaacatttctgcgttgggcaaccgcagagagtcaaacaaacaacagatccagcgacaacgaatgcactcagagaaaatatccatagatagtgctgaacatatggttttgttcaagctatttctctctgcgaaagaaatgataaagcatcaatttatgtttacgatccctattagaaaagtgttgattttaaaccaataacacttttatcagcgtaatatattactttaaattagttgatttggtttatttccattttgaaaacaccagaaatatgtttcttgtgcacgaaatacactatgggatatatataataaagtgaagctgttgagagccgcgttagatgacgatgacgatgctcacagcttgtgccgagggttggggatctggatgaggggcaggggatgagctgggtgccagaagagtgccacagaaccaggctgcgggaggatggacgaatggatggatggacggatggcgggaatgccctgtgtggcaagcgtctgttgcaaaatcgaaaaaatattgtgcgttaagagggatgctctctggcggactgggccaacacactacgaactaccaacagctgagaacgtgccgtcgtggtgaggaagggaggtgtcggtggtggtggttggtgggcggaactgagaactggagatggggtagggggtaggaaaaatcgataaatgcctcgaacatatgaattatgtgtctgtgcgcaacacaaacgccaatccttctccgatttcccactccgagattcagctgcggttcttcatcgggttaagttcaagtggcagctcattgcactccggccagagatacattttacaatttcgcatttaattctccagagccattcgcccggattgggctttatggcctggcagcaattggcgcccacacacgcagttgctattgctgttgtacttgctattgcaaaagtggacaacagtatctggcgccctgcccacgatggcatggagctgcactgaccgcattagataggaaaacccctctggggtctgttgcctggtcgccaccacttctgcactcctccactcctccatttgcccattctgtccaatgaatgtttttggcaactcatatgcaaatatgttgcgaatgggcggggaaactggtaactggacactgggaacaggtcgagtgctgctgggtaaatcaatgaatgtgtttggacaagtggcagcctttgtatctccctgaaacccttacgcccttcaccgacatccctgggcattaatccgtaagatacgagtgcttatacatttcgcaagagtagtttaaactttatttccaattcatagctggacatagtgatggtcttcgttcggtgacagcaagtgcccattaaatcatatatcttatgaataattcataagagtatatcttcatctaagttcaaatcaaatttgattaagataagacctaaaactacattttattatctctacaatttcgacagatttcgaacactattactaaacacttttcaacttttaagatgatgcaatgtggggtaatttatacatttaataactcagttaattgatcttcattaagttcgcttatgctgccatatatgtacatagggtaccttcatcagtggtcataattttcgtactcccattttgcaaccgcaaacggtacgatttatgctgtaaacaaaccccaagacttaattaatattgattggttcaacgttggggggaaaatcgttatctcgtttataagttaggcggcagagaacagttgaacttataacccaaagctgctggagtttgctggccacgaaagcaatttggccccaacaactgataactttcatatttagaaagcgtttctgggatgcattgcatatccaattggtaaacgctgatacgattgtctgcttggtctggctgttagaaaaaaaaatacatacatataaccgaaaatcgaaataaaaacaagaaaagcactgaacaataaatttttcatgctcaacacaaacgcaccatgtacgtacacatatttatttatgacagcacgcaggtcgcagccacgactccaagttcgaatcgaaattgacccccgaaaagttatctatagatcgccgacgtctgcggttttcccccgccattttcctacatgtacgagttgataaatggaaatgaaaatgggaaatctagcgcaacgtcgcgtcgtcccagtcgatttcaatttcgattccaagcaaagccaagccgatccgatccgattccaagttccaagttgatgataaggcaatcaataaggcaaacataaggctcgaggtttattgaaccccccttttggacaaataggggaaacctccgtcgtatcagctgggccaagtgcaattaagtcggttttcgtttattttttttttggattcattcgcattgcagttttgtttatttcttgcttaatggtgatttatgttgcggttcattgggtttgggtttaggcagaggctcgactttcgaagggcctagtaaattgccagtcgaatagctcaaataagtttgtttaggaatcagttacaaacatatttagttatgataatgccgtaaatatttgcgggcgaatcagaggccccagagaagtcagaaccccaagtaagttacctgaatgtggggagatgggcacacacacacacacaggcactcacatgcgactgggtgtcaaggaaaatatttgtaagacaatatttacccacgactaatgccacagattcggggtgggggcggaaagatttggacaaaaatatttgtgcgtgtcaacaaaccacgatgatgatggtgctcctctctgcgcctcgccttcaaattgatattcattccacgttcgccgaagcgtgaccgatcccgatctctatataaatgatttgattgacatcaataattgcatgtacatacataaatacatttccatgcatttggcagatcttggtagtcagttggctaccgaaaaactaaatgggcaatagtcatcgaatccgtatcaatttgcatatgtctctagtgacaacgacggtgtttgcatgaaaaataaacagagctctgctgattgacgttcaatcccctttccccacgcgaagcataattaaacgcatttgatgtggctgttattctgcctagagaatcaccatatagttgaaagggtgtagaatattattgtacccattgaacaaagtacacatttccataagtaaaagtatagttactagtcaatttcttaatatttaagatggttagaggtgcctgttagaagtgttgttttttttttttttttttgagaaattccaagttaagtttcacacttgtacgaggtattaagaaatcgttgctgtgaaagccctgcggaacactttttccaattccttcgtctggtttctggctattctctttcggatctcgtctcatcaatcacgttttggcagctccacatgctttccatccagctcagcccgtacgtacgtatgtacatatgtacgtttgtacttccctctctattcctgtctacgtgacttccgtcacttggcttgcccatttgtcccgcgagcttccaagttcctattccatagcttcccctcccgatgataccacgatactcaacctcttttctctgcgggaatggggacttctccagcttcttcttgcatttatctacttggctgttgtcatgtcaaacactcggcacaaaagttcaagtgcgggtcctcccagccgctttggccgccctttctcttcatttctcccgccaatttcacgcttgtcaggttggcgaaaaagttttgcctctttatttttttttttttttttgcaacgttacctggcgccaacagcccacaacgccaggagtgtgaaacatcagttgagtgtcgcaggcaacacaaaagctcatttgttcgacgaaagtaaaatcggcttagaggccaaactatgcagcggtgagtgagtgggttaagttgcaagaactttatggaaccacaccgactgcgcacagacaacttaattagataaatgctctgtgctgtcagttttctaattttctagttgtaaagtgatccgaacgcccacatacttcgccatgactatagtcaacattatcgtcattatctccatcatcgttgtgtagaatactgaaggggcctcttccttcgcctcctcctacttcccctcctcatctcgtcagctgacataattttatgctcgacattcaatgaggagtaggtgtaggtgccatcatcctcagcaaaactacggaactctggcaaatgcaaattgtgagcagacaaaagcaatttgtgtcattgccagcagccatatataacacaattgcggtcataataatagcatcaagacatgtaacttcttacaagtgacaacaatttggtatctaaccgtgacactttggtcgtaagtgtaatttaagattaaatgcttatcttaaatagaataaaatatttaattttgtgttaaatatattttgcacatataataatttacttgttaattaggaaatactatgttcaaactaatatacatatctttcattttattatcataagtaatattattatgaacgcaactgttttatgtgtagaaagggaccgaattgcaagagggagacagagcgagagaacttgtattttaccacctcattacaagatttgcatatttgcatctgccattgtctgaggccccgagaacaaaagccaagcacagacaatggcttcatctcagctcaaggatattttcgcactcagaaaactagacctaaatttagaaaaaccgcagagaaaacggtgtctgaaaacatgacttcctgccacaactttcgcgagtcaagtgtttgccacttctgaagctaaatcttaaaagccacggataacaactgtctatctgctgcatttgctgtttttgggtattaggctccactcggtcgtcaagtgttcctacataaagtcgcttacctaatggccacagagctgaaaccatcaccgcctgggtgcatttcacaggatttaatgggcagatgtgcaccgccatcctgcgcgcccctcgtatccgcatccattgacagctcaatccaatccatgccgcagaatgtggaaatggaaaatgtgcggcggataattgccattaatcagccgagtccacacatggacatggcacgtcataagccgcacagcacactacatctaaaccagcgtttgccattcggttcaaagaacaaaaaagtccggtcttggggttcaacatctggatgggaatgcaggaggacgggatgcgagaggtagggattgggcctgggcatgggcatgggcatggccatctatgatatatgcagcacttagtacctacttaagttgcgcgaacgcggacaaggcttcagataagatcacacacagctggcaagagcagcggcaaaagcggattgtggcttaatgccaccacagtggggcaaaaacttaagctggcaactatttctttttttttggtgcatgcatatttattcatccatttcaagtgtttgcaatttaaaagtgctctatatagataatccaaacagaaaagcaatccacgtagtcacaaatcgcactcaaatgatttcatgttgttaactctgaaattgctcacaaaatattgaaataagtaaaatcaaataacattctaataaatagcaaaaagtactcaaagtttctaagaatattacttaagtgacgaataaagtgtgaaatggtgaactcatgaaataaacagttgctggtacgatttctggcaatgacactaaatgacacacttagtttatctccattgttttaggaatctccggatctggaaatcccacccactgtaccactctcctccaccaaaactgaaactgcaaccacacgacttcgacaacgacgtcgactactgtggctgcagactcgtactcgtaagtggtataaagtacgtgcattttgtagataataataaaataatagcaacggctgctcattcagctggagtcgagagctagctggtcgcgtcttggcgcttggatcgcaaccgaacctaaccgaaccgaacggaacggatcggatcgaattgattcgaatccgattggataccattggatcggaacaaaacgaagctggtgacttggtcttgtggctgttgtaacaaattacttttggctgggcccgtccacttccctgcttcgctgcttccctgatctttggtgatcttgcccagacaatgtcgtcgccattgtaactgctcgtttttcatgttctatttttctgcggcaattgcagtcaatagattagctctacagataattgcacagcgaaaatcgagttgcttaaaatataataaaaaaactaagaaaaggttagatctttatttgtgttagcttttgttactcttcctatgtgtagttttaaaagtactactactaagttccgatgacttcgaatgaaccatcgaggtaaacgaaggtcttaatctctttgaaaataactttcatgctagacccgacaatcagtaaacttatttttccaagtgaaaagcggccagacaaaggggagggggtgagccgcagatggggcaggcgcttttccgtcgccaatcaagcgatcgatctactttgaggcagccatggccacagtttatcgccgaccggcgactgcattttgttgaccgataagtccgaagggggttaagcatggagagcagcacgagtgggcggcagggggttaagcacgaggcgaagacggtggtggtgggggctcgtggtcgtcagtcaagtaagttccaaagccaagaccaacttcatttgcttgccaaccaaagcgagcgactttttcaattaatgtagcccatgggcacgcgaaacctgaaaccagaaaatgcaagaaaaacaaaaaaaaaaaacaccataaaaaagaaatgcgagcccgaagaagcgaagatgcaaaaggggggctggtgaaaaaacaatgcaaaaactttgtttactttgccagcctgtcttatcgctcgctccactggccacaaaataattaccgaagccagttccaagctccccacctcaagttaagaaaatcatccggtagaattgagttcttttggccagggcgtggcgaccagcccatatcacaaatctcgggagcctagagagctagagagtacccatggtaaccatggtaccccatggccagcactttggcacttcgactaaatgactgcatttaaaaaactgttgccgacttccgtttcggccgtttcactcctttggcatctgctcgaggtgattaagtgcgattcgaggcgtggaggcagataatttctgatattttatagccccgctggtgtgtatggagtcgggaatgctaaatgggcaaatggaggagctccgtccgtccaaacaaccaaccaaccaaccagaggtgtgagatttgccgtttaggcccgtccaggccaggcttgttttaacggcactttaagccactcagccgaacaagttaagtacgaaatgatcgtttttttttctcaagtgggctgaatgccatttcttcgctggaatctctagccgtgtccttcgctgtaatgcagtggccccacctacggatcacccacgcagacctatgcaaataggccctaatccttgaggaaacgcccccgcaaaaggtacagtgtgctaaatgtaaagcgaaatacattgttgcccagatgcttttatggtcagaatgatttcctgtaactgcagccagatcttttctctttcttgcagattctccaacgaatctcccttccttactttagattggtctaaatctggattttgaggttgcgtgcattgaacttttcgaacatttcgggttgcagaatcggtctcggcttgttgttgttgttgttgttcttgttttggtgtttgtggcgggttcaagtgaattattcatgttgtcatgtcgaatcggcggagggtgggtaggtccgggttcgaagctgcaaacgaaattgcattctgccaacgcagcagaagttacacagacaaaaaagtgcagttcgtttttatcagcaacatcactaacttattttcattttttaatagaaatgacattttttttcttactttaaaccatttgatttggttagtgtggaaattgtttgtatcttaacctatttttttcggtgtcaaaattgtgccgactcttggatatctttgtttttcggtttatttggtgtcgaatacggttcctcctgctgttttccataaaaattccagcaacatgagtttccccaagtatatgcaacatctaaattctgttttttttttttgcctcctcttgtaaggaaaacaaatataacacaacatttttaattaaatgacaagaccaacttttgttaaaccaaacttcattggcaaaagtttatgtgccggaacagaagttgtcattgttggcagatgaaaagcctggcacaatgcaaatctcttgagaaagaaaccgaagaagacatctcgcagcgaccatcaataagtgccatagaagtgagatatttccgagtccttcaagcgactcttagtcatgcatatatgtgtgtacatacatctatatggagtatacatcttaagaacccacaaccttcgaaagacgaacaatttccggcgctttgtcaacacttcagagtgacgtccgcgttttaaacaccattgagggacttcgcatcggttcgtaattagtctgcattcaacggagaagaagtgacctcattcgagtcctctaaacactctctccccgaccgaatgttccattcctttcttttgtcacattgcgacacagagccccggggctataaccaccatatggaaatgtttattttgacaagcgcaccctcggaacgagcggaaaaaatgtgtccaggaatatgaaaaggggtgcgaaattagaataacatgtcactcatatattgtatcacgtaatgcggctaaatgtgctcctggccacgggaaaaagccagtgaacgccagggtgaggcgactcgcccaggacaacatcaaacaattgccacaattcacgggctaaagagcgaggaaatatgaccaggaaagtgaaaacacagagcgccacaaataagcacgaaaatgggaacaggacctcgcacgtgagtttttcgtacacggtataagtaggatccttctataaaatcaactagtttgtttagcaagatagaaaaaaccacaagggtgtcttaaggccacatagatctaaagatcaaaataaattattaaaatgcttttctataatttaatttaactaacacggaaatgtctaactttgtcttactttcatagtatcttatcaaccttaattgatgcattattatacggtactaagtggtcgtgaagccacgtgagtccattgttgtcacacaattcttttcagctagttacacccatgtaagtaaagttgttttcttttttttttaattacatacccaccacataaagcttgaagttatgtgagggaatgcttttaattaaatctggcattaagtcctgcgacttatgacatgccatgacctaaaaatttgttcaaagatttttcattccatttgcatatgacatgccccgacaattttttacgaccgcactttttttggggtcctttttcgggctgtcttggagctggcgttgataaattttgcagctgataaggcggctccccgtttttccaggacacttttcacttttaggggtggcttttctttctcgtttcgaagatggcgcagagacgagattcacggcaggacatttaatttgtttgcattatttgcgccttttgcggggatttccattatccctccctcattttacgcgattgtttatttctccagccgaaaatggaaatatgataagcctctaagccacccctggcttagttttcaaaccaaatcaatcaattgatgcattgtgcagctgcccaccgatcttgggtaatcttcttctgggacctaaaactgaaactgtgcctgatcctaaaacctaattgcattttgggctgcactggttctacctgcgcttacctacctgatcccctaagatcacttgttccctggctttgagctaatgataatgactcttacggctaccattttgttggattctatttcttcgatttcagaatactttttcacaggaaatcgtgtttgttttggctcaaataatcgcaaacaagtgcgttggttttcaattcatgttgtgcagtgtttagtttatctcgtttcaagcgaagctcattagtaatgtttaagttttgaagcactatcggtttcgcaaccatcccattttgagttcttatctgcaggtgatatgatgggaagcaattacggtgaattaccccgggtgattggcacatgtggatggaatagggcagggtttttgaaagtacctcaattttacgagtgcaaaaagagcgcgagttgcgaaatatgacagcttatcggatcagttcgccgttgacatcacctttcgcacatgaggcttttttttttttgtgggtcccaatgcctgctttctggcacgtcgaccagacatccagtcgccaaaactgtacttgcattcatatttgttaaaatacagatatcgaactttatggtacccgaatacacaacatagatagggaattgtacgaagagtaaagtaacagatagtgtcataaaatatggtggatgagtgtagtgaactaaaaattactgggctgacaaaccacgtagttcatctattcgtactatttaatcgtaatatttattgaagtgatataaactcatctaatctaccgaatttatacactgttttagattatttcctcctgtcagaaggcaattaaggcgcagcccaagaattaaagttcaatcacatgttcataaaattttttttatatcttttataatctctttaataatctatatatgtacacaatttgataatgtctttctgtgtaagcaactaagcttggatttcatgggtctttggtttaaaattataaattgacaacctgcacagcgaaagatagaaactatctacatttttataaagccctcttacggcactttggtgcaaaatatttatcatttcagattgaagttctcaccttgacttgccaaactgctgccaatcagctggaatatgagacaactgctgagcagccagttccacaaagtcctgctgcttctgtttgttgtgatggccatattctgtttgcttttcgctgatttggctggaaaccgtcgtttgcgatcggaggtaattcgaatggctcaggtttatttggacttttgcgatttgtttacaacattttggctcttgatacccgccaatcgccgattgcgccttctatttgtatcctttgcacccacacatacacgcgacgcaaacactcacacgcgacttttactcactccacttttgttgtgtattcttgggcgattattgctttcgattctcttgttttacgctattcgcatcaatcgtttacgcgtttttgttttgccggcattcgccgcctattgttgttgtttcaggtcttgttgttgctgttattgcacgcttgcaagcggggcatttttacaacaacagaaaatactatcaacaaattgcgcacacacactcgagtaagtagcgttgtctcgctctaaccttcggcaggcatcaggacttgcagctgcagttctatttaaaacacattttcagcggctgtatgtattatttgagtgcctttttcatttattttcgattttggctgcacttattttaattttctacctctttgcgatggattttactattggcaaacgcgttttctcgccactaaagagtatacatgcgcgcaacgacctcgacgaccgaaaaaaaatccgaaactgtcgaaaaaatccctagctgcgcgggtgatgcgaaaacacatccgctatcgatgcttatcgatggtctcactactatcgatgacgatgaaatgactttcgcaccatgttattcttgcatattataaattcattatcattttacaaaggggtttccataagtaacgtagtaatcagtgctcagctttcttactaacgtaatcataatatattttaatgactgtcatcgacattgaaaagcaatcgatactggagtgcacatcaccaaaaacgcgttaaggtcagttgagcaatttattccaaatggcgcgtaattcaaaagttaggaccaaagtcaattacacatcaaaagcaacaaacattattatttcgaggacatttgcagttgggatattaatcatatgaatttatatcggtattcaaaaggtttgctcctatatttttaaatattttaaaatttcacatattttcggttttactttacacaaatttctttttatgagagtcacaggagattaatacttaaaaattttaatggctttcgaaatgtacctcaactttctccccgactgatcttgttcataagtacgttatttcagaaaaatcctttgacagaaaactttatgctcaaaccaatgggaaaatctcctgtttgaaatgcattttttgcagttggccagtgattgccacccccgagcaaccgacgtgcagacaggttgtggttaaaagttgtggctctaaaaaaatgcatgtggcaaaggaacactcattttaaaagcgccgaccagcaaccagcaggaactttaaaggctgaaaaaatgaacatatcacttttcgcctcggagaaatgtgaacgcaataaaaaatccgaccaaggccgacaaattgttggttgggcgtggggtggggggcgtggcgttgaaatgataaatttcacattaaatgccagcgcttaagcgaaagcgtcgtaaaaataaacgacggg

SEQ ID NO: 18608 - DNA, 6279 bp, DROSOPHILA
cggtcgtcgaggtcgttgcgcgcatgtatactctttagtggcgagaaaacgcgtttgccaatagtaaaatccatcgcaaagaggtagaaaattaaaataagtgcagccaaaatcgaaaataaatgaaaaaggcactcaaataatacatacagccgctgaaaatgtgttttaaatagaactgcagctgcaagtcctgatgcctgccgaaggttagagcgagacaacgctacttactcgagtgtgtgtgcgcaatttgttgatagtattttctgttgttgtaaaaatgccccgcttgcaagcgtgcaataacagcaacaacaagacctgaaacaacaacaataggcggcgaatgccggcaaaacaaaaacgcgtaaacgattgatgcgaatagcgtaaaacaagagaatcgaaagcaataatcgcccaagaatacacaacaaaagtggagtgagtaaaagtcgcgtgtgagtgtttgcgtcgcgtgtatgtgtgggtgcaaaggatacaaatagaaggcgcaatcggcgattggcgggtatcaagagccaaaatgttgtaaacaaatcgcaaaagtccaaataaacctgagccattcgaattacctccgatcgcaaacgacggtttccagccaaatcagcgaaaagcaaacagaatatggccatcacaacaaacagaagcagcaggactttgtggaactggctgctcagcagttgtctcatattccagctgattggcagcagtttggcaagtcaagctctttcgttcaccttggagccccaggatgccgtggtgcccgagggccactcggtgctgctccagtgtgcaggcactgcatccattggacgtggaggcaagagcaagtccaacttacccagctcagtgagcatccggtggcgaggacctgatgggcaggacctggtcatcgtgggcgatacgttccgcactcagctgaagaatggatcactgtacattagctccgttgaggagaaccgtggactgacgggagcctaccaatgcctgttgactgccgagggcgtgggcagcatactcagtcgacccgcactggtggccattgtccgacagccagatctgaatcaggacttcctggaaacctacctgctgccaggtcagacggcctacttccgttgcatgctgggcgaagccaactggcaggagggcgttaagcattcggtacagtggctcaaggatgacctgccactgcccctggacaaactgcgcatggtggtgctgcccaacggagcgctggagatcgacgaagtgggtccatcggatcgcggatcctatcagtgcaacgtgacttcgggcagttcctcccggctaagcagcaaaacgaacttgaacattaagaaacccagtgatccgggtgccgagaactcagtggcaccatcgttccttgtgggaccttcgcccaaaaccgtgagagagggcgacaccgtcaccctggactgtgtggccaacggagtgccaaagccgcagattaagtggctgcgaaatggcatggatctggattttaacgacctggactcacgcttttccatcgttggaacgggttcactgcaaatctccagtgccgaggacattgattcagggaactaccagtgccgggccagcaatacggtggattctcttgatgctcaggccacggtgcaggtacaggaaccacctaagttcattaaggcgcccaaggataccactgcccacgagaaggacgaaccggaattgaagtgcgatatctggggaaagccaaagcccgtaataaggtggcttaagaacggagatctcataacgcccaatgactacatgcaactggtggatggtcacaatctgaagatcctcggacttctcaactccgacgctggaatgttccagtgcgtgggcaccaatgccgctggcagtgttcatgctgcagctcgtctgcgagttgttccgcaaggagtgaaaatcaaaaaacgaaaatcccaaggccactccaccaaatcccttcagacctttgacaatctgaccaagcgtcgcaaacccttcaattcgggtgagcagctgcgaaccaagtccggcgggagttttccctttccggacgaggacgatgacctagacgacaatgacagcggtacgactcgactaaggatcccatccggaaagcttcccaaatttgagcaaccgctcaacgaccgcagattcaatatcctaaacgcgggaagtgctttgccgctggacaaccaatcgaagagttacgaggacgatgacgacgactatgacgaggacgatccagctaaggaggctctcctggaggcctacaaacagggcgaggacgcacataaaatactggactcctggcagcagtccaagagcaagaaatcccaacagcaaaaacaatcccctgcttccccagactcccccgaacaggatccgagtgttccgcatccaggtggcaagccgttggacagcggactccaggcccgattgcccagccagccgcgcgatctggtggcgcagatagtgaagtcccgattcgtgaccctcagctgggtggaaccactccaaaatgccggcgatgtagtctactacacggtctactacaagatgaacaacagcgagagggagcaaaaaatggttaccaagtcccatgacgatcagcaggttaatattcaatcgctactgcccggtagaacctatcagttccgagtggaggccaataccaatttcggcagcggtgcatcttctgctccgctagaagttagtacccaaccggaggtgaacattgcaggtccgccgcgcaactttgaaggctatgcacgcagtcacaaggagatctacgtcaaatgggaagagcccacggtaaccaatggagaaatactcaagtatcgagtgtactattccgagaacgacagtggtgccgatctatatcacgatagtactgctttggaagcagttcttaccgagttgcgtccccacacggattacgtgatttccgtagtgccttttaatcgaaacggaatgggtgactcctcagcggagatacgtgttaagacgttttcgtccacgccgtcggaacctcctaataatgttactctcgaggtgaccagctccagctccattaccgtccactgggagccgcctgcagaggaagatcgcaatggccaaattacgggctacaagattcgctatcgcaagttcaaggatgcaccgcaggtcaagagtactcctgccaatattcgttactttgagttgagcaacttggaccgcaatgccgagtatcaggtgaagatcgctgcaatgacagtgaacggttccggacccttcacggaatggaatcgtgctaacaccttggaaaacgatctggacgagacccaagttccgggcaaaccaatttggattagcattcatcctggagccaacaacattgccctgcattggggtcccccacagcatccggaaatcaagatacgcaactacgtgctgggctggggccgtggcattcccgatgagaacaccatagagctaaaggagactgagcgctatcatatactcaagaatctagaatcgaatatggattatgtggtgtcgctaagggctagaaatgttaaaggtgacggtccgcctatatatgacaacattaagacacgcgacgaggagcccgtggacgcacccactccacttgaggttccggtcggtctgcgagccattaccatgtccagctcgtcgattgtggtctactggattgacacgatgctgaacaaaaatcagcatgtaacagataatcgccactatacggttagttatggcatcacgggatccaatcgctatcgctatcacaacaccacggatctaaactgcatgattaatgatctacgacccaatacgcagtatgagtttgcagttaaagtggtcaaaggacgaagggagtcctcctggtcgatgtctgtgttaaatagtacatatcagaatgttcctgtcaccccgcctcgagaggttactgtgcgcttggatgagatgaatccgcccactgtgatcgtccagtggatacctccgaaacatactcttggtcagattaccggatacaatatttactataccaccgacaccacgaaaagagatcgcgactggtcagttgaagcatttgccggcgaggaaactatgctcatgctaccgaatctgaaaccttacacaacgtattactttaaggttcaggctagaacaaccaagggggctaataatgctcctttctcggctctggtatcgtacaccacaagtgcagccgttacaatgcaggagcccgacaccatagccaagggaatcgacaacgagaagctgttgtatataattatagcagctaccgctgtagttctacttgtggtgctcttgggcgtcctattgctctgccgacgtaagccacaatcttcgccagaacacactaagaagagctatcaaaagaacaatgttggcgtgcccaagccaccagatctatggatacaccatgatcaaatggagctcaaaaacatagacaagggcctgcacacagtgacacccgtctgcagcgatggagcctcgagcagtggtgccctcaccctgccacgatcagtggtgcacagtgaatacgaggtggagacgccagtgcccggtcatgtgaccaattctctggacaagcggtcctatgtgccaggatatatgaccacatcaatgaacggaacgatggagcgacctcagtacccgcgcacccagtacagccaccaaaatcgttctcacatgaccatggaggctggcctctcccagcagagtctcacccaaccgcaaagcaactcgatggctcagaccccagagcatccttatggcggctacgatgccaacttctgtaacgcgggaaatgcagctgcaggcaatggctgtgtgtccaccattgaaagttctaagcgtggccatcctctaaagagctttagtgtgccggggccaccacccactggcggagccaccccagttaccaagcatactcccgccgtcacaatacgtccacaaaatcaatcgccctacaagaaaccatctttctcggctgccacgcccaatcgcctgcagggcggtggctcggtagtgcactcaaccgatgagattcaaagacttgcccccagcacatctaccgaggagctaaaccaagaaatggccaatctggagggcctcatgaaggatctaagcgcaatcacggccaacgagttcgagtgttaacactgaagccgccttaataatgtccggctggctgaaagtattagtcgtcaaacagtggatgttacttgttttttagtttctgttttattttattgatttaactcgaatttgtgaaatgcagtgaaccgacttgaattgtgtttccctccagcgaggttcgtttagcttaagttaaacaaatgtgcgatatattaatgaccgaaaagaattgtaaatacgaacgacgccgccatataaatttttaagtctagatacacacattcataacaataaatataaattaggcatagttaattatccgataagaagagtgtaaaaacggggacagaaaacagagaaataagaaattaggcgaacagtagcgtctattgtgcaggatcggttctgtctctaaactgtcacacgacatttcatatttatcaatctgcatcatcttaatttaatccgcaaccgagtgcggatagtctaagtctacatacatatgccattctatattcatatgcaagcagcatcttagctaagtttcatactagtaaagaccctaagaacgtacttttaatctattgtaacccaatcaaacaatcaaaatcattctatctagacttgtcccctaaagtgttcttctagtttgtttatccattcatacgtatgagtttgatacgtgccattcaatgatttgtcgccaatccaacaaaactacttaagctataaagtcaaggtcttgactaagccagcaaagcatttacgatttaaactaaactattataaaatggtggcattgcattgcctgttttaccgcataaggtgtaattaaacttttttaaaagattttgatttgttcaaagtttttattgccaagaaagtttactgttttttatgcgttgttcaccaaaaacactgtattcaacattgctttgcacaacaatctcattaaaatcagcaaaacatttcaaacgacgcaaatgcacactaaaggcatttacgaattgtgaaatttttattgtattgaacgtaaactttgtaatcaaaagaaaattgctaaat

SEQ ID NO: 18609 - protein, 1526 aa, DROSOPHILA
MAITTNRSSRTLWNWLLSSCLIFQLIGSSLASQALSFTLEPQDAVVPEGHSVLLQCAGTASIGRGGKSKSNLPSSVSIRWRGPDGQDLVIVGDTFRTQLKNGSLYISSVEENRGLTGAYQCLLTAEGVGSILSRPALVAIVRQPDLNQDFLETYLLPGQTAYFRCMLGEANWQEGVKHSVQWLKDDLPLPLDKLRMVVLPNGALEIDEVGPSDRGSYQCNVTSGSSSRLSSKTNLNIKKPSDPGAENSVAPSFLVGPSPKTVREGDTVTLDCVANGVPKPQIKWLRNGMDLDFNDLDSRFSIVGTGSLQISSAEDIDSGNYQCRASNTVDSLDAQATVQVQEPPKFIKAPKDTTAHEKDEPELKCDIWGKPKPVIRWLKNGDLITPNDYMQLVDGHNLKILGLLNSDAGMFQCVGTNAAGSVHAAARLRVVPQGVKIKKRKSQGHSTKSLQTFDNLTKRRKPFNSGEQLRTKSGGSFPFPDEDDDLDDNDSGTTRLRIPSGKLPKFEQPLNDRRFNILNAGSALPLDNQSKSYEDDDDDYDEDDPAKEALLEAYKQGEDAHKILDSWQQSKSKKSQQQKQSPASPDSPEQDPSVPHPGGKPLDSGLQARLPSQPRDLVAQIVKSRFVTLSWVEPLQNAGDVVYYTVYYKMNNSEREQKMVTKSHDDQQVNIQSLLPGRTYQFRVEANTNFGSGASSAPLEVSTQPEVNIAGPPRNFEGYARSHKEIYVKWEEPTVTNGEILKYRVYYSENDSGADLYHDSTALEAVLTELRPHTDYVISVVPFNRNGMGDSSAEIRVKTFSSTPSEPPNNVTLEVTSSSSITVHWEPPAEEDRNGQITGYKIRYRKFKDAPQVKSTPANIRYFELSNLDRNAEYQVKIAAMTVNGSGPFTEWNRANTLENDLDETQVPGKPIWISIHPGANNIALHWGPPQHPEIKIRNYVLGWGRGIPDENTIELKETERYHILKNLESNMDYVVSLRARNVKGDGPPIYDNIKTRDEEPVDAPTPLEVPVGLRAITMSSSSIVVYWIDTMLNKNQHVTDNRHYTVSYGITGSNRYRYHNTTDLNCMINDLRPNTQYEFAVKVVKGRRESSWSMSVLNSTYQNVPVTPPREVTVRLDEMNPPTVIVQWIPPKHTLGQITGYNIYYTTDTTKRDRDWSVEAFAGEETMLMLPNLKPYTTYYFKVQARTTKGANNAPFSALVSYTTSAAVTMQEPDTIAKGIDNEKLLYIIIAATAVVLLVVLLGVLLLCRRKPQSSPEHTKKSYQKNNVGVPKPPDLWIHHDQMELKNIDKGLHTVTPVCSDGASSSGALTLPRSVVHSEYEVETPVPGHVTNSLDKRSYVPGYMTTSMNGTMERPQYPRTQYSHQNRSHMTMEAGLSQQSLTQPQSNSMAQTPEHPYGGYDANFCNAGNAAAGNGCVSTIESSKRGHPLKSFSVPGPPPTGGATPVTKHTPAVTIRPQNQSPYKKPSFSAATPNRLQGGGSVVHSTDEIQRLAPSTSTEELNQEMANLEGLMKDLSAITANEFEC

SEQ ID NO: 18610 - DNA, 10343 bp, DROSOPHILA
aacagctgtcagcatttttttttttttgtccgttcggctaaaaaggaaagccctaatgtggcccttggcgttgacaacggggtggagctgaaaatgggggcttttccatggacattcggggatggtgaataagggtaggagaattgccccctgctaagtgacaattattcgtgctagttgtcggtttggttctccaaagtattggtttcgttacgcgattggttagcgttaagtggacgccaatcgcatttggtgatcagagcgaagtaattcccgcctaattatattaacttaatggttttaaaagcaactcatgtcgattattaaaaatgtcttcaaattgcagccatatgttttcagaataattcagaaaaaagacttttgcagaaattctatattttcgatttcttcacaactatgcttaattgttagtacaacttaatttgtaattgtgttatatctctttttaacacatttatcaagcaaatttttaagaagacttttggcaaaactgttatatttccaaaggtaattttgagccagaacatcagcttaacaatcttgaatataaatcttatacgcctaaaaataaatttcctattaccatactcacaattccggaaaagcatgaccacaagtgcgcggctcaagtgggcaccaaatcaactttccccatctatgagtagctcccaaaagaaagggaaaccccctttaatggacgcatttataccaaaatattatttcatatgttgacactcgcacgtaattaggaatcgactgcggtcgagcggttcatgcttgattgactttgactttgagtgacatgtagacggggggcgtgggccagtggcctaattaaaaatcaatcgctgagcgtctaattagggtcctttgattgccgccgaggggcggcgattaagggccataatacgtacgcccccgcagccgcgttttggccacgtgtcctggccgggaaatggagagaaaagcgtttgtacagtgtttatatgtatccgatatttatttatgccttgtccaacgaattatgcgcttcagttgcataaaaagccaacacgtgccgacctctgaccccccgccgtcgttggtgacattttcaaaactgaatgaatctgcagtgagcggaaaatggatttctaatattttccacacaaaaaatgaacgaacatattacggcgagtaatcaaaaaacaaaaagtaaaaaaaaaaagtaaatgtgggaaaaaaatggaaaggaagcttaaaatatgctggcaggcggccacaacttttcccgcaggacgtccgggcttaaaagttgagaaaaatgaaacttttatgagcgcatctccttgggatttcttagatttttactcgactatacatatatataatatatatggagcaattttcttttcgattaaatgcttgagcaggcacagcggacaggcaaaatggcgcgcataaagtgccgcaaagtgctcagaactccatccggaccgcactgcccctcctccgcctgctcgtccaccttcccctccaagtccagcgagtcctccaagtgctcgacgtccttttgcttttcctacgcctgcttgcgtcgcttggcggctccctccggtggcagtccgctgtcgaactcggacatattcagcgccctcgatttgcccaggctcttcatgaagctgctgcgtcccactccgccgccaatgaaaccacccttgggtggtggggctcctggcttctgcgctcctacgtcccgctgctgcagctgtcgcacctccccgctgaccgtcgtcgtgaatcgccgcttggcccgcttctgggcctggatcttctcgggatctctgcaaaattattttaaacaaatttaaaccattactatatatgtatgtacggtatagaacatttgttatattcaaagtattctattctaaatttgctacatttacacatttttaacccgttagtgcatatattagtatctcttaagatttgagaataattatcttcaaagacaattagattattgatcttcatgcgaccttagctcaatctgcttgttatacattcttatacaactattcgattgtaaatagatccgcatccataaacgtttgccactgatctttaaatttatgaatagtctgagaatctatatccattatacatacctctccgtgtaggtcagtcggttggtgggcggggccgccttgggggcggcgtgcttggcggcgaactttgagggcgcctccttgagcgcaaagctcttggcgaagtggcccatgtgggcgatgcgcacgttgaagatgggcttcagctccttgggaaacgtcgagtagaacttcatccaggacacaaaggctgcgggcgggaaagagcagaaggaagagggcggagatgttaatgttaatgcctttagaattaattgatgtcttggcttaagtgctgagcgatgcgtgtgtgtgtgtgtgtgcatgttctgagtgagccgcattcattacaaaataaatttgttaaaatgacaaatgagcagtgtcagcaaaggatttcacatcgcatccacaaccacaatagacccgggcattgtgctcaccggagttaccaagccacacatacgagtatgtatgtatgtggcgcgggaacaaagtgtacacgcttgtggttcgctgttgtgggcatgtccttgctaattacgcagcacttatgccaggcaattccaaattatacaacaatgatatcaaattaccaacggagcagcagttgagcggagcagccactcaggaccgcaattgttaccccgataagcatctcgccatccggcggagtgggatatgtaaatgcgatccgatccgatccgatgtgatgcgatgcgaagtgaaatgagaaatgcaatgcaaatgcccaaagaacaacactttccaaacataacgaaacgaaaccagacagatgcgagtgcgagttgcggggagagttgagtcctttccaaggatacgtaaaggattcgggtagagcaatgagtgtcagcagaaagtgactcaagttttgtcttcatatatatataaagaaaaattataatatgaataatacgtatggtaaaaaatcataaaaacgaattgctaatccatcttctatctattgcaaataacaacctaaacaaaaggtgttgtcccttctcacttgaaaatcatgttttaaattactgttatgttttcttataaccaactatgtttgcattattcatcacactgtacgccgctaaattagctttaataaactagtcgcccttccgttcccaggagttcgtaattgactaccgaagagccgcacatcccggccacacacaccgaatcctccagccacaggacgacggcaggatgattccggaacgaactccagatcccagaaaaacaggaagcactgatggaggacagggatgaggagtggcaagcccagcagagatggatgcaaagacgttcctgccccggcaattaactcgcagcagtgctctctgcatcccggttttcagttcagttcagttcatagtggcgagtgtccttttttggggaccaaagcaccaaaggaccaaagtctcgaagtcaagccctgggctttctggttctggcttaattgccgcaaatgcgattacggccaagtggcagacattaggcaaacaaaaagtatgacggcagcggatgtttagagacgtctgccagccggaagtggcgaataaaataaatgtcatttcgtggaaagaagtttcgtggtggaggagagagtgcggaatccaccgcagaagccacacaaaatggctttttatgccattgtctcggtggtttttggtcttctctggctgtgggtgtgggtgtgggtgttcctcctccggattttgtggtggtttcttcagcgcgtgtccatgcggtttgtgtaggcgtggcaaattgttgtgattgtttttcagtccacccattgccattctattaccattgccatttcgcaacccccagacgaagggttctagatgggatttcctcactcgatacccactaatcgggggtgtcgccctaaagcgtgggacttatgggtcatcaggggcttagtttcgaaaggcattaacagaactctttccatttagcggtataatggcaaacaatgggccaatggaccaaggcagtgaaaatatgccatagaatacgccaaaaaaatgattgtaagtcaaaggggaactatgaggatcagcgtgcatgtcagcggattatcctgcgtttgaaaaacagatgtttttcgagagagagatatatcgggaaatgtggttattttgaaatatacaatacattttaggtggtttaaaaacgcattattactttcattgattgaagacctcaataaatagtcttcaattatagaatccgcaagaacttaagtatagtcagaagaatatataatcttctttctttggagaacattttacattccctgttctctaccatttaccattgtcttacatctgcgaaacgcactgtagcacgaactactgtaactttaaaaagcctgaagtctgaagacaaaaagtgaattccaagttgaaaattgtttcaattaccgatgcaatgcaagtcgcagatgttcttccctctctttcccagctcgtttgtccctccatcgcccgtctctttcgtacaccacccacccacatttgccgtccctctctggctgccttttatctgctgctttgtacagttttgttcaagcgtaatactttttaatggctttttgattggacgcagcagagcagcagcagtagaaaactgcatcctccagcaggaccctttcccctgcccacttcgaatccggatgtatcgccctgtctctttcgccccgcctagtgtcgtctctttcgggcattttggctgctccgctcttaagttttgccaagtggcttcctgtcttgacgcttgactcggcgcttaagtgcaatttgcgttgccattttgaccgactctcgctctcgcctatatgaatgtatctgtgtatgaatgtatttatatatccttcatcctttatttatcttgctgttttgccattgttttgcgatatttcgctcagtttccgtttcctgtttcgagtcgcagtcgccatctcagccatcaaaggatcttccccattcgcattgcctggtttttttggttccttttccccatttatgattcattttgggtgcctcttttcgattagaatcgtttccactcgcctgccgctcgcttttatgagtcctttatgtttcaatcgcaggaaaatggggaaaatatcgtctggattcaactcaacccttcaaacgcgccttggtaacatctaattaacttttttccagccttttcaacgctgcaattacattttcagcagaatggtagacaaatgcatagctggcagacgtggatatacctagtgaaaatattattaggaacagtgcactgtgtaaacgtaaagttacaacatttctacaaaacagccccatcagtttgaatttttaaaatttttacattcaccgcttatcctcttgaacttcataagtcttaagtcccatactgcttatagttttcacgctatgatcgaacaactacagcagattttcatttcgtataaataggtgtgcaaagacacatccctcctggtgcgattcgtcactacttggactcctattctcagtgattaataaatgaaatagtttgttatctaagaaatatttgtgaaagcagtagcttagtttttgattgtactcttattagattgggtaaaacatcccttgatataatatacccttttcactactttttaatgggtagctcccctactcgcgttttgaaaagcaaataaaataaaatgggaaataaatgaaggcagaaaaaaggatcgggcgatgaaagaagtcgctggtggtcacttgccgcgatgacggacgaaggtggtggccagccagggggttggtggtcgagagggggtggtgttgggcggggtggttgggtggttggaggtcgtcgaaggagcgaacagaacagaacggagcggagcggaagtgggggaatcatttgacacgcaatcgaaattaacttcaaatatgaaataatttttgtgtttttaacgcgcgctgccccgtggatgataactgcgcccgtctgggggcggtcaaaagagcgggggcgtggcccgggcttccaacttataattggaaaaatagccgagagtttgtgtgtttgtcttggtgccttttttgtattcagccacccgagtgttgtaaaaaatcgtaattacaaagttaatgttctttggtgaaaggattaaattgctagtttgtccagggatatcggagttggggcaattggaaaagtaagtgccatgggaactcgtccaatgccacaggatacgtaggggttctccgtatattctgaatacgaaaaatccgacagcctgcttgtggtaatggtacgattaattggtattgattgcagtcagcattaacgaagggaaaatcagttaaagcgactcaaaagataaacattctatactcagatacattagaaatgcacagctttcaaaagcaattcaagtgaaagacgtattatagcaggagtgcagccgtaatagaggaacctacctttgcaggacttgtcgtgtagttcgcgatcatcctcgagcagcgtctggaacttgtgctgcagattggaggccgcctcctgcaccgtcctggcctcatcgtccttgggcagcagggtctgcaggtaggcgtacatgtcgccctgctggatgcggatgcgcttcttctccagatgccgcacgaactgggcctcgctgggcgtcaggaagagcacggctctgccctttcggcccgctcgagccgttcgacccacgcggtgaacaaaatcggcggtggtttgcggcggcgtgtactgcaccaccagttttatgtcgggaacatcgatgccacgacccaccacatcggtggccagcaggacgcagctggcgcaatcgcggaagccacgaaaaacgccctgccgttccgtctgcgtcatggagccatgtagtctgtggaagaaacaagcacttaggaggtgcaattcattacaaaacatcaaagcaactcacttgaagaagcgcagaccctgcagtaaaggtatgtcgccgtcgtcatccgaatcacctttctcctgctcgtcctcctcgtcgagaactcgcctggtcaacgcctcgttgagcatgtcgtgatggaagttcaccatctccgtggtgctcatgaacacaatcgccttgaactgcttgggactggcgtccacttccttggccagcagcgaagacagtgccaccagacgtagttttggcggcaccaccacatagctgagctgcaggttctcgggaatactcagcacacccgtcacatcctcctggtactcgcccagtccgtcgtccacctctagcaaggcttctatggtctccttttggtagccatccttgctcttcagcgccgcactcgccgcctcgtcgctgttgtctatgtacaggggattcttgagggtcaaaccggccagctgttggacctgcgaagtcaaagtggcactcagcagcatcctttgcagctggggaagctccttgtcctcgcactccgcacgctgcttgtcaatggcctccaccaactgcttgacatcgcgttcgtagcccagctccagcaggcgatctgcttcgtccagtatgaggaactgcagtttggtcagcttgaaggaggccgtgtgcagcaggtgatccaccagacgaccaggtgtgcctatcagtatgttgatgccctttcttagcctggccttttcgcttttcctgctctcgccacccagcaaagaaccgggcactatccatgtgtacggcttgaccagcttctggatgagttcgtatgtctgcatcaccagctccctggtgggtacaatcaccagggccagcacgccatcctttcgctgtatccgtggctgctgtttctgcaacagttccaccaagggtagagcatatgccagggtctttcccgagcccgtctgcgaacgtacgagcacatccttgccctggagaacttcgggaatggtcttctgctgcacgctagttagctctcgaatgctaagcagatcctccaagttctttacagcatgaggatgcagtcccaacgtggatattttagagcctgtaaagatggtctccttgacgggcttcaccgctctttggcccagttgcttgagtgcctccacgtcgctttggtcgaagaggccgatcttcttggtgcgaaaacggtttgtggacgaggtttcctcggctttcggtggtttcttcgcggtttgtttgggttccttttcttgtccaggagattgtgcactggattcatctggttcctcatcggatgttgcagattcttcgccggattcgccggaatcctcaatatctgatgactttttggactccttaacggctgaactcggttttaccctcggagatccccctcctgagttgttcttcgcatcctcctcatcggcgctggcttcctgatcccctcctccctcttcacgacgcttttgccgcctctcctcctccagttgagcgcggaaaaggtcaccgggcgtgggtaattgatttggattttttggctttttgttgctcttcagcgcccgcgtgatctgctcttcgctgagcttcgtcagtggcttgccctgcctctgtttcttgcccaatctttcggctcgtgtgatttttggcttggctttctgggcaaccaccggctttgtggtcacatttagcatgaaatcgtcgcctaaaacgctcttaacaggtggtttcgttgggctaacattgaacataagatcatcgttggatgcatttgctttgggggatgctgaaagagtggaaattgcggatttgctggaggaaactgaaggcgtcggcgatttcgtggtattgggaactgatgaatttgtaggttcaactttcgaaggaggcgcccttcttcgcacaacgattgccttgactttgggcttgtccacattgaattgaaagtcgaaatcctgggatttctgtgcacgttttttaaccgaaagcgcgggcgactgctgaaatcaaatatacaatatataaacaccacttgaataacatagacatagccactaacctgttgatttttccgagccgacgactttacagtaacattcagtgatatattttccaccattttggcacaattgatgctcgcaaccaaagaagaatcgcgaaacttttgtaaataataacgaattgaataaaacgtgcgtggctcttcttcttcgtttgccactcacagcgaaaaggtatggttacatctgttagcgcgccagtgctacccatagaaaagcacatagcgctgccagatgaggaaaaaaagaagcataagcgctaaattcaaattgcacaatatatcgtttaaacatctttagttgaatttggcaaaacacaagagcccgttatatttaatattgtatattaatatatttcgtatttggcaaattcagtaacatgtttgtattttaaagtaactttctctaaatataatatgcttacaacgagtttcgcacgcgacatttgacgacgaccaacaaaaaaaaaaaaaaatagtttcacgcattcaactgccttgggcagcgaagcgcatggggttccgtagtaattgtggtttttggtgggtggtgctgggtggaatgggctggtggttctgtggtctggcggctgggtggccctggtggtttacatacgtgggtgtctgctctccttcgtttttcacatccatgtgggcatgtcagccccagctgcgggcacagatgtcgaccacagaccaatgcatgacggtgacggctgcctgtgatcctgctggcgatggtgatactcccccgggactggcctcaggaaccccgacagcgctctgcgatttgccagctccctcctccatgcccatgacctcatcccgggtatgcccctgctgctccgtcgtttggcaggccgcgtacaacaactatgcggtcacgtagtactcccgctgcctcttctggcacttctcgcgcgcaatgtagcacaaggcgatcgtgatcaggagcactatggtcacgcccatgccgatgcttacccacatgatctcctcgttgatgcccacataggagcgtcctggagaaaacataacataacatacaataaatcaatgttaggggaataatccacatacagaacccaccattgtagtagtgattggagtagccggccttgccagccactcgacccgctggcattttgcgaaaagttcg

SEQ ID NO: 18611 - DNA, 3609 bp, DROSOPHILA
gcaaacgaagaagaagagccacgcacgttttattcaattcgttattatttacaaaagtttcgcgattcttctttggttgcgagcatcaattgtgccaaaatggtggaaaatatatcactgaatgttactgtaaagtcgtcggctcggaaaaatcaacagcagtcgcccgcgctttcggttaaaaaacgtgcacagaaatcccaggatttcgactttcaattcaatgtggacaagcccaaagtcaaggcaatcgttgtgcgaagaagggcgcctccttcgaaagttgaacctacaaattcatcagttcccaataccacgaaatcgccgacgccttcagtttcctccagcaaatccgcaatttccactctttcagcatcccccaaagcaaatgcatccaacgatgatcttatgttcaatgttagcccaacgaaaccacctgttaagagcgttttaggcgacgatttcatgctaaatgtgaccacaaagccggtggttgcccagaaagccaagccaaaaatcacacgagccgaaagattgggcaagaaacagaggcagggcaagccactgacgaagctcagcgaagagcagatcacgcgggcgctgaagagcaacaaaaagccaaaaaatccaaatcaattacccacgcccggtgaccttttccgcgctcaactggaggaggagaggcggcaaaagcgtcgtgaagagggaggaggggatcaggaagccagcgccgatgaggaggatgcgaagaacaactcaggagggggatctccgagggtaaaaccgagttcagccgttaaggagtccaaaaagtcatcagatattgaggattccggcgaatccggcgaagaatctgcaacatccgatgaggaaccagatgaatccagtgcacaatctcctggacaagaaaaggaacccaaacaaaccgcgaagaaaccaccgaaagccgaggaaacctcgtccacaaaccgttttcgcaccaagaagatcggcctcttcgaccaaagcgacgtggaggcactcaagcaactgggccaaagagcggtgaagcccgtcaaggagaccatctttacaggctctaaaatatccacgttgggactgcatcctcatgctgtaaagaacttggaggatctgcttagcattcgagagctaactagcgtgcagcagaagaccattcccgaagttctccagggcaaggatgtgctcgtacgttcgcagacgggctcgggaaagaccctggcatatgctctacccttggtggaactgttgcagaaacagcagccacggatacagcgaaaggatggcgtgctggccctggtgattgtacccaccagggagctggtgatgcagacatacgaactcatccagaagctggtcaagccgtacacatggatagtgcccggttctttgctgggtggcgagagcaggaaaagcgaaaaggccaggctaagaaagggcatcaacatactgataggcacacctggtcgtctggtggatcacctgctgcacacggcctccttcaagctgaccaaactgcagttcctcatactggacgaagcagatcgcctgctggagctgggctacgaacgcgatgtcaagcagttggtggaggccattgacaagcagcgtgcggagtgcgaggacaaggagcttccccagctgcaaaggatgctgctgagtgccactttgacttcgcaggtccaacagctggccggtttgaccctcaagaatcccctgtacatagacaacagcgacgaggcggcgagtgcggcgctgaagagcaaggatggctaccaaaaggagaccatagaagccttgctagaggtggacgacggactgggcgagtaccaggaggatgtgacgggtgtgctgagtattcccgagaacctgcagctcagctatgtggtggtgccgccaaaactacgtctggtggcactgtcttcgctgctggccaaggaagtggacgccagtcccaagcagttcaaggcgattgtgttcatgagcaccacggagatggtgaacttccatcacgacatgctcaacgaggcgttgaccaggcgagttctcgacgaggaggacgagcaggagaaaggtgattcggatgacgacggcgacatacctttactgcagggtctgcgcttcttcaaactacatggctccatgacgcagacggaacggcagggcgtttttcgtggcttccgcgattgcgccagctgcgtcctgctggccaccgatgtggtgggtcgtggcatcgatgttcccgacataaaactggtggtgcagtacacgccgccgcaaaccaccgccgattttgttcaccgcgtgggtcgaacggctcgagcgggccgaaagggcagagccgtgctcttcctgacgcccagcgaggcccagttcgtgcggcatctggagaagaagcgcatccgcatccagcagggcgacatgtacgcctacctgcagaccctgctgcccaaggacgatgaggccaggacggtgcaggaggcggcctccaatctgcagcacaagttccagacgctgctcgaggatgatcgcgaactacacgacaagtcctgcaaagcctttgtgtcctggatgaagttctactcgacgtttcccaaggagctgaagcccatcttcaacgtgcgcatcgcccacatgggccacttcgccaagagctttgcgctcaaggaggcgccctcaaagttcgccgccaagcacgccgcccccaaggcggccccgcccaccaaccgactgacctacacggagagagatcccgagaagatccaggcccagaagcgggccaagcggcgattcacgacgacggtcagcggggaggtgcgacagctgcagcagcgggacgtaggagcgcagaagccaggagccccaccacccaagggtggtttcattggcggcggagtgggacgcagcagcttcatgaagagcctgggcaaatcgagggcgctgaatatgtccgagttcgacagcggactgccaccggagggagccgccaagcgacgcaagcaggcgtaggaaaagcaaaaggacgtcgagcacttggaggactcgctggacttggaggggaaggtggacgagcaggcggaggaggggcagtgcggtccggatggagttctgagcactttgcggcactttatgcgcgccattttgcctgtccgctgtgcctgctcaagcatttaatcgaaaagaaaattgctccatatatattatatatatgtatagtcgagtaaaaatctaagaaatcccaaggagatgcgctcataaaagtttcatttttctcaacttttaagcccggacgtcctgcgggaaaagttgtggccgcctgccagcatattttaagcttcctttccatttttttcccacatttactttttttttttactttttgttttttgattactcgccgtaatatgttcgttcattttttgtgtggaaaatattagaaatccattttccgctcactgcagattcattcagttttgaaaatgtcaccaacgacggcggggggtcagaggtcggcacgtgttggctttttatgcaactgaagcgcataattcgttggacaaggcataaataaatatcggatacatataaaca

SEQ ID NO: 18612 - protein, 975 aa, DROSOPHILA
MVENISLNVTVKSSARKNQQQSPALSVKKRAQKSQDFDFQFNVDKPKVKAIVVRRRAPPSKVEPTNSSVPNTTKSPTPSVSSSKSAISTLSASPKANASNDDLMFNVSPTKPPVKSVLGDDFMLNVTTKPVVAQKAKPKITRAERLGKKQRQGKPLTKLSEEQITRALKSNKKPKNPNQLPTPGDLFRAQLEEERRQKRREEGGGDQEASADEEDAKNNSGGGSPRVKPSSAVKESKKSSDIEDSGESGEESATSDEEPDESSAQSPGQEKEPKQTAKKPPKAEETSSTNRFRTKKIGLFDQSDVEALKQLGQRAVKPVKETIFTGSKISTLGLHPHAVKNLEDLLSIRELTSVQQKTIPEVLQGKDVLVRSQTGSGKTLAYALPLVELLQKQQPRIQRKDGVLALVIVPTRELVMQTYELIQKLVKPYTWIVPGSLLGGESRKSEKARLRKGINILIGTPGRLVDHLLHTASFKLTKLQFLILDEADRLLELGYERDVKQLVEAIDKQRAECEDKELPQLQRMLLSATLTSQVQQLAGLTLKNPLYIDNSDEAASAALKSKDGYQKETIEALLEVDDGLGEYQEDVTGVLSIPENLQLSYVVVPPKLRLVALSSLLAKEVDASPKQFKAIVFMSTTEMVNFHHDMLNEALTRRVLDEEDEQEKGDSDDDGDIPLLQGLRFFKLHGSMTQTERQGVFRGFRDCASCVLLATDVVGRGIDVPDIKLVVQYTPPQTTADFVHRVGRTARAGRKGRAVLFLTPSEAQFVRHLEKKRIRIQQGDMYAYLQTLLPKDDEARTVQEAASNLQHKFQTLLEDDRELHDKSCKAFVSWMKFYSTFPKELKPIFNVRIAHMGHFAKSFALKEAPSKFAAKHAAPKAAPPTNRLTYTERDPEKIQAQKRAKRRFTTTVSGEVRQLQQRDVGAQKPGAPPPKGGFIGGGVGRSSFMKSLGKSRALNMSEFDSGLPPEGAAKRRKQA

SEQ ID NO: 18613 - DNA, 4749 bp, DROSOPHILA
gtagtcattttgcgccaagcaacgataaagaatacgcgaggaaacagtccggcatccctattcttgctctgaaacatggtggcagctttaccatgtgtactaaagaaactaagttgacagctccggttcttaagtataaacaactttgcttcacgtgctaaacgttataagtaacaaaaataaaaggttgttttctggtccaatatatacccaactgattagtaaaagctatgtcagaaccagagccagatgtcaagcccaacatactaataaccggtgggtattcctgctcccctcaaacattaatatgtttttgttttacataaaaatcaatgtatttttaggaactcctggagcggggaaatcgtatttatgcgaacgtatagcctccgaactaaagtttgagtggctggactgctccaaaatcgccaaggagaaaaattttgtagaggaatatgacgaggagtacgattgtcccattctggatgaagaaaaggtatagatcttgttcattacctaataagtttaatgtatatatggtattgtttcagctgatggatcacttggagcccctgatggcaaaggggggcaacgtcgtcgagtatcatggctgtgatttctttccagagcgctggtttcaagccgtcttcgtggtaacctgtcccaatacaacactctacgatcgtctgaaggagcgcaactacaacgaaaagaaactggcatccaatattcagtgcgagatctttggaaccattttggaagaggcccgcgattcctacaaatcagatatagtattcgaacttaagggcgaaacaaaggcagatgcccatataagcataaaaacagtcaaaaactggtatcgtatgtggaaaagaaaataaaaaagcgattggtactttgttatactcgttatcttatgtataaatgcttaaacatttgtgtgtaaagtgactattatttacaacagagtgtataaaatcgaaatactaaagtctacaaactaaactcgtgtcatcttaaagcgcagcggtccatccggcgcgtacatgaaagtgactgcgtaatccagtggcttgtggttgtactccagtttgtagtttcgtagtagcttggccagcagtatttgcatctccagatcagcgaatcgacgacccagacacatccgagctccatagccgtaaggcagcgaggcgaacgggtgaagtttgcccggagtaccaccatgctgtggtttcaaccatctttcgggcctgaaagtggctgcatccgtgacatactcctccatattacccgtgacaatagtcggaaagaccgcctgcactcccttgggcacctggtagccacagatgacactgtcctccatgagagttcgtccgtttccaatcaccgtgctgtacatgcggaacacctccttgatgaagcccttcaggtggtgcatctgatcaagcagcggaattgtgagtggtgtgtttggatccggaagtagtcgctttaattcctcgtgaaccttttgctgatccactggacgtgtggccagttggtacaacatcgaacaaacagccatggatatctgtagcatacatatcaattagaatttctaagttcttttcaatttatcatatctgaccgtatctattccgacgagaatcaaatcaagtgccataatggtggctattttttcgtccttctgcgaaaggatgaccttctccaccagcgagggctcgccggcacgtagactgggatcttgggtcttcagtctttcggtggcactctgaatgtacttcatgcagacactgcggggccatagaaattatttattattgaacaactgttttttataatgtatttacccaacaaaaaagttcatgttcttcacgtagcgcgtccacaaaggcgtgggaaagtatctccaatagggagctttcagctccaaagtggccacgttgcgcagggcatacttggcggcgtcaatgatttgctggggttccgaatctggcttcagattcgattccaggcagcccaaacgagtgtcgagggcaacgcgaccaatgcctgatgatcgaacattgtgagttatcttatattttaatcatattcacgaggaatacttacattccagggaccatttgtgaatctcattgtcgaaatcctcggggagctcttggttttcatccaacaggttttcgcagcgcaccaggaagtcctcggtgataacctccagcggctgtagataccggcgaatggtggacaactgcagcaccggtttctggacacgcgaacggaactcccgccaaggctctccatgtctgaattaaggcagaataaattaaaagctcaacaaatgaggcaattccacctacactccgactacgccgcccagatccccaaagaaatccttgcgcaccacactcttgtacttgaccaaactgggcatcgagggacggaacggggtgggtccctcgctacgatagcactggaaattcataaaattgctatagcttaatatccgacaactgtgggcaatttgtacggtgccataaatttgtgtaatggcttggtgccttcgtggttcgttggtcatgcggaaagtcccaagccgctggcgtgtcttaaagcttaccttttcaatttcatcggcatcgtagatgaacaaaagatcgggccgtcctataagacctccaaaacgcacaattctaccataacgatcgtgcagcagcgatgatattttggccacatcagagatggtgtattgaccaattattggcatcagtctatggaatagtcaaggttaaacaaactatctacgacaatgaaagatgcattgactttttccaatggcgaaaaaatatgatttgtgagcaaaattcgtcagcatgcagcaaaatttcacacgttattagggcgaccttgaatttagcgctaattgaacgctaattaactggatgacgtgccatcgaacggattgtaacttaaggtttggaattggacaggtgtaaattgatggaatcccacacgcacatttaacaagaatcgttagggaaaccaaagtcccacataaatatttagttagcatacatcatttttacgaggtgggctaaaaactagacgacgttgcgtgtttttcgcacaaaatccaagtaaacaaacgaacaacatcatcatggctaattcaataagtgttgaacaagctggccaagttaattgggtcaagtgaaacggagagtgtttggttttattgcaattgcagttagcttggagaaagcgagcgagtttgtgtcttgagtctttcgtttttctgatgatgggttttggtttggtttggttttcggttacctccatgtattgcccagaatggggatgggcttaggtccgggtatttgattgtagggcagagcgttttgccactcggaagtggagtgtattcgcggtgcactggcctcctccgaatccgccagatggggacaagtggccacgcccgtggagctttcgcggcactgcgctcgcctggaacctgctccactgatcctcggcacacattgtcgaagattggggccacaggagactgtggaacgccaagctttcagcgacagattgttcattactcgtccaaaccgatttaaattcaaatcagatttcactggtcgtaagcctcgatttccaattgtcttctgttgacgttgacacactgatatctgcggggaaacgaaactggcttctagcgggaaccgcactcaagttccacactcaacggctgcctggtgcaaactactggcggcccaagcttcgccgatccaagcaagctacgttcggaaggtcttcagctggctctcttggctgtttttaaaagagaaagtgctcttttcaatttggcggtttgctttcaaaactgttgaaatgtaaacaattgtttcatatacattctttagatgatgttctgaacattctaaactcaattaccatatcttattgttccaagttatttgttttcttggtaaagcatttaaatatcctgttatcctcttgatatttatcatacgccaaagtgtcgaaattattgcatgctatatatttctttatgacataaaaatcactgtgaacggcagtccacttattgaaaaaagtttgttcgcattattgtacgccagaggtgtccaatttccagacccgcgggttaaggagtttccctcccgtcgctcagtgtatacaatgaatttggcaggcgtgtgcggctgggcacgtgctaacgaaattcaaatcagtcgttgttcagtcgccaacaaagcaagcttttgctgtgcaacgtattttttgctgtagttaattaatgcgtataactgatggttaacctaaaagcaaaattaatgttatgtggtaaagtgtgttggcatagcatttctaagccgggacaagcaatccgtatagttatgttaagaacaaatgcagaaatattccggaataactcttgcagaagctttgtgatagaaaggttaaggaatacctgattcggcaaatatttactttcaggaaatccctttatttcaaatgtttctatggcaaatatttacaaaataactattcataagagtcatagtacctagaaaaataaaataaaaaatcctatttatattcgaaaaaatattgtgaaagaatatatcgataggatgttctacgaattttggaaaactcaatagttaagctgcgccccatattttgcgaaccctaaacttactttgttcaaatgatcaaatt

SEQ ID NO: 18614 - DNA, 1812 bp, DROSOPHILA
gttgagtgtggaacttgagtgcggttcccgctagaagccagtttcgtttccccgcagatatcagtgtgtcaacgtcaacagaagacaattggaaatcgaggcttacgaccagtgaaatctgatttgaatttaaatcggtttggacgagtaatgaacaatctgtcgctgaaagcttggcgttccacagtctcctgtggccccaatcttcgacaatgtgtgccgaggatcagtggagcaggttccaggcgagcgcagtgccgcgaaagctccacgggcgtggccacttgtccccatctggcggattcggaggaggccagtgcaccgcgaatacactccacttccgagtggcaaaacgctctgccctacaatcaaatacccggacctaagcccatccccattctgggcaatacatggagactgatgccaataattggtcaatacaccatctctgatgtggccaaaatatcatcgctgctgcacgatcgttatggtagaattgtgcgttttggaggtcttataggacggcccgatcttttgttcatctacgatgccgatgaaattgaaaagtgctatcgtagcgagggacccaccccgttccgtccctcgatgcccagtttggtcaagtacaagagtgtggtgcgcaaggatttctttggggatctgggcggcgtagtcggagtacatggagagccttggcgggagttccgttcgcgtgtccagaaaccggtgctgcagttgtccaccattcgccggtatctacagccgctggaggttatcaccgaggacttcctggtgcgctgcgaaaacctgttggatgaaaaccaagagctccccgaggatttcgacaatgagattcacaaatggtccctggaatgcattggtcgcgttgccctcgacactcgtttgggctgcctggaatcgaatctgaagccagattcggaaccccagcaaatcattgacgccgccaagtatgccctgcgcaacgtggccactttggagctgaaagctccctattggagatactttcccacgcctttgtggacgcgctacgtgaagaacatgaacttttttgttggtgtctgcatgaagtacattcagagtgccaccgaaagactgaagacccaagatcccagtctacgtgccggcgagccctcgctggtggagaaggtcatcctttcgcagaaggacgaaaaaatagccaccattatggcacttgatttgattctcgtcggaatagatacgatatccatggctgtttgttcgatgttgtaccaactggccacacgtccagtggatcagcaaaaggttcacgaggaattaaagcgactacttccggatccaaacacaccactcacaattccgctgcttgatcagatgcaccacctgaagggcttcatcaaggaggtgttccgcatgtacagcacggtgattggaaacggacgaactctcatggaggacagtgtcatctgtggctaccaggtgcccaagggagtgcaggcggtctttccgactattgtcacgggtaatatggaggagtatgtcacggatgcagccactttcaggcccgaaagatggttgaaaccacagcatggtggtactccgggcaaacttcacccgttcgcctcgctgccttacggctatggagctcggatgtgtctgggtcgtcgattcgctgatctggagatgcaaatactgctggccaagctactacgaaactacaaactggagtacaaccacaagccactggattacgcagtcactttcatgtacgcgccggatggaccgctgcgctttaagatgacacgagtttag

SEQ ID NO: 18615 - protein, 553 aa, DROSOPHILA
MNNLSLKAWRSTVSCGPNLRQCVPRISGAGSRRAQCRESSTGVATCPHLADSEEASAPRIHSTSEWQNALPYNQIPGPKPIPILGNTWRLMPIIGQYTISDVAKISSLLHDRYGRIVRFGGLIGRPDLLFIYDADEIEKCYRSEGPTPFRPSMPSLVKYKSVVRKDFFGDLGGVVGVHGEPWREFRSRVQKPVLQLSTIRRYLQPLEVITEDFLVRCENLLDENQELPEDFDNEIHKWSLECIGRVALDTRLGCLESNLKPDSEPQQIIDAAKYALRNVATLELKAPYWRYFPTPLWTRYVKNMNFFVGVCMKYIQSATERLKTQDPSLRAGEPSLVEKVILSQKDEKIATIMALDLILVGIDTISMAVCSMLYQLATRPVDQQKVHEELKRLLPDPNTPLTIPLLDQMHHLKGFIKEVFRMYSTVIGNGRTLMEDSVICGYQVPKGVQAVFPTIVTGNMEEYVTDAATFRPERWLKPQHGGTPGKLHPFASLPYGYGARMCLGRRFADLEMQILLAKLLRNYKLEYNHKPLDYAVTFMYAPDGPLRFKMTRV

SEQ ID NO: 18616 - DNA, 3611 bp, DROSOPHILA
ttagtatgcattaataaatgttcacaacttaattttccatgaaataaatttagcaaaaggaaaactaaaacatacaattgtagaggaaggtgtactttcgtatcgagagctcttcgattataatatctatggtgcaagctatcagtgcggtgataatgccaatctgtataaaaatgatccatcttatgatgtccttgcgcagggagaatcgctctgtcagcctctttcgctgctcatcctggaagagcgtgttctcgcatacttcgtagtccaagctctgtaagtgcataagtttttgataatcgtatcggtcaagctccacaccctatgtgtacatatgtacgagtatgtatgtacgtacctcgtaattgggcgtggatgcggctgctgttcgggatctgaggtggaaaatgggttcgctgctgttgatgttcctattcgggctgcctgcacttccattaattggcttataaacaaagcgcataaggaaataaaattaatatgagtgtttagagataagcccgctcaaaaaccgaagcggtgattcattctaatttagtttaccttagttacatggttggatactcacaatatcgggaggcactgaattgttgcccattagcagtggctgagaatcatccaataagtggttattccccgaaagcgtcgctcttctagctaaagcactagtggagggctcttctctttggtggagtccgaaatcctgcacagctttggaagttggacctgcctccttttggagtatgattggatcatcctcagcgcttgattcgccatcgagggtaatcagtgccttcctatcgtccattatttaaaacaataataacacaagtgaccgacaacaaacaataaaaagcaacagaacaaaagccgaatgagagtatggttactcgtgggccattgagaaataccaaaatctcgattattcggcaacttagtattttatggagggcttttttcgcagataatctcgaaagcgaatctttaaagatactttattgaaaaaagcaaaatataaccattctttagtggtcctaaatcgaaaacttctgtagattctttaattttagaaatatatttaggacagccttagtcttttatcaatgcattgtttttgaacgttttgccatttggtttggattcagaatctggcgcggagtctagttggtttccttattgagcctcttacagattcggctcaaactgaaaattcggatttagaaacttgaacttggctgcctccaacaacatgcggttgtgctcgatgcggttgcggcagtgcaactcctgacttatttgggccatcgagcgctccaggcgctgcagcacatctcgctgaggatgctccaagaagtgggccatggatagcgattgtgagagggcctgggagcgtgagtactccatggagacgtcctccatcgatgaagccagcgatccactggatttactctcgccctgcactggtggaacctggctcaaatctatggcagccggctgatcagccaggaatgacggaccactaccctgctcaggcttgacaggacgacccagaaaggagacactggcaggagtcgaaccgccgggcagtgtttccaccgagatgtttgagacctgaaaaaatacatgtaaataggcttcattaaatattgaaatatgttcaaaacttgatatttaaaatatgatctacaaaatatatatgtatatttatttgcgaataaaggaaacttacgttctgaacgacaattcccaagttcttagggatatttggtagattagctttatctgaagtggaatcttcgagctggaaaaaaacggagatatcaagctcaccaatacatgtcacaacaatacattaagctatttcgctatccgaacagatacagtattcgattctaacggtaaaaggcaaggtgagagatgtcgacatctcgcttctgcccacccaaaacataccttgcgggtagctccctcctgctcttgcttgtggcgctgaaaaaccgttttgattttcagctcgtggctttcgtttccagacggaacagcagcttgcatgtccacgaacaccccggaatcgctctgcgcagctgtacttgtggctgcaaccgcaactggtgccttcttgcgcgacttggcaaagcgtcggtttttcatgatccgatcacggcgttcttccagtgcagccaccttcatttcatggagtttgcccaacaaggaactatgacgtctctgcgcacggggattgccaaaataaaaccacgttaataactttcatttacccctagcaaatgggtggaatccctaccttgatgtgcatgtgaaagttcccggtggagcggacactgccgcgataaatccgatccggcggacagtagcagcacttgaccgtaacattgtcgcccacctgcttctcgatgcgatacagttccccgttcaggatgtacggcacatgctttttcagctccatcttttcttcagaaccgtccaagtttacggacatttttcagtttcataaatgggaatgaacctgctagctttcgagaacgaagggaataggaggaatgtcaaagcagaggaagatacagattctctcctcgcaggaataggaagaaaatggaatgaaagagagaactaggcaaaagcaacggttcttgactaaccgaagatagacaaaaagaatagaaaaaggcccctttgtacgtttaaagttggcaacattattagtgttaaaaaattggtcacgaagtgactttatagtgacttataaataatggcattattacttacgtaaattacttttgtcctttgaactgtatgctagaataggtcaaataggtattcttaggaaaattaaattaatttattttacgccaatataattgtaacaaatttctatatttgatctaaggtctaaaatatgaaataaaagcctatttatattatactgacgagaaatatttaaaaacctttttgaaataattgaactacatatgtagtcattttgcgccaagcaacgataaagaatacgcgaggaaacagtccggcatccctattcttgctctgaaacatggtggcagctttaccatgtgtactaaagaaactaagttgacagctccggttcttaagtataaacaactttgcttcacgtgctaaacgttataagtaacaaaaataaaaggttgttttctggtccaatatatacccaactgattagtaaaagctatgtcagaaccagagccagatgtcaagcccaacatactaataaccggtgggtattcctgctcccctcaaacattaatatgtttttgttttacataaaaatcaatgtatttttaggaactcctggagcggggaaatcgtatttatgcgaacgtatagcctccgaactaaagtttgagtggctggactgctccaaaatcgccaaggagaaaaattttgtagaggaatatgacgaggagtacgattgtcccattctggatgaagaaaaggtatagatcttgttcattacctaataagtttaatgtatatatggtattgtttcagctgatggatcacttggagcccctgatggcaaaggggggcaacgtcgtcga

SEQ ID NO: 18617 - DNA, 1265 bp, DROSOPHILA
gagagaatctgtatcttcctctgctttgacattcctcctattcccttcgttctcgaaagctagcaggttcattcccatttatgaaactgaaaaatgtccgtaaacttggacggttctgaagaaaagatggagctgaaaaagcatgtgccgtacatcctgaacggggaactgtatcgcatcgagaagcaggtgggcgacaatgttacggtcaagtgctgctactgtccgccggatcggatttatcgcggcagtgtccgctccaccgggaactttcacatgcacatcaagagacgtcatagttccttgttgggcaaactccatgaaatgaaggtggctgcactggaagaacgccgtgatcggatcatgaaaaaccgacgctttgccaagtcgcgcaagaaggcaccagttgcggttgcagccacaagtacagctgcgcagagcgattccggggtgttcgtggacatgcaagctgctgttccgtctggaaacgaaagccacgagctgaaaatcaaaacggtttttcagcgccacaagcaagagcaggagggagctacccgcaagctcgaagattccacttcagataaagctaatctaccaaatatccctaagaacttgggaattgtcgttcagaacgtctcaaacatctcggtggaaacactgcccggcggttcgactcctgccagtgtctcctttctgggtcgtcctgtcaagcctgagcagggtagtggtccgtcattcctggctgatcagccggctgccatagatttgagccaggttccaccagtgcagggcgagagtaaatccagtggatcgctggcttcatcgatggaggacgtctccatggagtactcacgctcccaggccctctcacaatcgctatccatggcccacttcttggagcatcctcagcgagatgtgctgcagcgcctggagcgctcgatggcccaaataagtcaggagttgcactgccgcaaccgcatcgagcacaaccgcatgttgttggaggcagccaagttcaagtttctaaatccgaattttcagtttgagccgaatctgtaagaggctcaataaggaaaccaactagactccgcgccagattctgaatccaaaccaaatggcaaaacgttcaaaaacaatgcattgataaaagactaaggctgtcctaaatatatttctaaaattaaagaatctacagaagttttcgatttaggaccactaaagaatggttatattttgcttttttcaataaagtatctttaaagatt

SEQ ID NO: 18618 - protein, 321 aa, DROSOPHILA
MSVNLDGSEEKMELKKHVPYILNGELYRIEKQVGDNVTVKCCYCPPDRIYRGSVRSTGNFHMHIKRRHSSLLGKLHEMKVAALEERRDRIMKNRRFAKSRKKAPVAVAATSTAAQSDSGVFVDMQAAVPSGNESHELKIKTVFQRHKQEQEGATRKLEDSTSDKANLPNIPKNLGIVVQNVSNISVETLPGGSTPASVSFLGRPVKPEQGSGPSFLADQPAAIDLSQVPPVQGESKSSGSLASSMEDVSMEYSRSQALSQSLSMAHFLEHPQRDVLQRLERSMAQISQELHCRNRIEHNRMLLEAAKFKFLNPNFQFEPNL

SEQ ID NO: 18619 - DNA, 4075 bp, DROSOPHILA
aaaactcaatttttttgggcgggttttgagttatgatttatctgcccaccgcccaagttgtaagcggatgttgtaacaaccagcaattgcaaatctaaatggccaagttctaggtaaaaaagttgtaaatgtctatgttaaatatcgagtcaaagatcaactcaacccgatccgatcccaaaaaacatgccatttgccggtggtcttccatcaagccccacatgtgacatgaacttacgctgaacttgtagcttccttcagctacttgagtttcacgaggaaggacgtctgtcggtcatatagaattacataaaacaacagcggcatatagaactttaacgaaagctgaaaccgccatatggcttaaccggttttgaaagtggcgccaatcagtcatatatgtgtgagtacggcagcactaagctaatgtattgtttcgtagtggtatgccaacttattaaaaaataatgaagtttaaacgcggcgggaaatttccgattggcaatttttatgtctggcagcactatcctatcgatagcagaaaaccatattaacaaaaaattatgatcaagttctcttaaaaatcgatatttaatggttggctaaactatcggcggcagaatttaaaatatgactttggaatatcagattgtgtttgttctcagagttccggaatgccgagcttataggcttatgtaattaagaaatcatccagtaaaaaaggaatatacatattcttcagaaatgttcagaaaattgagtagttttaaggtatttataaaattaagccttctctggttcacctataaataacgaaaaaataaataaataaaaaacttccccatgttccatattccaccgttccgaaaaactatctcatcgacgcttatttaataacaatactattaatttaagttgctaacgacgcagccgttatcgataactgtgtgcaatactacgtttacagttagcgtgttgattatttggaagcgtgttagcgccttttttgcatggaatcagttcattctaatgaactatagtgaaaagagggacgtaaatctgcaaaatcacaaacattaattcagcatggatgatggaggggagttgagcttggtgaagaaagttgtccactcgctggtggtgtcctcaccaggaaaactgaccgttgagcagttgatgcgggattaccgcagcgaagagggctgcactttgccctacagcaaactgggatttaaggacgccgaatcctttctccgatccattccggatacggttacggtaagtaaataaagtatacatccaaatgagcactcgttaagctacaagcaattaccaggtgacgggccacggacaaatggcatggataactgcagtagccactgccaaatcggcgcacattcagaaattggtccgttgccaaaagaagtccaagaatcgaggctcccacaaacccaagtattgctacgcctccgagccatccaatctggtcttcattaacgaaagcgtctctaaaatgaaaaacagaaaagcgccgttcccaacttatcaggtgcccagaaatctgaaacttcctgtatcatatcccaactataatcgactgttatatcccgtccatacgcctcatattgaccaaatgatcagcaccggacagcaacaggtgctatataatcatctgcagtataacttttatcttcagtcgctgaataatccgtatgcctttccgcagagtacccttagaacccaaaggccaagctttccatgtaacgccaactccaagtcattgaaagttaatgattggtcgcagaaagaccgaaaacaggaaccctcaaaggagcgaaacaatcagaaatatcctaaaataactactgagaataagcaagagaaagaaaccgaggaattggcccaagcttttgaaaacctttccgtggatgttgctcccactgatcaccaagaaaagctaaagtgcgaaatatatgaggataatgaggacgaattcgtgagagacccctttatctatggagaggttaaagagaaagaagatgaagcggtggtgctcgcatttgacgccgtttccgaggatggttttgatctcttatcgatgaccacaactcaacagaatgctgtcaagcccctggatccgccggaggattgcttacactacgcgtcttctgacgatggggaagatgaaaatgccattccagcttatgctgtggtaggttatagcttgattcgtctaaaatgtaatgctgattccgggcttttcttataacaggaccatcgagttctggacgtggactaccctagggatgcggttcgttctgctttcacactgcctgctcgcgatattgaatccattatcgaattacagcagcgcattagggtgcagttggtgagtttggtcaatccacacaattttaacttctggatatataacgatgactttaaagactacgaggcacagtttgccaatatgcagtaagatatatagatattcatattaacattctgagagatattacaatatttattttctcctatagaacgttttatgaaagttcggaatcgaaaaattacacaatgccactgtttttgataactacggatcatctttgtgtggtccgctgtacgagtggctgggaaagggccaaagtattaggttatcggtccagtaacaacaaaatgacgatcgaggttgagctggttgacataggggacataatccgcgtgagccaacagaatgttaagtttttgatcaagccgtttgccttgctgccacgtcaatgtttggcgggtcgattggcgtttataacgcagtgtaagtctccaaactggaccgcagaagttgttaatttctttcacgatatgatattattgcgcctgctttacgccaaggtcgaagctattaaggtgagtcgattaacttgtactgtctagtaaaacgtgatataaatttcacctttttagaacaacactgcctatcttgtgctagttgatacggaatcacaaggacacactgttaatttaaatagatcgctcatagaaactggttgggtgcggcgctgcacgagtgcatagatttctattatatggatactgcattaattgctttaattactttaatgaccaatcttattgttgagcacaattcaaatccctatttgtcgaatagattgattatgtttcccacagtatgactttaataaaactcgttaaagtattattttaaggcaaacgctgtccttctgctttctttttattagtttacgtgtaataaaatactaggttacataaatccttcaacaagtcgctgtccttcgcctgatttatgcacgaaagtaaaacaaacaaggactcaaagacgaaccacttgcaaaagagatctcgctcgcaactaaaagtggcatcttgaacggaaattctgaatctgaatggaaaatcatgatctcgcctggtggcaggcccgcaataaatacttgaaatgtaactgaggcgctttaacaattccctataaaagacaacattgtctatgttttgtatatatatgttgtgtatatagttggtttcttgtctggttttagatttttttcgtttgttttttttttattttttggtgaccgctgaaacgacggcaccctgaggttggtttttaatatatttttcattatgtttttttttttttttaggcttctctactacgttgtgtgtcgagtggtgttttgtttgttagtgagtgaaaaactaatagttcaactactaatgcgcattcgttaaattttttgcttaaatacttttcattttgttttgtttcttgggttcttttctggttttgtatattgctgagttatgttttccctttttttttgcaatgcgtatttaaatatgctatataatcgcaataatacataattgttttgttgtttgtttgttggttgctcgagtacataatagctacgcgcataaatatgttttggtatgctgtaacgcttcgcttcgtttatatcataagttgatgcatgtctgtctgtctgactgtcactgtcgccccccgatgcctgatgcctgtttcttgaatcgt

SEQ ID NO: 18620 - DNA, 1766 bp, DROSOPHILA
ccttttttgcatggaatcagttcattctaatgaactatagtgaaaagagggacgtaaatctgcaaaatcacaaacattaattcagcatggatgatggaggggagttgagcttggtgaagaaagttgtccactcgctggtggtgtcctcaccaggaaaactgaccgttgagcagttgatgcgggattaccgcagcgaagagggctgcactttgccctacagcaaactgggatttaaggacgccgaatcctttctccgatccattccggatacggttacggtgacgggccacggacaaatggcatggataactgcagtagccactgccaaatcggcgcacattcagaaattggtccgttgccaaaagaagtccaagaatcgaggctcccacaaacccaagtattgctacgcctccgagccatccaatctggtcttcattaacgaaagcgtctctaaaatgaaaaacagaaaagcgccgttcccaacttatcaggtgcccagaaatctgaaacttcctgtatcatatcccaactataatcgactgttatatcccgtccatacgcctcatattgaccaaatgatcagcaccggacagcaacagagtacccttagaacccaaaggccaagctttccatgtaacgccaactccaagtcattgaaagttaatgattggtcgcagaaagaccgaaaacaggaaccctcaaaggagcgaaacaatcagaaatatcctaaaataactactgagaataagcaagagaaagaaaccgaggaattggcccaagcttttgaaaacctttccgtggatgttgctcccactgatcaccaagaaaagctaaagtgcgaaatatatgaggataatgaggacgaattcgtgagagacccctttatctatggagaggttaaagagaaagaagatgaagcggtggtgctcgcatttgacgccgtttccgaggatggttttgatctcttatcgatgaccacaactcaacagaatgctgtcaagcccctggatccgccggaggattgcttacactacgcgtcttctgacgatggggaagatgaaaatgccattccagcttatgctgtggaccatcgagttctggacgtggactaccctagggatgcggttcgttctgctttcacactgcctgctcgcgatattgaatccattatcgaattacagcagcgcattagggtgcagttggtgagtttggtcaatccacacaattttaacttctggatatataacgatgactttaaagactacgaggcacagtttgccaatatgcaaacgttttatgaaagttcggaatcgaaaaattacacaatgccactgtttttgataactacggatcatctttgtgtggtccgctgtacgagtggctgggaaagggccaaagtattaggttatcggtccagtaacaacaaaatgacgatcgaggttgagctggttgacataggggacataatccgcgtgagccaacagaatgttaagtttttgatcaagccgtttgccttgctgccacgtcaatgtttggcgggtcgattggcgtttataacgcagtgtaagtctccaaactggaccgcagaagttgttaatttctttcacgatatgatattattgcgcctgctttacgccaaggtcgaagctattaagaacaacactgcctatcttgtgctagttgatacggaatcacaaggacacactgttaatttaaatagatcgctcatagaaactggttgggtgcggcgctgcacgagtgcatag

SEQ ID NO: 18621 - protein, 559 aa, DROSOPHILA
MDDGGELSLVKKVVHSLVVSSPGKLTVEQLMRDYRSEEGCTLPYSKLGFKDAESFLRSIPDTVTVTGHGQMAWITAVATAKSAHIQKLVRCQKKSKNRGSHKPKYCYASEPSNLVFINESVSKMKNRKAPFPTYQVPRNLKLPVSYPNYNRLLYPVHTPHIDQMISTGQQQSTLRTQRPSFPCNANSKSLKVNDWSQKDRKQEPSKERNNQKYPKITTENKQEKETEELAQAFENLSVDVAPTDHQEKLKCEIYEDNEDEFVRDPFIYGEVKEKEDEAVVLAFDAVSEDGFDLLSMTTTQQNAVKPLDPPEDCLHYASSDDGEDENAIPAYAVDHRVLDVDYPRDAVRSAFTLPARDIESIIELQQRIRVQLVSLVNPHNFNFWIYNDDFKDYEAQFANMQTFYESSESKNYTMPLFLITTDHLCVVRCTSGWERAKVLGYRSSNNKMTIEVELVDIGDIIRVSQQNVKFLIKPFALLPRQCLAGRLAFITQCKSPNWTAEVVNFFHDMILLRLLYAKVEAIKNNTAYLVLVDTESQGHTVNLNRSLIETGWVRRCTSA

SEQ ID NO: 18622 - DNA, 5027 bp, DROSOPHILA
gaacaatgtacagggctcggcggcagtatcctcaacttcccactcgatgtgcaacagtagcattttgtccgcggactccaccaccaataccaatgcgtcagcacagcagcagcagcattgcaacagtgcagcagctgcaacaacaccgaatgcagaggcactgcaacaggtgcgacccatggagagctaaccgacgggaatgggagcaacaacggcagtggtcgctgcatggccagattcttcattcacatgacgacaatgagaagatgtgggatgaattgcctgcattgaaataaatagtgttttaaatgtgataccagttcctcgacgcggtcatcgagattgcagctataccaacgcgcgatcgactgtttaatgtccggcatggcattgggctctggaaattgattgatgaacgaaggaaagctctttttcatattgtacaaaaagtcatttaatcttaggcgaaagtgctcctaaataagaattttatagtcttacgttgcataaattttagaattaattttacgacggcagcgtcctgttttattgatgcgcttttagaattaagatataaagtttatacgcctagagccacatacaccttaaacacaatcgcaagaccacaatttaagtcacggatatttttaacgattttgcactagaaaccgatcgagacagttgtgctagtaactaggaaccagaacacgtctgtttagtgttttaagattttttaaaaccaagctcttttactttatcataagtgtaacgtatttttaatacaaaacaaacaaaacacccacatacaaaccgtgtacaattccttgtgaatactattgtttatatattttacgcgtttaaggttattaagttaaattgtaaaaatgtattgcgcagatattaaaacaaaagtttatcaaaagtgaatggaaaatatttaattgattagacccacttttggcattcgataaattttcgtaaaagtgcatttaatgcaaagttacttgtaaataaaatcccttctcgttataatgccagcaatgcgattctcatggttgatgaccagcaaatgacgcaaccccaatgcgcggaatatctgaaaaattctaggcaccgaatcgtgctaagaaacaattggataatcaaacagtgcttggagaaatttcaaaaaatgtaacattactcaccggattgactcgaataggtgatggattcataaacatggacaagtccacagtgtaattgattttctcatctagcttgcgaacactctgaaataggaaacttgaaatattttccttaataatgttgtaatacaaatcaataccttgattgatggaaaacggggatagaggtccctgaatgtctgaattgaagtttctggcagccagaatcgtttgttctccacatacagggatttgagcaaaataacaatcagttgcgagcgcaagatgatgccacaaacgcgaccctccgatcgacgatcctgcaagattggtaaaatactaataacatggagttatgtgaaatttctttgatcttactccgcaaacatcatcgaccaccggaaatccgttgtggtcgcacttcttgagcatctcatatatgtaattagcggaatcgcggatcttgatacagatcactggtttgcttagaatttcgcgagctttcagacccttgtattgcggcaatggctcccaggtcagcatgggcacatgatttacttggatctgcgtatcgtagatgccctcgttgaagtagtcaccgacccacttggcgctgataagtgcaatgataaggggaaagaagaaggacgtctccacgccagtggtttccatcaatataactgacaagctaatggtcattcgaagcactccacccaagttagctgcagctccaattagggcatatttacccggatgcaggaactcctgaaaatcatggtttagtttatggaaaatggtttggtttacattgcttaccgcctgtgggaatacatagtaggtaagcatggctaaaagacgaccccatgctgcgccgaccagagcagttgggatgaagacacccaaggacacattgagaccaaacgtagcacaggacagcacatagtaaacaactgtgaaaagggctagcgtcagaatcttatgggatcctaagaaaccaaaacaaaaatgattaaaactataagagtatattcttaaaaataaccacctggaggatcgtggaacaaggatctgactgtagcctctggcgtttgaaaccacaaggcagccacggcattatattcgttgtcctcgcagaaaagctgtacaggattgttggtcggatcgttgcccagtggacgacaatcgttgataaagtaaatcattagacaagccaaagttacgcccatcattgccactacaacagcttcgagaacctttccgattttccacggaataaagcgcttccgaaatttattgattttggtattaagagagttccaggcggctccgagtaatccaccagttactcccagaatcatgaagatgggcagctcaaagtagtcgaatttcaaaggcgtatcaaacttgcccaagttgaagagacccgtgaacgtgaaatcgtttaggccatggtaagctgataaaacgatattcaaggtgaatacgctgataatggaggccactaaggtgcgccaaatgagattctggttccagaaactagccgcttcctccagagaaaaaagcatgcctccaattggagctccaaaagcagctgaaactcccgcggctccgcctccaagaacgaaatctcttttctcgtgatcatcccgaaaagccttgaatatgcggaaatctttcaaaaacgtggtgcttttgccctgcgaaattccggcggcgacgacagctccagcatgtatcattggaccctcctttcctccggccaaaccacccaccaccgaggttataactccaatcgccttcacagccagcgttttaattcttacaatacgcggtattttgacgccgttcaggtagctcttcacctgtggaatcccactgccagcggttatgggctcaatgtaggtgaccatggctgctccaaaggccacgggcacaatgctgaagaggagccagtaaaggtagggaatcagcagatctctatcggaagcatcgcttaagggtacattttccttaacagctgcaagtgaaacatttagtatgcattaataaatgttcacaacttaattttccatgaaataaatttagcaaaaggaaaactaaaacatacaattgtagaggaaggtgtactttcgtatcgagagctcttcgattataatatctatggtgcaagctatcagtgcggtgataatgccaatctgtataaaaatgatccatcttatgatgtccttgcgcagggagaatcgctctgtcagcctctttcgctgctcatcctggaagagcgtgttctcgcatacttcgtagtccaagctctgtaagtgcataagtttttgataatcgtatcggtcaagctccacaccctatgtgtacatatgtacgagtatgtatgtacgtacctcgtaattgggcgtggatgcggctgctgttcgggatctgaggtggaaaatgggttcgctgctgttgatgttcctattcgggctgcctgcacttccattaattggcttataaacaaagcgcataaggaaataaaattaatatgagtgtttagagataagcccgctcaaaaaccgaagcggtgattcattctaatttagtttaccttagttacatggttggatactcacaatatcgggaggcactgaattgttgcccattagcagtggctgagaatcatccaataagtggttattccccgaaagcgtcgctcttctagctaaagcactagtggagggctcttctctttggtggagtccgaaatcctgcacagctttggaagttggacctgcctccttttggagtatgattggatcatcctcagcgcttgattcgccatcgagggtaatcagtgccttcctatcgtccattatttaaaacaataataacacaagtgaccgacaacaaacaataaaaagcaacagaacaaaagccgaatgagagtatggttactcgtgggccattgagaaataccaaaatctcgattattcggcaacttagtattttatggagggcttttttcgcagataatctcgaaagcgaatctttaaagatactttattgaaaaaagcaaaatataaccattctttagtggtcctaaatcgaaaacttctgtagattctttaattttagaaatatatttaggacagccttagtcttttatcaatgcattgtttttgaacgttttgccatttggtttggattcagaatctggcgcggagtctagttggtttccttattgagcctcttacagattcggctcaaactgaaaattcggatttagaaacttgaacttggctgcctccaacaacatgcggttgtgctcgatgcggttgcggcagtgcaactcctgacttatttgggccatcgagcgctccaggcgctgcagcacatctcgctgaggatgctccaagaagtgggccatggatagcgattgtgagagggcctgggagcgtgagtactccatggagacgtcctccatcgatgaagccagcgatccactggatttactctcgccctgcactggtggaacctggctcaaatctatggcagccggctgatcagccaggaatgacggaccactaccctgctcaggcttgacaggacgacccagaaaggagacactggcaggagtcgaaccgccgggcagtgtttccaccgagatgtttgagacctgaaaaaatacatgtaaataggcttcattaaatattgaaatatgttcaaaacttgatatttaaaatatgatctacaaaatatatatgtatatttatttgcgaataaaggaaacttacgttctgaacgacaattcccaagttcttagggatatttggtagattagctttatctgaagtggaatcttcgagctggaaa

SEQ ID NO: 18623 - DNA, 2442 bp, DROSOPHILA
atggacgataggaaggcactgattaccctcgatggcgaatcaagcgctgaggatgatccaatcatactccaaaaggaggcaggtccaacttccaaagctgtgcaggatttcggactccaccaaagagaagagccctccactagtgctttagctagaagagcgacgctttcggggaataaccacttattggatgattctcagccactgctaatgggcaacaattcagtgcctcccgatattccaattaatggaagtgcaggcagcccgaataggaacatcaacagcagcgaacccattttccacctcagatcccgaacagcagccgcatccacgcccaattacgagagcttggactacgaagtatgcgagaacacgctcttccaggatgagcagcgaaagaggctgacagagcgattctccctgcgcaaggacatcataagatggatcatttttatacagattggcattatcaccgcactgatagcttgcaccatagatattataatcgaagagctctcgatacgaaagtacaccttcctctacaattctgttaaggaaaatgtacccttaagcgatgcttccgatagagatctgctgattccctacctttactggctcctcttcagcattgtgcccgtggcctttggagcagccatggtcacctacattgagcccataaccgctggcagtgggattccacaggtgaagagctacctgaacggcgtcaaaataccgcgtattgtaagaattaaaacgctggctgtgaaggcgattggagttataacctcggtggtgggtggtttggccggaggaaaggagggtccaatgatacatgctggagctgtcgtcgccgccggaatttcgcagggcaaaagcaccacgtttttgaaagatttccgcatattcaaggcttttcgggatgatcacgagaaaagagatttcgttcttggaggcggagccgcgggagtttcagctgcttttggagctccaattggaggcatgcttttttctctggaggaagcggctagtttctggaaccagaatctcatttggcgcaccttagtggcctccattatcagcgtattcaccttgaatatcgttttatcagcttaccatggcctaaacgatttcacgttcacgggtctcttcaacttgggcaagtttgatacgcctttgaaattcgactactttgagctgcccatcttcatgattctgggagtaactggtggattactcggagccgcctggaactctcttaataccaaaatcaataaatttcggaagcgctttattccgtggaaaatcggaaaggttctcgaagctgttgtagtggcaatgatgggcgtaactttggcttgtctaatgatttactttatcaacgattgtcgtccactgggcaacgatccgaccaacaatcctgtacagcttttctgcgaggacaacgaatataatgccgtggctgccttgtggtttcaaacgccagaggctacagtcagatccttgttccacgatcctccaggatcccataagattctgacgctagcccttttcacagttgtttactatgtgctgtcctgtgctacgtttggtctcaatgtgtccttgggtgtcttcatcccaactgctctggtcggcgcagcatggggtcgtcttttagccatgcttacctactatgtattcccacaggcggagttcctgcatccgggtaaatatgccctaattggagctgcagctaacttgggtggagtgcttcgaatgaccattagcttgtcagttatattgatggaaaccactggcgtggagacgtccttcttctttccccttatcattgcacttatcagcgccaagtgggtcggtgactacttcaacgagggcatctacgatacgcagatccaagtaaatcatgtgcccatgctgacctgggagccattgccgcaatacaagggtctgaaagctcgcgaaattctaagcaaaccagtgatctgtatcaagatccgcgattccgctaattacatatatgagatgctcaagaagtgcgaccacaacggatttccggtggtcgatgatgtttgcggagatcgtcgatcggagggtcgcgtttgtggcatcatcttgcgctcgcaactgattgttattttgctcaaatccctgtatgtggagaacaaacgattctggctgccagaaacttcaattcagacattcagggacctctatccccgttttccatcaatcaagagtgttcgcaagctagatgagaaaatcaattacactgtggacttgtccatgtttatgaatccatcacctattcgagtcaatccgcacgattcggtgcctagaatttttcagatattccgcgcattggggttgcgtcatttgctggtcatcaaccatgagaatcgcattgctggcattataacgagaagggattttatttacaagtaa

SEQ ID NO: 18624 - protein, 813 aa, DROSOPHILA
MDDRKALITLDGESSAEDDPIILQKEAGPTSKAVQDFGLHQREEPSTSALARRATLSGNNHLLDDSQPLLMGNNSVPPDIPINGSAGSPNRNINSSEPIFHLRSRTAAASTPNYESLDYEVCENTLFQDEQRKRLTERFSLRKDIIRWIIFIQIGIITALIACTIDIIIEELSIRKYTFLYNSVKENVPLSDASDRDLLIPYLYWLLFSIVPVAFGAAMVTYIEPITAGSGIPQVKSYLNGVKIPRIVRIKTLAVKAIGVITSVVGGLAGGKEGPMIHAGAVVAAGISQGKSTTFLKDFRIFKAFRDDHEKRDFVLGGGAAGVSAAFGAPIGGMLFSLEEAASFWNQNLIWRTLVASIISVFTLNIVLSAYHGLNDFTFTGLFNLGKFDTPLKFDYFELPIFMILGVTGGLLGAAWNSLNTKINKFRKRFIPWKIGKVLEAVVVAMMGVTLACLMIYFINDCRPLGNDPTNNPVQLFCEDNEYNAVAALWFQTPEATVRSLFHDPPGSHKILTLALFTVVYYVLSCATFGLNVSLGVFIPTALVGAAWGRLLAMLTYYVFPQAEFLHPGKYALIGAAANLGGVLRMTISLSVILMETTGVETSFFFPLIIALISAKWVGDYFNEGIYDTQIQVNHVPMLTWEPLPQYKGLKAREILSKPVICIKIRDSANYIYEMLKKCDHNGFPVVDDVCGDRRSEGRVCGIILRSQLIVILLKSLYVENKRFWLPETSIQTFRDLYPRFPSIKSVRKLDEKINYTVDLSMFMNPSPIRVNPHDSVPRIFQIFRALGLRHLLVINHENRIAGIITRRDFIYK

SEQ ID NO: 18625 - DNA, 2504 bp, DROSOPHILA
tctgcaactcagaaacactataagtggcgtttagtttacgtctggaacctctgtgttcactgaagtctttcggccatgaagtccaaacaagtcttttacatcgccttcagcttgcttgtgagttttaatatttgctcaaaactttttactgactacgatttttaaattgtaaagctgctgggatccttgctgccaaacgaagtggagtccttaagagtagatcttaataagctggcggagtgcacagaatcgggattgaaagtagccacaacgttgctcgtgagggcgataccatgtgtaaaaaaattggcaaaatgtgctgactttcgagccattaagactaaggaccttgatattaccgcacttgccctcttgggctatcaatatctgcaaacggtcgtgaacaaccaaagatgtctattgatctcattgaaagaaggctacgacgctgtgtcgccacaccttgacaaacttattagtggcaagtgcctaccagggctcagctaaagcaatatatacatatgcaaacactttatttggtttttaaattcttaatttagccttagatatagacatattttcagtatttaaatgagttgcttgaatcacaggaatacaatgaatttggcgagattatatgattatattcggcaataaaatctagataattatagttgttattaaaaggacagcgaaatagaaagcacaagcttaaaaattctttttgcgggtctggaattaattacgaattcaatttgaattcagtttcaactatatgccttctttttgtaaccttttgtataatgttattatataaaatgttaatgaacatgcgaaaacgattaacaatagcaacaaaatccataaactgctcacacactttgaagtgtaaaatctgtttttaaagcttctaatagaccgtgctgattcgattatcctggggcctataaatagggcataaaacacaggggctccgaaagtttgatcttcagccgtttagtcgaaagcacacagataaggcttccaatgaaactgataaaggttacactagtgttcagcttactggctgtaagtacattatttaaatatgatctttttaggcacaataacaatagataaacttcacttaacagctcgtatttgtggcccaaacggaggcgcaaaatccaatatgggagaattggttggcatgcaatagaattggtactaaagcgcttgccagtctgctgagagaaacaatcccaactgttcgcaatttactgaactgcattgacttcaatccaccaaccgatattggaaatagttacctttcaaaacttaagttgtactatgagcttgttaagcgaggtgcgcttgacaagactcagtgtctgattgtgccactcaaggaatcagtgagactactgaggccttatgtaaaatcgcttgagaccaacaaatgcttgggtgaataaatcactattttggccataataaaataaatttctgagcattaataaagcacagcaatcaaaaatgtatattttttaaaggagggtaatgcctaatagaccttccaaattaatcatgatataagttaagtgcggtttttttctcaaattttttatttatattatgatattaccgaaacccaaaaacacattttggtttggattcaatcggctgaaatactttatatgcgagacaaattattctgttgtattgcatttgaaaattgaattgacatgtattaggcgcaaaatttattatggtttttaactgtaaccaatttttttagcactgcttaggtggatgaaattaaaattagcttgtaatcctataaataggacagccctttcataaatattctaagttttttctggtcataatcgcgacttaaaacaggagaatgagcgtgatcaagtccatatttctgctcagtattttggctgtgagtacatttggctcacttaattactttttaaatatacttaccattctccataggtctgcctcattccccgggagacggaggcccaggccactataagtgaaagctggggaaggctgggcaagtgtactcaggtggccatcgaaacactgaccagcctggccgataaaatcgtcccgaccgtatatgagttgaaacaatgctccggatacgtaactttggaaccggcaaacggcaaagacagaaagattacctggtacctaaaggtatcctatgaattcttcaagaaacttgtctttgacgaacccaaatgtctgcacggtctactgaacaagttggctgccacaatcaaaccatttgccgagcagatatcgggattaggttgcttggacgaagaagattatatcatttaaaaagaaaagtgtgcacattacataaataaatcgagagcaatatggggtctcaaatgtcagcaacaaaaatgtatttcttattaagtataattttacaatataactactgcatttggaagttaagttgaagttaaagttggctaaacacattcaagttatgt

SEQ ID NO: 18626 - DNA, 439 bp, DROSOPHILA
tcgaaagcacacagataaggcttccaatgaaactgataaaggttacactagtgttcagcttactggctctcgtatttgtggcccaaacggaggcgcaaaatccaatatgggagaattggttggcatgcaatagaattggtactaaagcgcttgccagtctgctgagagaaacaatcccaactgttcgcaatttactgaactgcattgacttcaatccaccaaccgatattggaaatagttacctttcaaaacttaagttgtactatgagcttgttaagcgaggtgcgcttgacaagactcagtgtctgattgtgccactcaaggaatcagtgagactactgaggccttatgtaaaatcgcttgagaccaacaaatgcttgggtgaataaatcactattttggccataataaaataaatttctgagcattaataaagcac

SEQ ID NO: 18627 - protein, 120 aa, DROSOPHILA
MKLIKVTLVFSLLALVFVAQTEAQNPIWENWLACNRIGTKALASLLRETIPTVRNLLNCIDFNPPTDIGNSYLSKLKLYYELVKRGALDKTQCLIVPLKESVRLLRPYVKSLETNKCLGE

SEQ ID NO: 18628 - DNA, 11439 bp, DROSOPHILA
aggagtcgtaggttccgacggaacgattcggattcggattgcgatgtatctgcttggagtttcaaggtcgtttgcagggagcttcgtatcctggggaggagcggcctgaccctgaacatagcaaacgaatcgggattctcggggcttgcgctgtgctttcactcgacctcgtccaatgccaacaaaagtgcaacgtgtgcaatcgacgcgaattgaccaatgtttttaatattgtttagcttatcggcatagggctggcaccgaatgcgatgttattcgataccatcggatggtcaatttccagcgaaaccgatttttcagagcacttatcgattgttttgaatttaaactaactgttgtgaacttattttttacttaaaaaaattccgatttcaaactaatatttcaagggtttatttttgagacttgatttcggagtaagcaaaacatcttttatacatttattttatgcgtttgacctcatatcaacattaaaattaatacaaatttccagcttttggtgaatatgacagaaaagtataactatttttaaatttattaccacattgagtttatgatgtaaaagcaagaaagtcgtcgtgggaatcacgataaagagtactgaagacaagagttttgtagcctactttcaggctgttcccccaataatcagctcaattcaaaatgtgcagcttaatatttttcatacttttattaatgcatacggtatatctttgctttgataattatgtagaaaatgcttacacctatgcggccgatatatagaataattaacctactagctagttgaaaatcacaaatgaacatacaatatttatacattatagtgtgggtgtggtaattaagcacatcgttttaaactaatacacattgcggactaaactggccgatcctgcgggctctctcgatcggctctcaactttgagttgacagcagggagaatcgaatcggcccagttgcccattagctgttggccaggctaacaatcgctttggactagcgcatcgctgagggagctaagctgctcctcgctgcccttgatccttacggccaggtcgcgtgcatcggcgatcagcttggccttcatgttgatgaagtagtcgtagtcggcgcacatgtccgcgctgaggttcttggccagtaatccggcgatgctgactccacgtcgttctatgtccgatttgagacgctgcgcctcctccatctgctcgtacagcagatcccgctttgattccagcgcgccctaagtggtataattagtaaaattagtaaattatgtcctttaggtatgtaattcttgagaaaacccaccctttcctgctggcgcgtttccaggctgctttcggtttgggccaaacgctcggaaagcgacagaagtaaactggttatgttgcccacggcgtcgacatgggtacggaacttggaggcttcgctgggtcgaaccttctccgctagcttggcgaatagatcctggcccagtctgtcattggccgagcactcctcgctgatcgtctgctgctcgcgtttcagggagacaattttttggttcaaatgcttgatgagctcatcctgaaaggaaaaggtttgggttaagaaatgcaaaataaattactatctctgtggcatacacaccatcttttgcttgattaaattcgtcggctcctcgctcggctctgccagctgcagctccacactgaccactcggatctcggcagacgacgtgatggacttcattcgcatcaacgtagaggtgccaacatcgcgcttggccaagcgcagtggcacatccggattgtacagattgctaacgtattgcgaggtgggcttgcagatctttggtgtgaggatgtcggcgatcttgtcaccaggcggtaggagcttaaccagctcccggctcatctgctcgtagtccagctcgatgggctggcgctgtcgcggctgcagagtcgttctagtctggtgctcctcgcgtgccgcttcgaggtccgtgtccctgtcctccagctcgtccgtttggcaggccatatccgttgtgctcggcttgggattcaccattaggaccaattcgctgcgctgcatcagctgcagttcctcgatctctggctgcttgtcgtgcacatcgttctcctcctgctcctcctcctcctccggttctagtggcggtggcggactgggcggcagtggtggtgtcattagtggttcgttagcgaaactggcagtgggactggttatcagtggagtggtgtaaccacctagtagactcgcatcacacaggtgcgccgacatcagcaccgactgtagttgggtgatcttttcgatgttctccctcagggattcctggcggttcatcgcgggcttgggcggtgttgtcaacggatttgtgttcagggtggtgctaatcacctcggcgcgaaagatgtgcgcctcaggcttaggaatcggtgtcgctataggattgattgtgcactccaaggaactggtgctcagactgcagtccgagtgcgaggaagccggcgagaggcgtggcggtgtgggcgtcggtgttggcgtcggcgtgggcgtggcagtgggcagcacctcctccagcgtcgtctctaggtcatgggcggcctgcttgagatccacgtgggactgggacattgtcggcatagtcaccgcactagtgtgcttcacatcgtacgactgagatctcgtatattgttgcggggtcacgggcttcgaacttttgccgtaaccttgacccagcacaggagttgaataccgctggccgcccccatagtaggggggcggggcaaccgtcggggaattcccagtcagattgttgttggagccatagcgcagggtcacattcgcatcgccgttcggcgatcctggctgcaactttggctgctggtggagcttaacgcccagcggcaggacatccggcagattgttgggcagctttcctgtgaccccatagctgggcttcgtgtgggccaccaagtcctcgttggaggtcagggtgagcttgtatatgccatggtcgggatcagtgttgttcaacttctccagactctgacgcggcaagtatgaggccttggaattcgatctgtaaggataagagagcaaaggagttgttagttaacatggaatagatcataatcataatcacttaacatgtaatgctatgtcgtaatatatctttttatgaaattgccatttgagatcaatgtattatttaaatcagactacagttctttggttagtgggctttgtacccatacctagttatctaaaggcgatttaggagtgccctcctggccaaaaatgccagctaccctgggtcatccacggggtcatcggcagtaaccgccacgacttgaggacaaaagccaaaagcaccgaaaatattgcccgaatcgcacgtctcattaatgcaaatgggcggccataatctggacagatgctaattgagtcctcggcaggcggaggagcaggcggagcagttgccatcgaaagccgatgcaatctggatcccaaagcacccgcatatattgtaaattattgtaatatgatggcgaaagcgacgagcgatggatgaaattattctgtgcacgacgcgcggagacgacagttcgtcgggtgttaagctaaaaagctgatttccaagacacagggcacaataaggcggaataaaaacgaaagtgaaatgtttacagtgcaattataaagagttttatgtttcagtttttgagttttgtgaaaagcaaaagtcagagtcgttttagtgtgcaaggcgtatgacgaagctacgtccgcttccccttgacaaactttcaaaagtgctaaactaatttgttatgtttttgtgtaccaatcatctcggctcttaagttgtaaaagcccccccccccctacttgtttctttttgcttggtatttcgaattttggctcatatcgttcggcttggccacccccaggttgccaaaaatctttattgtttctgcattatatacatacgtatgtatatatgtatgtattccccccacatgatatgtaaccatacgtatttcaatggggctttgcatccgaagaaagccgtcgaagaaatgttgtcgcatttgcataaattaagagcagagtgaagagcagggcttacatcacatgctagctagacaaaacagctgttggacgtatgtatgtagtatctttgcccagttagcatttgcataagccacagtcttttgtctagatccccgctcacccgcttcccctttcttcgctttcttcggagagcgggagatggaacgagatggctgaatgctgccatttcgcttttcttaatcacttccgctggcctgttgcgtaaggctctcttttctactgccaatttggctaagacaaaggcaagaagctattgcattagcatagcatttgcatatcaggccgatgacatcacatgagctaattgaaagcagttccaacgtaaacccagaacatacagattgcttgcacctacagaagagctagataataaaagggcggcctatctcttggaaaccatcttgtaatcttgtgccaacagcctagataagaacttggttaaccgacccttgtaatctcccagaattcctctgcaaaccatcggacttaccagacataagctcattaaacatacacaccctcgatggggcgaatgtaacagctttattatgattcacttcacagatcgaaaataactctggtttttttgttagatattttgcccgctaatattgtataattcccaataatacgcgcggcgggccgaaagacaatgacaaaagaaagggtcaatagaaatgcttcggacactgggctaaatacatttccatacaattaacgcatattttatttgtatacatttggctatctttccctctatttggcattattaagccgagcggggcgttccatttggttatgtgatgcaaattatgaaaaatttgataaattgcctggccttgcataactgtcggcaatgtcgacaatgaaactcttcgtctctagggctaaaaacaaatcggatatgtatatagatatatatatacaatatatatatacttcggattggttagccgccacccgcctggaatgggataattggtgggttcagtggcttttgggtggtgttgccgatccaggtcttggtcagtggccttttgcgttgcgcattgcgtatgcaactgcagcagcggcaactgcagcactggatgttgctgctgcaactgttgcactataatttttgatcggcaatataacgagctgtttgccgctgctgctgctgctggctggctagctgtttggctgactagttttcgttgatagtaaaagtattttatttaaatatgccgacaacgacaacgctggcgacgcatggaaatcacgtttttaacatctcgtctccacattgaagcgaaccgaaaaaaggcgaacaaatgttgctgctgctgttgctgctgctgctgctgcagcgcttgttgttgaaaacataaacatctcacaagcctggccgaaaccgaaaccagaaaacgggtttgtcggcaccgcatcgcacacattttcacttgccgcaaaatgacgtcaagtcaacatacaaaatacaatataagaagaccaaaaacagaaaaaaaaagtaaaacaaaacagatggccatcagcgcagttagctttctttggggagaggtcagcactgcggccagaacaaattgcctgtgttttttttttcaccggttttcagccagagacagccacgcatcatcgttcatcaaagtatgccatgaatttctctcggaaaactccgggaaaaacaatgcaacagacgcagcagcagcagcagcaacagcgaagaaaagaaaagaaaagttctctttcactgaaaaatcttagctaagtggtcacctttgtctgggaatggttaggaaaaagactaacttctaaccttctggcggagaatcccgcaagtgccgcctcagatttccccgcgcaacctaaatccgaatcgaaaacttttcctctcgagcaatttgtgcctgttcatctgttcatctgcctcgtgatcggactccaattgtgtgcctctccgcttggtttcttgttttcttttctaatgccgcagctactgttgctgctttttctgttgctgctgttgctgctgctgctgctgctactgtaccataattatgatccattaattctggcagcaacgccaacaatgatggcttgtgcaatatttttaatgtaaaatcgatttaatggcgcttttcgctcgcggccctcaagcaccaaaaatagatagcttgggaaatgcaacagcagcagtggcagcagcaacagcaacagatgcctcctgctcttggcccaaccccattgaaagtgtcgaaagtggccggcctgtcccattgaatccgatgaaacggggtaattaacttgtgagctaaacggccgcagctcatcataattacagctaaaaagatgcctccaaccagggggcagaacacggcagcaacatctgcaacacagcagcaacacgaacacggcagcaacattagttgcaactggcaacgaaccggcagctggggaaacatgtgtgcgcactggactacgacagtaacaagcttgtaaataattcaggccccacctcccgcactttaaatggttactttggatattcgccaagttgcgtttgcataaacaaattattcagtcaagtgcgggccttttgtctgctggatgttgatgatgggggaagtggcagtgcagaggaagtggcagattgaatggtgcacaacgagaaaaggttgccatgaagtctatagtttaagaaatagattattagaagtcaaaagggttccgtagcatagaccttagctgtactctttgtaggatgattatacaatatatgaaaatatctccatagagataatctttaataacacactttattgtttgaacgaaggccagtgttgtttttaaccattaaatcgtggactgtcgataggatttttcttgcagtgtgagtcggggcactgctaatatccgcgacacatctgccaatgacattttcactctcagcccacttggcatataaactgtacacacagcaacttgcgaccaacttgtagtgccctcgggcgcatgcgcaacacgtccgccatggccggatcagccgaaagttggggatatggcggggatatgtatgtacccaccaaccgagtgttggagggggttgcggggattggggatagcgacaagagtttgagccatttgcgtttttttttttctgtgttttgttttagatattacacaaaagccgctgttcgtcgaatgccaaagtgttgcggccattgaaggaactgccctgaatacggatttctcattgtttttagccaactaatttctggcgaaagataatggtcgaaagagcgcagaggccagcatttacttgttagccaagatccggcggcgaagaaataaaatggaaagaaaagtactgcaaagaaaagtaaagaaatgaaacgaaaagaaaagcatgcgaagcggctcttaatttcttaataacagaaaaaatttctcagacgcaactacaaaacaaaaaaaaaaaaaaaagagagagagtgcgctggaattctgaaaacgtttaagcccgagaacttcctaggttacaccataaactttagttagggccttgtcatgaaccttcattagccgttaattgtgcgctttatgatgcgggaaatttgccaacaaatagcagtgatgctatgaaatgatgtcacctatgcagaactgcaatttcatagagaagccactggtgagatcaccaggaactgcggatacagatacacggaacgtgccgcacagatacagatactcgtactttcaagtacgcttgtttcttgttcggaacgaaagtgagagattgatgaatggtcttgcgtttatgtttcggaccatttaattgcgagtgtgacctttagcacatatacatatatatatatatatatatcactatgtttataagccataatgatcgcagattggcgagaataaacaatgatcatcgttgtcgtaaggcagaacaaagggaatccaaatcaaggttaatccaatgaaatcgaaccgaaactccgcgtaattaatgcattggcaagcatggtgaacactatatttgcatcaatcagcaattatttatgcaaattctctttggattgtgtgagaagtcgggtcggaaagtttagatattctcacgctgtgctgctgaaaccgtttcaaaaacgattgatcgatttctgatggcaatatagatagctgtttataggttttgtaagaactgcccctgcactttgatcgtgtttagcatgtcacgcgcctgtcaacccaaaaacaaaaaagccacaaaataatttaatgagcaaagaggttctccagtcctgacgtcacaaggttaagcctcagaattttccaagcctcagaacatggcttgatgaataatgagtgcagaaaaacaatgacaatgatggaatttagccgtatttttacaaggtcacccctattcggctgcaaaatgtcaaaaaacagaaagacacccagataaaccttgccaactcatccgaggttttgttatttttatttttatttttttgagcccggcccttttgtcttttagagagatcttcggctacagcattgccaaaagtgttctttgttattcttggccttttttggggcggcggcaatttgcgtcgcaaacgactgaggatttgtggagcggaacacccaattcacaggcccgattcaatttccattccaattcctaatccactagcaaacctcaacccatacccataacccaagccgcactaaacccaaacccaaacgcaaaaccaaaaccaaaacccaatccaacccacgcccacacgatctccagttgccagtggccgggttatttacaaaaccttggacgtggcgatctcgagcgttgccccatggactgttcagctggccgctggatgagtggcactcctagcttttgcgtctggggataagacaaagctgcatgagtaaagtacggataataatataaaataaaaatatagctagtggaatacagaaatacatccgcgtattgttttgccttagcataccatcttagcgaagcatcgctgcagttaggcgcttttgataattaacggtttattgataaaagatccacagcctcctcatcgcgatggtcttccccctaatgatgatgatgatcgtaatgatgatgatgatgatgatggtctcgtgtggctttaatgggcgttttcgactgactcgctatcgtcataaacatatttctccactgactctttctgctttttttttttttttttgattattttttggcaaaaacaaagcgtgaaattgacattcgcccctctgcgaaatgttcaacgaactcggcataacaataataataataataacaagcgaaaaatccgcctggccacttgttgcaacattgcagcgcaatgcagcacttgggatgccgcaggacaggaagcatcccccgtcgctttttgtcttccatttttatgttgggccgggccccaaaattggttaaggggaaaaacaaaactgaaaactcaaaaaatgaagccccccaaacacatttggcattcatttggcgtcgatcgcgtgcagcgacagtcagtacacagagagaaatttagattgttagtgaataaaaattgtatcgtttatattacatcatattaagatcaggacaagatacttcatttcacatattatagatatacatttcagttaaacatcgtatcaaattttctttctgtgcacaactccagtctgtgaatgccaagagcaaatgaaaaacgcaattatatggcaaaaataaaaataaaaccgagcgaatataacgaaaaacgagatctagatttgacggcggcggcatggattgcgttttcaaggttgttatgggtatattgcattgcccaagttggcgctgcaattaaaagccatgcatatatggccaaggaaacgaacgaatgaatctcttcacgcattcctctgccgcccattttccaccgcatgacgtcagaggcgcttttcccgcttgatgatttttctgcataatgggttttttgtctagacggtttttgccattttaattttttattttttttttttcaaatttttaccgaaagttgagccattgaaaccactgagccattgtgcgcgttgagttcagaaacccagtcgatgggcaagatcaaaacaattgagcacgcggcactttgtatctgtatctgaaaagcgaatcgtttggggcacgaacaaattgactcgcaaaataaatcaaataaacggccgaaaataagaccgcgacaacgcgattcattgaacaaaacaaaactgaaggctctggcaaaatgcgaaaatttacattcggtgtgacaaagagaggaagattggaaatcgaagtgcgaaagggagggaaggcgatatgtgccatcatcaaattgaaaataaacgaaaaacgtgagaccctatgggaatactcaataccctttgttccatctatgggtgttctaaaaataatgagatacatgaaggtggaatcatattatcatatatatattataagggatgatagtttctatgatatggaaatgaatgttttttaaatcaaacatattgtatagaacttatggattaccatagactcgtgattatattaaaaatacttggttagttataagctaattatagaggcactgcgcaatttataaacatatattggaagatattggaagataaatatgcatagagccctttacagcagggtataattcgctatcacagcgataaggcaatattatttttcattaaccatgagtcagtgggacaagtcctcgtagagaaactgaacctgttgggaactaaccccaccttctagaacgcattccattcagaactgggaaaatgagagcgccactgttttggtgactaaaaataaatggcataattcagctaaacaatttatttggcaacgatgacagcgtcgcaatgggatggcttctgttgttcggatcggatgagatgagatgtgatgggatgggatgagatggtatggttatgggatgagtttgctgctcgaatgtggggaacatgtggcgaagttgacatcggcgccgttccatttacacagatttcatttgccagtttgccaggagacggaaaatgctgcagctgataagccaacaaattagatgccagcctgacatattggctactatttaatgcgactgctctgatttattcagtgcggctgagtgaccgacccaaaatttgaacatatatatatatatatgatcttaagaatgtgcatataca

SEQ ID NO: 18629 - DNA, 2173 bp, DROSOPHILA
tcgcgttgtcgcggtcttattttcggccgtttatttgatttattttgcgagtcaatttgttcgtgccccaaacgattcgcttttcagatacagatacaaagtgccgcgtgctcaattgttttgatcttgcccatcgactgggtttctgaactcaacgcgcacaatggctcagtggtttcaatggctcaactttcgatcgaattccaaggcctcatacttgccgcgtcagagtctggagaagttgaacaacactgatcccgaccatggcatatacaagctcaccctgacctccaacgaggacttggtggcccacacgaagcccagctatggggtcacaggaaagctgcccaacaatctgccggatgtcctgccgctgggcgttaagctccaccagcagccaaagttgcagccaggatcgccgaacggcgatgcgaatgtgaccctgcgctatggctccaacaacaatctgactgggaattccccgacggttgccccgcccccctactatgggggcggccagcggtattcaactcctgtgctgggtcaaggttacggcaaaagttcgaagcccgtgaccccgcaacaatatacgagatctcagtcgtacgatgtgaagcacactagtgcggtgactatgccgacaatgtcccagtcccacgtggatctcaagcaggccgcccatgacctagagacgacgctggaggaggtgctgcccactgccacgcccacgccgacgccaacaccgacgcccacaccgccacgcctctcgccggcttcctcgcactcggactgcagtctgagcaccagttccttggagtgcacaatcaatcctatagcgacaccgattcctaagcctgaggcgcacatctttcgcgccgaggtgattagcaccaccctgaacacaaatccgttgacaacaccgcccaagcccgcgatgaaccgccaggaatccctgagggagaacatcgaaaagatcacccaactacagtcggtgctgatgtcggcgcacctgtgtgatgcgagtctactaggtggttacaccactccactgataaccagtcccactgccagtttcgctaacgaaccactaatgacaccaccactgccgcccagtccgccaccgccactagaaccggaggaggaggaggagcaggaggagaacgatgtgcacgacaagcagccagagatcgaggaactgcagctgatgcagcgcagcgaattggtcctaatggtgaatcccaagccgagcacaacggatatggcctgccaaacggacgagctggaggacagggacacggacctcgaagcggcacgcgaggagcaccagactagaacgactctgcagccgcgacagcgccagcccatcgagctggactacgagcagatgagccgggagctggttaagctcctaccgcctggtgacaagatcgccgacatcctcacaccaaagatctgcaagcccacctcgcaatacgttagcaatctgtacaatccggatgtgccactgcgcttggccaagcgcgatgttggcacctctacgttgatgcgaatgaagtccatcacgtcgtctgccgagatccgagtggtcagtgtggagctgcagctggcagagccgagcgaggagccgacgaatttaatcaagcaaaagatggatgagctcatcaagcatttgaaccaaaaaattgtctccctgaaacgcgagcagcagacgatcagcgaggagtgctcggccaatgacagactgggccaggatctattcgccaagctagcggagaaggttcgacccagcgaagcctccaagttccgtacccatgtcgacgccgtgggcaacataaccagtttacttctgtcgctttccgagcgtttggcccaaaccgaaagcagcctggaaacgcgccagcaggaaaggggcgcgctggaatcaaagcgggatctgctgtacgagcagatggaggaggcgcagcgtctcaaatcggacatagaacgacgtggagtcagcatcgccggattactggccaagaacctcagcgcggacatgtgcgccgactacgactacttcatcaacatgaaggccaagctgatcgccgatgcacgcgacctggccgtaaggatcaagggcagcgaggagcagcttagctccctcagcgatgcgctagtccaaagcgattgttag

SEQ ID NO: 18630 - protein, 669 aa, DROSOPHILA
MAQWFQWLNFRSNSKASYLPRQSLEKLNNTDPDHGIYKLTLTSNEDLVAHTKPSYGVTGKLPNNLPDVLPLGVKLHQQPKLQPGSPNGDANVTLRYGSNNNLTGNSPTVAPPPYYGGGQRYSTPVLGQGYGKSSKPVTPQQYTRSQSYDVKHTSAVTMPTMSQSHVDLKQAAHDLETTLEEVLPTATPTPTPTPTPTPPRLSPASSHSDCSLSTSSLECTINPIATPIPKPEAHIFRAEVISTTLNTNPLTTPPKPAMNRQESLRENIEKITQLQSVLMSAHLCDASLLGGYTTPLITSPTASFANEPLMTPPLPPSPPPPLEPEEEEEQEENDVHDKQPEIEELQLMQRSELVLMVNPKPSTTDMACQTDELEDRDTDLEAAREEHQTRTTLQPRQRQPIELDYEQMSRELVKLLPPGDKIADILTPKICKPTSQYVSNLYNPDVPLRLAKRDVGTSTLMRMKSITSSAEIRVVSVELQLAEPSEEPTNLIKQKMDELIKHLNQKIVSLKREQQTISEECSANDRLGQDLFAKLAEKVRPSEASKFRTHVDAVGNITSLLLSLSERLAQTESSLETRQQERGALESKRDLLYEQMEEAQRLKSDIERRGVSIAGLLAKNLSADMCADYDYFINMKAKLIADARDLAVRIKGSEEQLSSLSDALVQSDC

SEQ ID NO: 18631 - DNA, 23333 bp, DROSOPHILA
aacataaatacgcagagctctacataaaatagtttcttcttacacaatcctggtgacttaaggttagttaatttctcattacagtagatatataatatagatatttataattcgtatgcaatatatgtacaatctaacacaagcccctgtaagtaattgtttttaatgtctcccatcgtttatctgttattcgcctaagcccaacaatgttatatttatcagcttagcttagttatttgtatttgtttatagaatctgtggagccttagtctagttagctaactgatctgcatatcattatccgtatgtggtaggtagctagtacgtaacatatttaatttacaattattaattatctccccttgaatactgacgtcatcgagtttctgttctttcactccgatcgctcggatatatttgcttcgttgcctaatgtgtgccgtgttctttagatataggatatataataatatcaactgtttaacttttacatatcaactacttaagacgtatgggggttgtaaaacgaaaagtatcacgattgaccaaacatagatcgatataaccgttaactacaagtgtttcaattctcattccaggtgagttttttctgcccccattgtgggcagcaattagtttttgcaatgaaaattggtacagaatataatctttgcacatacaagcatgtttgattgaacaaaaatgtgatgtaagtgatgtaccaaattgttttttttttttttataaaagtatcttgcattggactatgactttaaaatacttttcgtaaatgtcttagatattctgcattcaaaaggtaaaacatgatattaaaagcaatgtattcgggtcaacgacgttgtattcacatttctagatttatttccacccttgggatctttcagatgtgtaaaacctaccccttttgctgagtatacggattaatttcgacgcccagcgtcatacttagttcttatctctgacactgatcttccttttattaatttaagtacttccgacaccttttcgaaccgcatgagcaaggtatcttctcatcctcgaatgggaatttgtagtcgtaggtaagctcctcgccctgcacgattcggcgcagcgcaaagatgatgatgtgcttgtgccctaagatgtccaccactttcgaatagcaattcggctgcaagaaaaaaggatttgagcatctccagtgtaataggacacttcactttgtactcacctcacagcagtgattaatgaaacgcgccgcattgccgcgcatcgtggcatcaactacaaggttatcgtcaattttgaacatatagcacccaatgccgcggctgtcgtagtagcgttcccttttgtccgtcagtgtagagcgaatcaactcaccggcatattcgataaccatttcacctggaattagattaagattaagatccaattaatttatttattttgttcatcaacgctgaaaggaaagggaatcttacccgcttcaatgtccttagtgcagtagaggcctcgtccatggatatgggatctgaagactccaacataatccttgtaagtttccttaagagtccgatacttcatggccatgggtagattgctaccagttcccctcctaaacaaacaaaacaacgtcacaaatcaataaatatgtcctgtcacaaaatatgtaatatacacatacctgggtaccagttcattgtcggacggctggacgaacacctggatgggctgcttgcgatgtctggaggccaaccaactaaacatatcatactcgctgcggttggaataaggctcacatcgggcgcaatcgtaagcattttcctccaattcatcctgatccgatccatagtcgagcagaccatgtgaatctccaccagacactgagagggcagcggatgcactgcttccgcctaagttgcctccatgtgctccatttgccgctgtggacacgttaccattgcgcttgtgatacttgggagtatattttgagcacttttccacgcctggcaactgttcaattaggtacttaagggcattcgttttaagacctatcatctggatgccacccatatcggctagaggaccctctggcagcggagtaagtccatgtgcccgcctggccacctgtactgcctcaaagaccttctcccaaatctcagttatggaactcgatttgtacgtaaagccatcttcgctttgtatttcataaagcagatgtggaccagtcatttttttgggctcttgaatgggttgcggtggttcgggagcagctgctgtaggcacgatggcggcctttgattgctcctgttcttgcgagaccgttcgttgctcttcttttctcctcctgagctctagttccactccattttgcagctgcttaaggtccagtacatgagcatcggccatctcgttgatataggtggcagcggcttccacagctgcagtttctagagcgccttcgaactcttcggtgggagcagattgtgctgcagtggtggctaggacatcctccaccatttgctggtaaccagcgctggcatccacttccatcgtcgtcgccgtggctattgagtctgcacagtcatcgttggttaggttgtccagaatcttactgatcttatccttgaccgccggttcttcactgtcggacatctcgtgatcgttgcacgccgatgtggccattttcaagctgaaatcatcatcctcgtcctcctcctcttcgaggtcttcctccctgtagacatccgtatccattggctccacttgaaaggtgtgcttatcgagcagatacccgttgttgaccaattgttgattaagttgctctcgctgctgttgttggagaagtagctgttcagtcttcgactcccccggcgaattcttctcgtagagtccctccgtatagattgattccgttaccggctgttcctccaagattgcatccattgtgacatctggcacaatgctctccaaaactgaactaactttgagttccgcctcgtaaactggtgatggtagtgttgacttttgggcatagcacttggacacactggcgctagtcatttgatggattataggctgttcaacaggtttcggaggagtgggtgacgaaactacgggacactcgttggacaacggagcaggttcctggcgctgctgcatcggtagcacccgatttgtaggcctggttgtggagctgctggtggttgatggtgcttgttgttgcataggattaaccacattggtgggcagtgagcagttgctactgctactgctgctgcttgtggagaaatgctgcacgcggttagccagctcctgctgctccaaagcttgaggttccatcacaaattgcgattgcactactggtgcctcagcaagtgttataatgggcattgacggctgtacctgcacctgttgttgctgcagaggttgttgctgctggggaatatggatcatctgcgcctgctgcagctgttgctgctgcgtttgcgcggggattcgctgctgtgagatcgtaaccttcggcacctgattgaccaccacggctggaatctgctgctgcaactgtggctgctgctgttgctgttgctgcaacaaggagtgattttgattttgcaccttcggcgtaggcttcatcactttgggtttcacttccagcttgtgaattggtcgtatcatgttggttttcttctgaagaggcttcgatgcaatactgggtggtgctccacaagttgttcccgtaccggaagcggcttttcccttaacctgagattgtttgagattggagtttttcacctgtacttgagactgctgggtgactatactggtgggcagcaccttgttgaccacctgtggttgcggtggcactttgcctactcccgaaattcccgctgccttggcttgagcattcgttctctttatctgagttactggcgggatcttcgctgtgaccattacgggagaggtgtaatccattgatgtggaggctcctgaagatgtgggcaccgactggaactggaagttagcgttctgcagtatctgcgttgttgtgtcgtcctgcgtttgctgttgcagtacactggctgcgtttaggaatgtgcccgcactggatgcatctcctgtgttattgagcaccacatagccagcgggcagatcaacgatcggttcgattttactagcctggaatacctgtgtagtggttgctgagaagctggcattctggctaagcattcctggcattgctgtggaaacgaactgctgtgacgacatgactgtattctggacaatcgtctccagtccatagtacatcggttgggtggcgagaatcacctggggagaggtggtggcaaattccagaccactggatcctccacctgtaccacctaatattaggggttgctgattactgcccggctggttgccatcggctcctcctcccaactgaatggtttggggctggataagcgttcctatcacttgaggttgcgcttgtagcgattgcgccgtcagcatttgcaatccggagttgctgggtgtggtagtaagcactaaatttccactcgcatccgtttgcaaataggtagcacctgcaccgggagcagttgtcaggaaagtaggcgttgccgtaggctgtggctggggcttatactcccccgctgtaggaatggagatgtactgcagtggctgtccttggcttccgtctccagtcacaaacgaaatgatgttctggggctgagcctgaggcaagattatctgcggagcctgagtctgggtgctgctctggaacaacaactgcggctggaggagattctgccccataacggtgatgggctgttgcacctgagtctgctgctgctgttgatgctgctgagggtgcggttgcaacttggcctgaatcggcttcacctggtgtcctgacttcagctgcctctgtttgacggccgcctgctgagctgctttggtggccactgtcttcaggggctttccagctgccgtcaggggaagcataatcttcttatccgtattggtggcctgcagggtctgataggttgctgttggtgtcgttgtggcctgcatcgtctgggggatttggataaactgctgagtaccatcggggttggtggaaacagcaattaattgaggctgtgctggagctgtcaccgtaggttgagctagcgtaaaacctccacccagattggcagccaaactttgcagtgaattcgcatagatttgcaaatcgtccgtgtttgcttgggtagctggattcggctgggataggaaaaatccactgcccagggattggggttgtaattgaagctgctgcaatccctgtaagccaaactgtcccagggagcccaggctctgaacttggggaaacgatgttgctgattgaaggtaatttaaacctcctgcattcgctagaagttgcttttgcagctcgttcaagctttccgcactgatctgggtagcattattagtcattccttgcccgctgacgtcggattccgtttcattggaggacattgtgggactgcaggatggtaaatgccgctggaaggcgtcgtaatttctgtaggtgcattgacaccgatcgcatttaacttggccgctaaactgagctgtagatagatttccatctccggaaattatgcgaaattctgtaattgaatcatccacgccatccatttgcattatcctcatcttagctgcttcctcgcgcccttcactcttttcgaaataacgctttgctgcactccaggtgaaactcttgcttctcacagatccagatgtggtagcgactccttccacggatgtctcactgatagattgccttcttgacacgcctgccactgtggccatctcctttttgtttctttgctgactgctcagggttaaaaatactccttcagccaagtttttcgacagctttcgcctttttatagcggtggccatggcgctattcccgtcgagctttggccaagctagtgtcttgagcatctgcacttggctggagtttcgtgctgcggataacatcgcatcctccacaggattactggctggccagccatttcctaggctcgtatttgaattgcgggtatcctcatcgcagatgctcacagaattagctccacctgcttgttgattttgattttgagcctgattggaagtcattgcctgagtgccatccttggattgttcacttatggcaaacaagtctgtcttatcatcgtacaagaatatgtctagcattgagatgccatcgagtagctcgtggggaagatcttcgaatatggcatccttgagctctggcggaagcaaatcagcctgctgttgcggttcctcttcggtgttttcatccggtggtacacacgagttgggattcggaaattcgccactccagtcggttccgccattctccagaaattcactcctcgctagacttgtgtgccatcgagcgatttgcgccatacccaattgaacctccttgctatttggatttgtgtgatctacagtataatttcgacccacatccagggctgttagggttgacgaactgttctgtattgtggtgcgcactgtatactcaacgattttccagggctctttcgaagaccaatacagacgactgcagaggaaatttatgggcaccacggcttcgtaggagtcagagaatctgggaactatagctcccagctggcgaacctccaaagatccaatgtgaaattgcacacgagctggttctatcagctttttcctttttctatccaattccacatacacgggtcgagaaacctcaaaattggattcgtatgttacactgggcgatccattggctttcaaggcatttccattcttggcatgtgcaggacaatacatggacttatctgtgagaaatgcacagtcgatgcttctggcacatggatagtgatagtgctcgccacatgatcgcacattgcatccgacagtggctcctcggtttccacataccgtacacttgatcatcctacccctggccaccgcactgtggacattttgaagtgaaccgtcaatctcctcgaacacttccgcagaccacatggcacaattggtgtgaacccagcagtcgtgaccgcagtacagaagccgagcttcctcgcctgataagccttcaccactttttctgcagaagagacacattcttgtatctaatcgcatcttaatgccacaactgccaaagtcgtcaacttcctccaggggaatatccaacacaccagatcgcgattcagcctgtgaagtcgaatgctcgttgtaaacagaagcacttactcctccggtatcttgcaaatcctcgtaattgcctccagagcaggactcaaacatatcctcctccaaggcatcggtgcaggctttcgtttcgttttggaaccatgggaactgctcacttaacagctctttgtaggcaatgtccagttcatcgcaattactctgttggattacttgactcatgtcatagttgaattccgccaaggaaacatatgagttgccagctatcttctgcttaatatcaaccaggctaaaagattgtgaatggctgatgtgctgttggcaagagcagggcagggattttactcgtggcttgttcatgttagcattccgttgttgttgctgctgctgctgatccttaaactcatagacatcgtcgctgttctgagactcaccatcgctgcccaaaccgttatccgatccactactgaactgaagggcttttggttgaagtttcccttggtttgaggatgctccgcaagtacagcgcagcttcttgcggggacttagtttgagaagggcacaagcttgccgggatttgctgagaagtttcagaacgctgtagagactggctttgaactcctccattacagcctgtcgccattcctcagccttgatcttggaactctcattcctgcgggcacatttcttgcagataaactctattgactccggaagagtgctcaatagattgtactgctcatcgctgagaccctcgcacttggaatgaacccattgaccacagtcaccacactccatcatttttaaatcaaaatcgttgtcatcatagcatctctggcatattggacaaaagttgcccttcttgcgcaacttaaagcaacccgtacacatcggcaagttacccacaaatttcgatacttttgtggtggagcaagacttgcattttaagcaattgacgcatattaacggacgatcagctccaagaagtctcttgctagtgcccaagcaggtgctgtgatagttcttctgacacttctggcacttgaccttggaccctgatgacatattgcaggtgtagcaaacggtgcatcgaggacacaaccaattcaagcgctgtgttagctgatttaaggaggaagatggtcccgtggaggcatttaccgtcgtttccagaaggctgcccattagcgtggtatcctcaaaagagccatgtttcagattatattcatcttggacacagtactgatgatagggctcacaacagcaggcgcaaaagatcagcggatccaagcctgtagagccgcataggaaacacagagccctctgagccactgtttctgtcacaatcaaaccaaaaccagtttggcacacttccgcaggatcataattctcccaaaaatcgatggatatcagtgtacgctgctgtcgatgctccttagttttgcgtccctgggtttgatttgacgattgagtgaccgagcttgaggtagcaatgtccccgtttcgctgttttttgctggccgccactattaggttggacgcaaccgctgcatttcttgtggtaacctttgcagatgagcctccagctgcacttgctgtcccttctttacctaacgctgttgccttcttaacttcagcttgggcactgccagaggacttactgggtttcgattcatcaccaacaggagacgttttacagctagcacaattatcgttctcatctgtaacaatgtgagttggtttttcaggtgaaggttccataattgctgatggcactggagcagctatttcttgctgcatatcagccgcatcctcaggttgctgatcctcgccaaaggtagccaaaggttgcccgaggacaatggaggcactgcggcacacatgcttcactcgaggtccctttagatcaatcctttgtcgtttgagggtgtcgcctgtagcattcgtttcaccagcaagttctgcttgaggaacaccatgagaagctccattggaagcagatggctgggtggtggtagacgtttgtggtgcctcctctttttgaggttgaacttcttcaacttgagcttctgctgctccagatttcttcgtgcctgcctgtgtgggacttagaagcttttcgctctgttccgattcctttactttttctttctcctgtttgctgttcttttttgtcagactgggactgattgcttcagcagctgcaagtttttgatctgctgcattgcttatcttcaggaaaagaggattctccaaaatcgcaggacgcagcagaggagtactgccaaatgtgacattgttctccgccagcggattgggctttattgaagtcaaggcagaagtggagtcaccactggacttccacttcacagacgtagaagcaaccaccgaaggagaagaagaggacgcagtagaagtaaatctcagactgcctgttggagaaagcaattccgcagatttttcttctcgggcagcggcttctcctcgcatacccggtggcaatatagcacttaacctgcttctatgagctgcaggaagctgaaacgagatcatacattttttcagccaacacgcagtgcaacgatccttgtaaaacttcttgaagtttttcaactggctcttggctgaatgaatgctgcaaggtgatcctgcaaggaaatattcaataagcattagtaagagacggttaaaaataaataagatttctacaaccttcatttcctttgcattgcagatactgttggctgccggaggacgtattcgctgtgctcgaattggccgatattgatttcttggtcatctttgagaaaaacttcctgcacacgtcgcacgccacaactccgtacttacgggcttgggtcacctctttgctgctgaccaccgctgagcaaatggagcaggcactgggagtaggtgttactgtggtgaaatgaaatattaatacgtataagaatacaaatatataattgtttttttttttttagctaacctgttgatgaattcgtgctggctaacgatccaaaagacgaagtcgccagcgaattcgctggtttcggaatggcactgggtgatgtggggcaagcttttggagccgtaaatgttgcctgctggttgtctgcctggaattgcagacgaggttgcctcaggacaaagtttccagctgcactactatttggcttcaaggtgccaaagttaaagaaggtctccttgccaagcttcagattcgttgatgcggagaaggttgatgccgtggaacccgcacttgaggaagatgtaccgaagacatttttgcctttggagtctccaagagaaagaggcttcttggtactaatggcaccctcttccagcaatctcttgttgggcttgatgatccgcgaggatcgtgtgctccttttgggcaacacgaaatgcgagtccataaccaattgtttctcatccggatcacgctcatcagctccggcacttttctcagtttctgcactcttttcggatactgcttcatcattgtcatcctcattttcatcgtcttcctcggcttcttcgtcgtcgtcatcatcatccatttcatcgtcctccgcgttgttttgatcttctggagaatcattgcgacggaaggtaacgccaccctcatcatcttcatccatgggagcgccaaaagcgcgggataagccaaatacatttgaagacgatcctgattcctgatttgaggaagatgagctcgctcccgctgatcgaaatttaagagagttcagcttatcgatgttggagtttttgttgagtatcttggacaaaatggagggtcgcacgatgcactcgcctcctctggagtaattcaacggtcggtttaaggaatccttcttcataattgagacaattggtatgcggatgtctggattgtagaaccgcttcacaaccgacttatcatcgcttgtctccagcacgtttctaaacgtcaccgtcttcttttgcttagctgtcgttgatgacgtcgatggtcctgtatccgctccagatttgggactactaccgtccccagaagaggccattgctggcggtccattggaagcagatccttttcccgatgctgctccatttgccgctgcagtgcagctggatggagagggatcgcgggcaacttcattgggcatttcggtcaagacgcgcttctggaagtgtacacaaataaaagggttcagtaggtttcggttagggttgagtatggaaagtcggaaaaggggttccaagcaaatcaataattcatgctcacgaaatgagaaggggttagcttagcaagaaaaacaagcaagcaatgcatataaacacaacaagaaataagttagtaattaaaattaataggtattgtgcataaaatgatttgttacatatcattattttgttccttattaaaaaagtttttgaattatttaaatttttaacatatattaattaaagctttttttttggattttgtatggttcctttcacaataaaattgattcaagggacgcaatcttaaattagtaaggccaatggtagctttcagtgtatgggtaaagcacaaagaagcatgcaaaggaccagaagcaagtgcaacttttcgaaggggatcgctcggacatggtgggttactgaggcgcttgagagggggtaaggtatcggtgcaaaaacaagttactaagcataagtataagctggggaacagacaccactgtgaccgtcaaccgtctgcggcagacacatgtggaagagttgcaagcgctaaaacgtcataaaagccaattaagcaggtaagcgagcaggtaacaatggcgtcagaggcgggtggttgggtgtaaaggggctactaaccagaccagaaccatgggtaaaccaacttgagggggttctcttatttacattggcgggaattggactgtggcattgaacgaggatgtatgtgcagcaaagggtgcacacgcaactcagaatgagttggtcggattgaaggggttaaggtggcggaaaaaaagcggcttaaacatattcataaataaaagcaaaaggggggcaacacctgggaacaaaaccagcaaccaaacaccgacaatctgaaaatcaacttaccagggccgcatcctcacccgggctgaccacgccccctacgcctattcctccctccacagaaggcgtggagccggaggcaattggcggggagggggagggattgtccaccaccggactattgagctgcttcagcttggatgtggagggcagcataacttcgcccctggccaggttcagattcttgaactttttattactattcttgcgtgctctcagtaaagcggcacttataggaaaggttccaccttgggaggatcctccgggggaaaccagggcacaggccaatccagttgatgtggccggtgtcgccacgaacagtgctttgagacatgcgcctgaaaggccagaggttgttgcttcactagttgttccagaagatgctttagaagactttgcagaagagcatgtcccagcgcctgttgttttcgccaattttccagaggatgcttctgtggacttggctgtagatttcccgcatgatattccggaagatgctccatcggaagacgctccggaattgccatctggagaggagccagacgaccgtccagaggaagttacagaagtcgacgctgagaaagttctggaggacttgctcaaggcttttccagaagctgctgcggataatttgcctgagggtgcactcgacacatttcctctcgttttatcaccgtcaccgttttgatcctttgtcacagcctccttgtccagattggccgcactcttgtgatgggtgccgccgtttacactaccaccattggtggatcccgatccggatgatcccgatcccgtactggatccggaactgctgccattgccgctgtttccggagccggcggatgaggaagccgtattgccactaattgaggcaccacccggcgcattatcatcctcatcgttatcacaattattgcctttttcccgggcagccgatgaaccggatccagagccactcggctgctgggactccggcgctggctgctgcggttcggccggattggccgcatcatcctccagctgcaggacactgatccgcttacggttgatcgacttggagggtttgccgggaaacttggagcggcccataatagtagtgcgatttcgtttgcctttgcatttgcatttgcctgcctttagattggattttcctcgtttttgttcgatttatactgggacttgcagtttattttttttatttccacgaattgtttgatttctcgaacttgtggaaaactcactgtggataagagagaggcacaaagttcgggtaagagagaccgactaagaaagaccggtattagcacgaaaaaaatcaactagcaaaaacagaaacaccaacaacaacaccgctcgggaaaaaaaacaatacttgtaagccaaatcgcgcgtttggaatgcgtcaattttcccccttttttgcgaatctcgttgttgttgctgtggcaactcgtttattttgcactcctgccgcacgcccccttcacaacccactcactcactccttttggcgcacacactcttctccttggctatttatttatttatttctttttcgcgcgcgtttctcgttgcgcgctccttgctttgcgaattacaactacaatgccgaaggtgacgtatccgctcgacagcctcggctttttgcttttgacgcgctcaatcgctctctcagtcggagcgtacgctcaaaaaaaaaattggtgataatttgataaaggatctatgattttttaagatttttttaagatcatattaaagatattacaagaaatataaatttattaacggttttcaggtgatttattaaaataattgtatcgtgttccttttaacttaaggatagcctgtttttttgagtgcacactctcgggtacgactctcttgccaccttggcccgctctttccctgctcctgagcaaggaaaggtgcaattgcagctgcctttgttccgctccttctgccgctgtcgcacttcttgcgtgaccactaatacactcacacctaaaacagtgttggcagaattggtgttttatttaaattaatgggatttgatatttaatattatactattataaaattataacaatacctgtcagtatcaaagtaatgactgctaagatcaatcaaattcaaataatcttcagatataaaaacaaataatgtgataaggcttaatacacgaaaaacacatgaaaaatgacatttttatacaaatcgaggttttgttcagaagtttccttctgttttctttcgtattcaaaaagactttaaaacgcggttaagtatgcaatagattctttgaaggacttatcacatttcggccaaatttagcgggaaaacgccatagctgccagcactggcttaccaccacctttgcacgctttgccaccactaagtgtgtgcagtttacgaaaaaacaaaaaaaaattgaagcaaaacaactgctgcgttgtggctccttaaactcattccgttttctttggcacgtagcacgcgctctctctgtctctctttctcgcagactcctttttaagaaatgctctcacactccaaacgcgctcccgctctctctctctctctctcttggcaactacctttctccctccctcccgcgagctagttgtcatcgacgtttttaagtggtttttctacttcagacttgaacttttttgtttcttgttgctgttgttttctttgcaggattttctcgttcggcttttgttgttgctgctgcctttgtttttttccctgggatattttttgtttgctggaaattgaaattcttacagttgttgttgttgttgctgctgctgcggatggcgttgttgctgttgtgggccactattaagtggtgggttttccctactgctggctctttttacgacagtttttctctttgttctcgcttttatggcctgatgaaaattcttctttttgcgcgtttagtttttctgcgttgggagtttctgctcgacgaattcacagttttccacattgctgtactttcgcggcaacttttctcatctgtaactgccactgttgctcttgttgttcttgttgctgctgatgctggtttgtgttggcggccacatggtgctcattaccattaccatcattatccccatcatcatctcaatacatcctcggtctacatcattgccatcttcccattccaccccactgcatcactcacacacactggctcacaaaagtctgcagtctgcgtgtcttgaaatctgcaaaaaattaatcgagggggtggtaggtggtcgggaggcaatgggagagagaaaaaaaaacaaaaagtagaaatttattagttcgcttcgtcgcagttgggcaaacaagttgaaagttgactttttgagtgttttaagcgtgtgtgtggtgggtgacgatgtgcgatgattatgcatgtgtgtgtgtgtgtcgcagtgactgagtgtgagtgtgcacagaaagaactttctatgatcttatttacatacttaaaaacggaactctatattgacctatatatttattttatttatttatttattataatgtatattcactattagtggacacgagtagatacacctaaggtgtataaaagtatgctatataagctaccacattttgtatatacttagttaaaaaattaaataaaaattcttccacttttttctgagtgtgcgtgtgtgagctgctcaagtgctcggaatgaggtgaaaatactttcgagattttggggtggtggctaacacctccccctccccctcaccctctttcagtgaactcctttttcgcacattttccgagagcatgactcagtgcggcgtaattgttttccgtttcgcctccggtttccactcaaaggtgtttggcagtcagttagtttacctggtttacctgcctcgttagttagtcaatcttgtcaactgtactgcatactgctccccagcaagtcaatttaagttgcactcgtacacagaggtacgtagttggcacaatgggtcggaaaatatggctaacaggattacccacttgggaagtaataccatacctatacttgtatgttatattattttatataatttcatacttatttatctctggggataagaaaacttttcagaaagcctgaaaaagttttcaaaaaaaaaacttcgttcttgggcatttatgctcctatttttagcatacttttgaacatttatcttaactgcctcttgacttttatcctctagggatcatttgtctctatggaatttaatgtataagttattgcatttgtggccaaattaaaaagtttataataaattaagtgcttcgacacccactgtgccttcactttggtctcctgccactgtctcagttgtttgcgatttgtgattttattagtcgattttcctcgtttttattttatatcgcctctgctttggtttgtgtttctaccattgagttgtatctttatggccccagcggtggcatgatgtaagcatgggatacgagatacagcgaacgggactgggactgaaccgggcttaattggacaaaacactcatccgtatttgcacgacgattacactaattgctgcgaagttgccgtgaattgaatacctagcactcaatatgcatatgaataatttgcattttaaatcgatggatgatggagtgttaaaaatactcaataaagatcttaatcatacaagtgatacaagtgatttgtggctttttaatgtcatgccttgaaaggttattaaactatcatgacataataaaaaaaaatgtttgcctgcaatggtgtatttaaaatgctgatctagttactctttcaattactcgtaattatgcgacttaattcacttttaaatcatctacattttataggcaatcggttttacctggtacaaatgacttgccgatgttatgcgatatattttatgtcattgactgatgcgactggcaatcattatcccccactccatgattgatgagaatcgggaacatactcaatcagtggacgcaaccattgatagctattataagacacacccttcctctctgatataatcgttcctaatcgcttaatgcaaaaacaatataatattagtgaccatttaataccgagcacaaaacactaggcaaatatcatgacataacaaactaaaggttaattctctcaagctcaaaacaattgtcaacaatttaatacccatgctgtgggtagagcggggggatgagggggttcaagtcggcagacaagcaagaaacaatcagaaaaacactggccagccaacaaattgcacacaaattgtatccgagaaacacacacaaatgccaatgaaatgcgcagacagcagcagaatgctaaccacgttgtgtgttgacatcaattaactaaatcgctttaattatgtgccaccaaccgagcggcagcaacaacacaacatcaaagttccaaggagaattcagcgtgaataattcaccgaatcaataaaatcccacagaatgatgacaaaacgcgttgatatagacggcaaagtgagcaaatcccaattccgagtgtacaggggttgctccttaattacggaccatttgtttaccaaggggaagatgttagtatcgaaggataatgggcggtaacctgtacacgggatgctcgataattgcagaccaatttttttttttagaattttaattgaagtttttttcaggtacaggggcgtttccatttggaaaataattactgctcttacacatcgttcatttaggaaatttaaggatgatggtttgttccaagggagatctggatttaaatttttttatcaggtctgcgtcaatttatttttttggcttataagctcgcaaaataaaagtttccatctaatttgacgtaagtgtttacgtttatcccacaaatttactgcgctaattgcccgaattggatggaagaccttcaagcttttggccatgtccagatcaaattagtggtactaaacgaaaatgcaaatacacttgattatctaagttattacttagagattctaaaatcacctgataaatacaaaacaattttttaaaatttgaacacaaattatgaaagtaaaatatcaaatacacttaaaaattttccccccaaatacttcagtattgaattgcactttattcgattgtttaatctgagacatttgactgtatttcgatatcgacacccaattaatggtgttcaagtgtcgtcggcttcactgtaattcgagtacagccattaaaccagagtcgcgcggaatttgtgaaggtgggaagggggaaggctgtcgagggggggggggttgtggcagaggctgtggatggaggaggaggatgggggtgtttaatacaaagaggccaagagacaatcggccaacaaaacgaacaatctcccggcaaacaacgaacaacgaggcaaagtaaaactggcctggccaattcgaaattcgaatgcatcgtcatcatcatcatcaccgtctcctcgaaatcgacagccgaacgaacacgaagataaacgaaaatactaaaccaaatttgacgggggagaagagggtatggagcaaaatgagagagagagagagagagagagcaaacgcacacacctttaatttaattgccatcaattatggtaaaaagattaagaaatcaaagcaagcgcaaaaggtaaaataacttgaataagaagaatgggccaccaaaatgaaactgaatacgagcacttaacgaaattagataaaatattttaattgaataatgtacatcgatttgaagagtatatcaaagtataagaatgctttttgagttgcaatatgattgattgctgagattggcagcagattataaaccttttcccaacattattgacctataaatagatctagtttaaaaacaaatcccatatcaaatcaatcggatgacagcatgtcgaaataatgccactttatttcacaatgataagtatgttcgtctgagctgcgaagtgatatgaaaacttgctcgtaaattgcttaattgattaaaattgacatctaattatacgttttttgttgtgtaccagtaaaccccagtacacatagccccgtctctgtcgcactgcatgccaataaccgccaaagaggggcgagcacaagacttgcaaattgcgagtaattgagaagattaaagtcaagcacacgagagcagacagagatggcaaatgagtgggagggagaaggagactggtgggagggggcccggtcaaagagagggagagagagtcaggtaacgaatcgactggcaaacgattaaagccataaacacgagcacgacaatcacaacaacttacatacaacacaaacagctaccaaatagacaactatctgcatgccacacacacactgctgcacaaactcgattgacaagttggaaaaaatcgaagtcaacctcgcacataaaatatgtaaatttgtatgaaattattccaaaatgtcgtttataaatgatcactgaaaaaaatgatcgtaaatgggaggtaaattaaatgaattttaagccccacagtcactccataacttttcctactccacttattaaatattctttgaattaatacataattatttgatcaataattggcaacattaaccgcaaaatttttctcagtacaacaatgagagagcccagagaaagcagctgtagaggtggaatcaacaaatgagcgtgagccccattccccaaaaacaaaaagagcggcagagagcacacgcgggggagtgtatgtttgtatgcttgtgcacacacacatacaccgtatttgcttgtaaatcaaaacacgcagccaaaggtgaaacatgaaaaatgtgcgcgccaataaatgtgcgaaaggtgtcgtggtgtgggtgccgcatggattggtgttgggatggatggatagagatggtcggatggatatctgtatctctgtgggccatgagcattgggcattgaatattgagagccgacttggcagctcgcaattttgatgtccaatttgccacgaaacatgaactaaatacttgtacgcgaatgtttgtttgcgtgtgtgggcatctggtttcgtggtgtttatgctgtgtgttggtggtggtggtaaaaggtaacgaaacacaaggtaaaataaattcaactcagctggcagctgcagcctctcaaaacgcactgtaaataaaggtgtaaatacagctagctggtagcaacaatgcaaactaataattcggccaccgaagcaaatagaaatcacacctacagtgatcgctcgctaagcgaagcattgtagtgctcatgttttagaaaatagattatcttggagaagaagaacaaataaacaaatgacttttttcgattttacaataggaattatgtaaacaaggatattttaatttaaacccgttgaaaatgtcccatcaaatgatcttaaaatttgtatttgtgagtagacccatccgaattcaaatgtgcaatgattctgtgaggcgtgatcgacgagatgcggacgcagtggagcgtgaaaatgcattcggatgagcatcggttggcccgcatcgcatattcattcccattcaagatctcgcattagcttacggctcagttggtcgacttttgaaaggcgaattttaatatgcgcaattactcatttggcgattttgcgcctcaatgttgtttggcgcgtagtttcccacacacaaacacacaggcatcgacactagccgatttggaatttgcctttttgatggcaaataaaaaaatggcgtcaacaaatactcaaacagccaatgtacaagtacatatatttattttgtaattattcaacagcttctaggcagcgaacggcagcggcaatcgatttagctcctgctgctgctgagatcgtttttcattttattgtataatttattaaaagtttcaacagcgccagcaacaaaacaaacagcaattttagttatacaaacactttggccatgtgagcccaatagagagagagagagagagagaaagagacggtgagagcgagagagtgatttgatttagaatgaggcgacaacaaaagcaattaactggtcacacattaagttttatttatcggcgatgctttattatagctcgccgctgtgtgtgtgggtgtgttagcgactgtcatttaccgttcgttttacgggtggtaaataatggaaaacgtcgtagatggaaacttgcagtaaaatccccctggctaacagaaaacgaataatattgtttcttataagaatgaaatatttgatggattaacttcaggagtcatatgattatatgataatagatgtacttattttaagcaaaaaatatttcgcctcctctttaaactgttagtattagattaaaataaaaatattaactaatgaattcgttgttaagaaagttgttattaaatcaacaggttttccagaaacaagacttgcttactagtactacaaaatagaacaaaactaaatcaaaaatgctaccatctgctgctagtcgcactcaacgaggtcccactgtagacataaatcgcagcgtgggccataaactaacagtatttgttgtgcagcctaatttgcattatcgagtgaataattgaacgacactttcctattctttctagctaaaaacaacaatctaaactactgactagaggtctacaaaggttagtggggactttatgaatatgaaatcgacgggatgggatatgataatgtgatgtggtgtgcaatggtgtacagtatctccgggtgcattccaaatcaatatctggcatgcttatatatgtgcgcaaatatccattgatatatattcacggcagactgactcatcggcagccggcgacgccttttatcgcggcgatcttataattaccttgctgtcgagcgtgtatccagatgcagattgagattcgataccgtttcaggggttgttgttaccatttggcatccttggtgcacgaatataatacgaaaacgaaaataatccacacttgggacaatttcacaacaaaacgggacagaaacacacgcactcaaaacactagtaaacacaaaatacaggggtggagattgcgattttcgtttttattttcgttcacttatttcttggtttttgctttggctctcacattcgccgctctctcactctgtcgctctgcgctcacaaaacaaacgcacaggtacacgcacacacgaaccgaaatggcccgctctcttgctatttcgttctctctctcgcgcccgcgcgtttcgtatatacatatgttgctacgtatgcgcgtgtgtgtgtgtgcgggtgtctgtatgtatgggttttacgacgatgaaaaatgcctgcttcttcttcacagaaatcaggttttctgctctcgattttcacacttttttaacaattgaacgccacaaattcgatgtaatttcattggcagacactgcataccatattcacacacactatttagcacagtttatcaattattttccacattttctgcgttttttcgacgagcgaaatggaaatagcaaagcaaaacgaccggacagtgtgaccgcgccgataactataaaaaatactgtgagacttacaaataaattcatgtgtgtgcagacctggtcacaccgatattttagtagggtgtctctgctctgcggggtgtgtgtcttggttaaatacggaatgtgtctctgctagttcaaagacaaaagcgtattgctacaaaacagtatttttcaaaatttaaaaccactttcggtgtaactgctaatttgtttaatttgtggtaattaaaatgtttagaatggagtgtacaaaacacattaaccttgaatttttgaatatccaatattatcacactttccgttcaatataatttttaagtacccttcggtatcttattgggaaagaaggaaagaaaagaaaccgcttcggta

SEQ ID NO: 18632 - DNA, 11839 bp, DROSOPHILA
caacccctgaaacggtatcgaatctcaatctgcatctggatacacgctcgacagcaagatttcaagacacgcagactgcagacttttgtgagccagtgtgtgtgagtgatgcagtggggtggaatgggaagatggcaatgatgtagaccgaggatgtattgagatgatgatggggataatgatggtaatggtaatgagcaccatgtggccgccaacacaaaccagcatcagcagcaacaagaacaacaagagcaacagtggcagttacagatgagaaaagttgccgcgaaagtacagcaatgtggaaaactgtgaattcgtcgagcagaaactcccaacgcagaaaaactaaacgcgcaaaaagaagaattttcatcaggccataaaagcgagaacaaagagaaaaactgtcgtaaaaagagccagcagtagggaaaacccaccacttaatagtggcccacaacagcaacaacgccatccgcagcagcagcaacaacaacaacaacttgagttttccacaagttcgagaaatcaaacaattcgtggaaataaaaaaaataaactgcaagtcccagtataaatcgaacaaaaacgaggaaaatccaatctaaaggcaggcaaatgcaaatgcaaaggcaaacgaaatcgcactactattatgggccgctccaagtttcccggcaaaccctccaagtcgatcaaccgtaagcggatcagtgtcctgcagctggaggatgatgcggccaatccggccgaaccgcagcagccagcgccggagtcccagcagccgagtggctctggatccggttcatcggctgcccgggaaaaaggcaataattgtgataacgatgaggatgataatgcgccgggtggtgcctcaattagtggcaatacggcttcctcatccgccggctccggaaacagcggcaatggcagcagttccggatccagtacgggatcgggatcatccggatcgggatccaccaatggtggtagtgtaaacggcggcacccatcacaagagtgcggccaatctggacaaggaggctgtgacaaaggatcaaaacggtgacggtgataaaacgagaggaaatgtgtcgagtgcaccctcaggcaaattatccgcagcagcttctggaaaagccttgagcaagtcctccagaactttctcagcgtcgacttctgtaacttcctctggacggtcgtctggctcctctccagatggcaattccggagcgtcttccgatggagcatcttccggaatatcatgcgggaaatctacagccaagtccacagaagcatcctctggaaaattggcgaaaacaacaggcgctgggacatgctcttctgcaaagtcttctaaagcatcttctggaacaactagtgaagcaacaacctctggcctttcaggcgcatgtctcaaagcactgttcgtggcgacaccggccacatcaactggattggcctgtgccctggtttcccccggaggatcctcccaaggtggaacctttcctataagtgccgctttactgagagcacgcaagaatagtaataaaaagttcaagaatctgaacctggccaggggcgaagttatgctgccctccacatccaagctgaagcagctcaatagtccggtggtggacaatccctccccctccccgccaattgcctccggctccacgccttctgtggagggaggaataggcgtagggggcgtggtcagcccgggtgaggatgcggccctgaagcgcgtcttgaccgaaatgcccaatgaagttgcccgcgatccctctccatccagctgcactgcagcggcaaatggagcagcatcgggaaaaggatctgcttccaatggaccgccagcaatggcctcttctggggacggtagtagtcccaaatctggagcggatacaggaccatcgacgtcatcaacgacagctaagcaaaagaagacggtgacgtttagaaacgtgctggagacaagcgatgataagtcggttgtgaagcggttctacaatccagacatccgcataccaattgtctcaattatgaagaaggattccttaaaccgaccgttgaattactccagaggaggcgagtgcatcgtgcgaccctccattttgtccaagatactcaacaaaaactccaacatcgataagctgaactctcttaaatttcgatcagcgggagcgagctcatcttcctcaaatcaggaatcaggatcgtcttcaaatgtatttggcttatcccgcgcttttggcgctcccatggatgaagatgatgagggtggcgttaccttccgtcgcaatgattctccagaagatcaaaacaacgcggaggacgatgaaatggatgatgatgacgacgacgaagaagccgaggaagacgatgaaaatgaggatgacaatgatgaagcagtatccgaaaagagtgcagaaactgagaaaagtgccggagctgatgagcgtgatccggatgagaaacaattggttatggactcgcatttcgtgttgcccaaaaggagcacacgatcctcgcggatcatcaagcccaacaagagattgctggaagagggtgccattagtaccaagaagcctctttctcttggagactccaaaggcaaaaatgtcttcggtacatcttcctcaagtgcgggttccacggcatcaaccttctccgcatcaacgaatctgaagcttggcaaggagaccttctttaactttggcaccttgaagccaaatagtagtgcagctggaaactttgtcctgaggcaacctcgtctgcaattccaggcagacaaccagcaggcaacatttacggctccaaaagcttgccccacatcacccagtgccattccgaaaccagcgaattcgctggcgacttcgtcttttggatcgttagccagcacgaattcatcaacagtaacacctactcccagtgcctgctccatttgctcagcggtggtcagcagcaaagaggtgacccaagcccgtaagtacggagttgtggcgtgcgacgtgtgcaggaagtttttctcaaagatgaccaagaaatcaatatcggccaattcgagcacagcgaatacgtcctccggcagccaacagtatctgcaatgcaaaggaaatgaaggatcaccttgcagcattcattcagccaagagccagttgaaaaacttcaagaagttttacaaggatcgttgcactgcgtgttggctgaaaaaatgtatgatctcgtttcagcttcctgcagctcatagaagcaggttaagtgctatattgccaccgggtatgcgaggagaagccgctgcccgagaagaaaaatctgcggaattgctttctccaacaggcagtctgagatttacttctactgcgtcctcttcttctccttcggtggttgcttctacgtctgtgaagtggaagtccagtggtgactccacttctgccttgacttcaataaagcccaatccgctggcggagaacaatgtcacatttggcagtactcctctgctgcgtcctgcgattttggagaatcctcttttcctgaagataagcaatgcagcagatcaaaaacttgcagctgctgaagcaatcagtcccagtctgacaaaaaagaacagcaaacaggagaaagaaaaagtaaaggaatcggaacagagcgaaaagcttctaagtcccacacaggcaggcacgaagaaatctggagcagcagaagctcaagttgaagaagttcaacctcaaaaagaggaggcaccacaaacgtctaccaccacccagccatctgcttccaatggagcttctcatggtgttcctcaagcagaacttgctggtgaaacgaatgctacaggcgacaccctcaaacgacaaaggattgatctaaagggacctcgagtgaagcatgtgtgccgcagtgcctccattgtcctcgggcaacctttggctacctttggcgaggatcagcaacctgaggatgcggctgatatgcagcaagaaatagctgctccagtgccatcagcaattatggaaccttcacctgaaaaaccaactcacattgttacagatgagaacgataattgtgctagctgtaaaacgtctcctgttggtgatgaatcgaaacccagtaagtcctctggcagtgcccaagctgaagttaagaaggcaacagcgttaggtaaagaagggacagcaagtgcagctggaggctcatctgcaaaggttaccacaagaaatgcagcggttgcgtccaacctaatagtggcggccagcaaaaaacagcgaaacggggacattgctacctcaagctcggtcactcaatcgtcaaatcaaacccagggacgcaaaactaaggagcatcgacagcagcgtacactgatatccatcgatttttgggagaattatgatcctgcggaagtgtgccaaactggttttggtttgattgtgacagaaacagtggctcagagggctctgtgtttcctatgcggctctacaggcttggatccgctgatcttttgcgcctgctgttgtgagccctatcatcagtactgtgtccaagatgaatataatctgaaacatggctcttttgaggataccacgctaatgggcagccttctggaaacgacggtaaatgcctccacgggaccatcttcctccttaaatcagctaacacagcgcttgaattggttgtgtcctcgatgcaccgtttgctacacctgcaatatgtcatcagggtccaaggtcaagtgccagaagtgtcagaagaactatcacagcacctgcttgggcactagcaagagacttcttggagctgatcgtccgttaatatgcgtcaattgcttaaaatgcaagtcttgctccaccacaaaagtatcgaaatttgtgggtaacttgccgatgtgtacgggttgctttaagttgcgcaagaagggcaacttttgtccaatatgccagagatgctatgatgacaacgattttgatttaaaaatgatggagtgtggtgactgtggtcaatgggttcattccaagtgcgagggtctcagcgatgagcagtacaatctattgagcactcttccggagtcaatagagtttatctgcaagaaatgtgcccgcaggaatgagagttccaagatcaaggctgaggaatggcgacaggctgtaatggaggagttcaaagccagtctctacagcgttctgaaacttctcagcaaatcccggcaagcttgtgcccttctcaaactaagtccccgcaagaagctgcgctgtacttgcggagcatcctcaaaccaagggaaacttcaaccaaaagcccttcagttcagtagtggatcggataacggtttgggcagcgatggtgagtctcagaacagcgacgatgtctatgagtttaaggatcagcagcagcagcaacaacaacggaatgctaacatgaacaagccacgagtaaaatccctgccctgctcttgccaacagcacatcagccattcacaatcttttagcctggttgatattaagcagaagatagctggcaactcatatgtttccttggcggaattcaactatgacatgagtcaagtaatccaacagagtaattgcgatgaactggacattgcctacaaagagctgttaagtgagcagttcccatggttccaaaacgaaacgaaagcctgcaccgatgccttggaggaggatatgtttgagtcctgctctggaggcaattacgaggatttgcaagataccggaggagtaagtgcttctgtttacaacgagcattcgacttcacaggctgaatcgcgatctggtgtgttggatattcccctggaggaagttgacgactttggcagttgtggcattaagatgcgattagatacaagaatgtgtctcttctgcagaaaaagtggtgaaggcttatcaggcgaggaagctcggcttctgtactgcggtcacgactgctgggttcacaccaattgtgccatgtggtctgcggaagtgttcgaggagattgacggttcacttcaaaatgtccacagtgcggtggccaggggtaggatgatcaagtgtacggtatgtggaaaccgaggagccactgtcggatgcaatgtgcgatcatgtggcgagcactatcactatccatgtgccagaagcatcgactgtgcatttctcacagataagtccatgtattgtcctgcacatgccaagaatggaaatgccttgaaagccaatggatcgcccagtgtaacatacgaatccaattttgaggtttctcgacccgtgtatgtggaattggatagaaaaaggaaaaagctgatagaaccagctcgtgtgcaatttcacattggatctttggaggttcgccagctgggagctatagttcccagattctctgactcctacgaagccgtggtgcccataaatttcctctgcagtcgtctgtattggtcttcgaaagagccctggaaaatcgttgagtatacagtgcgcaccacaatacagaacagttcgtcaaccctaacagccctggatgtgggtcgaaattatactgtagatcacacaaatccaaatagcaaggaggttcaattgggtatggcgcaaatcgctcgatggcacacaagtctagcgaggagtgaatttctggagaatggcggaaccgactggagtggcgaatttccgaatcccaactcgtgtgtaccaccggatgaaaacaccgaagaggaaccgcaacagcaggctgatttgcttccgccagagctcaaggatgccatattcgaagatcttccccacgagctactcgatggcatctcaatgctagacatattcttgtacgatgataagacagacttgtttgccataagtgaacaatccaaggatggcactcaggcaatgacttccaatcaggctcaaaatcaaaatcaacaagcaggtggagctaattctgtgagcatctgcgatgaggatacccgcaattcaaatacgagcctaggaaatggctggccagccagtaatcctgtggaggatgcgatgttatccgcagcacgaaactccagccaagtgcagatgctcaagacactagcttggccaaagctcgacgggaatagcgccatggccaccgctataaaaaggcgaaagctgtcgaaaaacttggctgaaggagtatttttaaccctgagcagtcagcaaagaaacaaaaaggagatggccacagtggcaggcgtgtcaagaaggcaatctatcagtgagacatccgtggaaggagtcgctaccacatctggatctgtgagaagcaagagtttcacctggagtgcagcaaagcgttatttcgaaaagagtgaagggcgcgaggaagcagctaagatgaggataatgcaaatggatggcgtggatgattcaattacagaatttcgcataatttccggagatggaaatctatctacagctcagtttagcggccaagttaaatgcgatcggtgtcaatgcacctacagaaattacgacgccttccagcggcatttaccatcctgcagtcccacaatgtcctccaatgaaacggaatccgacgtcagcgggcaaggaatgactaataatgctacccagatcagtgcggaaagcttgaacgagctgcaaaagcaacttctagcgaatgcaggaggtttaaattaccttcaatcagcaacatcgtttccccaagttcagagcctgggctccctgggacagtttggcttacagggattgcagcagcttcaattacaaccccaatccctgggcagtggatttttcctatcccagccgaatccagctacccaagcaaacacggacgatttgcaaatctatgcgaattcactgcaaagtttggctgccaatctgggtggaggttttacgctagctcaacctacggtgacagctccagcacagcctcaattaattgctgtttccaccaaccccgatggtactcagcagtttatccaaatcccccagacgatgcaggccacaacgacaccaacagcaacctatcagaccctgcaggccaccaatacggataagaagattatgcttcccctgacggcagctggaaagcccctgaagacagtggccaccaaagcagctcagcaggcggccgtcaaacagaggcagctgaagtcaggacaccaggtgaagccgattcaggccaagttgcaaccgcaccctcagcagcatcaacagcagcagcagactcaggtgcaacagcccatcaccgttatggggcagaatctcctccagccgcagttgttgttccagagcagcacccagactcaggctccgcagataatcttgcctcaggctcagccccagaacatcatttcgtttgtgactggagacggaagccaaggacagccactgcagtacatctccattcctacagcgggggagtataagccccagccacagcctacggcaacgcctactttcctgacaactgctcccggtgcaggtgctacctatttgcaaacggatgcgagtggaaatttagtgcttactaccacacccagcaactccggattgcaaatgctgacggcgcaatcgctacaagcgcaacctcaagtgataggaacgcttatccagccccaaaccattcagttgggaggaggagccgatggcaaccagccgggcagtaatcagcaacccctaatattaggtggtacaggtggaggatccagtggtctggaatttgccaccacctctccccaggtgattctcgccacccaaccgatgtactatggactggagacgattgtccagaatacagtcatgtcgtcacagcagttcgtttccacagcaatgccaggaatgcttagccagaatgccagcttctcagcaaccactacacaggtattccaggctagtaaaatcgaaccgatcgttgatctgcccgctggctatgtggtgctcaataacacaggagatgcatccagtgcgggcacattcctaaacgcagccagtgtactgcaacagcaaacgcaggacgacacaacaacgcagatactgcagaacgctaacttccagttccagtcggtgcccacatcttcaggagcctccacatcaatggattacacctctcccgtaatggtcacagcgaagatcccgccagtaactcagataaagagaacgaatgctcaagccaaggcagcgggaatttcgggagtaggcaaagtgccaccgcaaccacaggtggtcaacaaggtgctgcccaccagtatagtcacccagcagtctcaagtacaggtgaaaaactccaatctcaaacaatctcaggttaagggaaaagccgcttccggtacgggaacaacttgtggagcaccacccagtattgcatcgaagcctcttcagaagaaaaccaacatgatacgaccaattcacaagctggaagtgaaacccaaagtgatgaagcctacgccgaaggtgcaaaatcaaaatcactccttgttgcagcaacagcaacagcagcagccacagttgcagcagcagattccagccgtggtggtcaatcaggtgccgaaggttacgatctcacagcagcgaatccccgcgcaaacgcagcagcaacagctgcagcaggcgcagatgatccatattccccagcagcaacaacctctgcagcaacaacaggtgcaggtacagccgtcaatgcccattataacacttgctgaggcaccagtagtgcaatcgcaatttgtgatggaacctcaagctttggagcagcaggagctggctaaccgcgtgcagcatttctccacaagcagcagcagtagcagtagcaactgctcactgcccaccaatgtggttaatcctatgcaacaacaagcaccatcaaccaccagcagctccacaaccaggcctacaaatcgggtgctaccgatgcagcagcgccaggaacctgctccgttgtccaacgagtgtcccgtagtttcgtcacccactcctccgaaacctgttgaacagcctataatccatcaaatgactagcgccagtgtgtccaagtgctatgcccaaaagtcaacactaccatcaccagtttacgaggcggaactcaaagttagttcagttttggagagcattgtgccagatgtcacaatggatgcaatcttggaggaacagccggtaacggaatcaatctatacggagggactctacgagaagaattcgccgggggagtcgaagactgaacagctacttctccaacaacagcagcgagagcaacttaatcaacaattggtcaacaacgggtatctgctcgataagcacacctttcaagtggagccaatggatacggatgtctacagggaggaagacctcgaagaggaggaggacgaggatgatgatttcagcttgaaaatggccacatcggcgtgcaacgatcacgagatgtccgacagtgaagaaccggcggtcaaggataagatcagtaagattctggacaacctaaccaacgatgactgtgcagactcaatagccacggcgacgacgatggaagtggatgccagcgctggttaccagcaaatggtggaggatgtcctagccaccactgcagcacaatctgctcccaccgaagagttcgaaggcgctctagaaactgcagctgtggaagccgctgccacctatatcaacgagatggccgatgctcatgtactggaccttaagcagctgcaaaatggagtggaactagagctcaggaggagaaaagaagagcaacgaacggtctcgcaagaacaggagcaatcaaaggccgccatcgtgcctacagcagctgctcccgaaccaccgcaacccattcaagagcccaaaaaaatgactggtccacatctgctttatgaaatacaaagcgaagatggctttacgtacaaatcgagttccataactgagatttgggagaaggtctttgaggcagtacaggtggccaggcgggcacatggacttactccgctgccagagggtcctctagccgatatgggtggcatccagatgataggtcttaaaacgaatgcccttaagtacctaattgaacagttgccaggcgtggaaaagtgctcaaaatatactcccaagtatcacaagcgcaatggtaacgtgtccacagcggcaaatggagcacatggaggcaacttaggcggaagcagtgcatccgctgccctctcagtgtctggtggagattcacatggtctgctcgactatggatcggatcaggatgaattggaggaaaatgcttacgattgcgcccgatgtgagccttattccaaccgcagcgagtatgatatgtttagttggttggcctccagacatcgcaagcagcccatccaggtgttcgtccagccgtccgacaatgaactggtacccaggaggggaactggtagcaatctacccatggccatgaagtatcggactcttaaggaaacttacaaggattatgttggagtcttcagatcccatatccatggacgaggcctctactgcactaaggacattgaagcgggtgaaatggttatcgaatatgccggtgagttgattcgctctacactgacggacaaaagggaacgctactacgacagccgcggcattgggtgctatatgttcaaaattgacgataaccttgtagttgatgccacgatgcgcggcaatgcggcgcgtttcattaatcactgctgtgagccgaattgctattcgaaagtggtggacatcttagggcacaagcacatcatcatctttgcgctgcgccgaatcgtgcagggcgaggagcttacctacgactacaaattcccattcgaggatgagaagataccttgctcatgcggttcgaaaaggtgtcggaagtacttaaattaa

SEQ ID NO: 18633 - protein, 3726 aa, DROSOPHILA
MGRSKFPGKPSKSINRKRISVLQLEDDAANPAEPQQPAPESQQPSGSGSGSSAAREKGNNCDNDEDDNAPGGASISGNTASSSAGSGNSGNGSSSGSSTGSGSSGSGSTNGGSVNGGTHHKSAANLDKEAVTKDQNGDGDKTRGNVSSAPSGKLSAAASGKALSKSSRTFSASTSVTSSGRSSGSSPDGNSGASSDGASSGISCGKSTAKSTEASSGKLAKTTGAGTCSSAKSSKASSGTTSEATTSGLSGACLKALFVATPATSTGLACALVSPGGSSQGGTFPISAALLRARKNSNKKFKNLNLARGEVMLPSTSKLKQLNSPVVDNPSPSPPIASGSTPSVEGGIGVGGVVSPGEDAALKRVLTEMPNEVARDPSPSSCTAAANGAASGKGSASNGPPAMASSGDGSSPKSGADTGPSTSSTTAKQKKTVTFRNVLETSDDKSVVKRFYNPDIRIPIVSIMKKDSLNRPLNYSRGGECIVRPSILSKILNKNSNIDKLNSLKFRSAGASSSSSNQESGSSSNVFGLSRAFGAPMDEDDEGGVTFRRNDSPEDQNNAEDDEMDDDDDDEEAEEDDENEDDNDEAVSEKSAETEKSAGADERDPDEKQLVMDSHFVLPKRSTRSSRIIKPNKRLLEEGAISTKKPLSLGDSKGKNVFGTSSSSAGSTASTFSASTNLKLGKETFFNFGTLKPNSSAAGNFVLRQPRLQFQADNQQATFTAPKACPTSPSAIPKPANSLATSSFGSLASTNSSTVTPTPSACSICSAVVSSKEVTQARKYGVVACDVCRKFFSKMTKKSISANSSTANTSSGSQQYLQCKGNEGSPCSIHSAKSQLKNFKKFYKDRCTACWLKKCMISFQLPAAHRSRLSAILPPGMRGEAAAREEKSAELLSPTGSLRFTSTASSSSPSVVASTSVKWKSSGDSTSALTSIKPNPLAENNVTFGSTPLLRPAILENPLFLKISNAADQKLAAAEAISPSLTKKNSKQEKEKVKESEQSEKLLSPTQAGTKKSGAAEAQVEEVQPQKEEAPQTSTTTQPSASNGASHGVPQAELAGETNATGDTLKRQRIDLKGPRVKHVCRSASIVLGQPLATFGEDQQPEDAADMQQEIAAPVPSAIMEPSPEKPTHIVTDENDNCASCKTSPVGDESKPSKSSGSAQAEVKKATALGKEGTASAAGGSSAKVTTRNAAVASNLIVAASKKQRNGDIATSSSVTQSSNQTQGRKTKEHRQQRTLISIDFWENYDPAEVCQTGFGLIVTETVAQRALCFLCGSTGLDPLIFCACCCEPYHQYCVQDEYNLKHGSFEDTTLMGSLLETTVNASTGPSSSLNQLTQRLNWLCPRCTVCYTCNMSSGSKVKCQKCQKNYHSTCLGTSKRLLGADRPLICVNCLKCKSCSTTKVSKFVGNLPMCTGCFKLRKKGNFCPICQRCYDDNDFDLKMMECGDCGQWVHSKCEGLSDEQYNLLSTLPESIEFICKKCARRNESSKIKAEEWRQAVMEEFKASLYSVLKLLSKSRQACALLKLSPRKKLRCTCGASSNQGKLQPKALQFSSGSDNGLGSDGESQNSDDVYEFKDQQQQQQQRNANMNKPRVKSLPCSCQQHISHSQSFSLVDIKQKIAGNSYVSLAEFNYDMSQVIQQSNCDELDIAYKELLSEQFPWFQNETKACTDALEEDMFESCSGGNYEDLQDTGGVSASVYNEHSTSQAESRSGVLDIPLEEVDDFGSCGIKMRLDTRMCLFCRKSGEGLSGEEARLLYCGHDCWVHTNCAMWSAEVFEEIDGSLQNVHSAVARGRMIKCTVCGNRGATVGCNVRSCGEHYHYPCARSIDCAFLTDKSMYCPAHAKNGNALKANGSPSVTYESNFEVSRPVYVELDRKRKKLIEPARVQFHIGSLEVRQLGAIVPRFSDSYEAVVPINFLCSRLYWSSKEPWKIVEYTVRTTIQNSSSTLTALDVGRNYTVDHTNPNSKEVQLGMAQIARWHTSLARSEFLENGGTDWSGEFPNPNSCVPPDENTEEEPQQQADLLPPELKDAIFEDLPHELLDGISMLDIFLYDDKTDLFAISEQSKDGTQAMTSNQAQNQNQQAGGANSVSICDEDTRNSNTSLGNGWPASNPVEDAMLSAARNSSQVQMLKTLAWPKLDGNSAMATAIKRRKLSKNLAEGVFLTLSSQQRNKKEMATVAGVSRRQSISETSVEGVATTSGSVRSKSFTWSAAKRYFEKSEGREEAAKMRIMQMDGVDDSITEFRIISGDGNLSTAQFSGQVKCDRCQCTYRNYDAFQRHLPSCSPTMSSNETESDVSGQGMTNNATQISAESLNELQKQLLANAGGLNYLQSATSFPQVQSLGSLGQFGLQGLQQLQLQPQSLGSGFFLSQPNPATQANTDDLQIYANSLQSLAANLGGGFTLAQPTVTAPAQPQLIAVSTNPDGTQQFIQIPQTMQATTTPTATYQTLQATNTDKKIMLPLTAAGKPLKTVATKAAQQAAVKQRQLKSGHQVKPIQAKLQPHPQQHQQQQQTQVQQPITVMGQNLLQPQLLFQSSTQTQAPQIILPQAQPQNIISFVTGDGSQGQPLQYISIPTAGEYKPQPQPTATPTFLTTAPGAGATYLQTDASGNLVLTTTPSNSGLQMLTAQSLQAQPQVIGTLIQPQTIQLGGGADGNQPGSNQQPLILGGTGGGSSGLEFATTSPQVILATQPMYYGLETIVQNTVMSSQQFVSTAMPGMLSQNASFSATTTQVFQASKIEPIVDLPAGYVVLNNTGDASSAGTFLNAASVLQQQTQDDTTTQILQNANFQFQSVPTSSGASTSMDYTSPVMVTAKIPPVTQIKRTNAQAKAAGISGVGKVPPQPQVVNKVLPTSIVTQQSQVQVKNSNLKQSQVKGKAASGTGTTCGAPPSIASKPLQKKTNMIRPIHKLEVKPKVMKPTPKVQNQNHSLLQQQQQQQPQLQQQIPAVVVNQVPKVTISQQRIPAQTQQQQLQQAQMIHIPQQQQPLQQQQVQVQPSMPIITLAEAPVVQSQFVMEPQALEQQELANRVQHFSTSSSSSSSNCSLPTNVVNPMQQQAPSTTSSSTTRPTNRVLPMQQRQEPAPLSNECPVVSSPTPPKPVEQPIIHQMTSASVSKCYAQKSTLPSPVYEAELKVSSVLESIVPDVTMDAILEEQPVTESIYTEGLYEKNSPGESKTEQLLLQQQQREQLNQQLVNNGYLLDKHTFQVEPMDTDVYREEDLEEEEDEDDDFSLKMATSACNDHEMSDSEEPAVKDKISKILDNLTNDDCADSIATATTMEVDASAGYQQMVEDVLATTAAQSAPTEEFEGALETAAVEAAATYINEMADAHVLDLKQLQNGVELELRRRKEEQRTVSQEQEQSKAAIVPTAAAPEPPQPIQEPKKMTGPHLLYEIQSEDGFTYKSSSITEIWEKVFEAVQVARRAHGLTPLPEGPLADMGGIQMIGLKTNALKYLIEQLPGVEKCSKYTPKYHKRNGNVSTAANGAHGGNLGGSSASAALSVSGGDSHGLLDYGSDQDELEENAYDCARCEPYSNRSEYDMFSWLASRHRKQPIQVFVQPSDNELVPRRGTGSNLPMAMKYRTLKETYKDYVGVFRSHIHGRGLYCTKDIEAGEMVIEYAGELIRSTLTDKRERYYDSRGIGCYMFKIDDNLVVDATMRGNAARFINHCCEPNCYSKVVDILGHKHIIIFALRRIVQGEELTYDYKFPFEDEKIPCSCGSKRCRKYLN

SEQ ID NO: 18634 - DNA, 20436 bp, DROSOPHILA
ggggccttgcttaatggccagcactgtttggcgaaaaaatacactttacactggcatttcggggaacgttttcggtgctgctaaattttttttttgtcgagggggggactttttcgggtggctgccaggcggctgcggatggcgaccgctggctggcggggagtccgtttgacggggatcttgctcgaaactcacaacatattcgatttggcatcgctcgctactcacaacatatttaattttgcatttttcgctaacgttgacgcacgacccgactttcgatagcaggaggcgttatttgtccgaacctatcggccctatcgttcgtcgatatcgatggtcaaaccaatcggacggcatttgaactagtggtggcaagatatcgatgatggaatagatgctcttaaatcaaagtcttcattgtattacataaggaaggagttttatttgccgcataataactaatagaagtggtttataacaaataaaaacggatttcctggcagttcagcttaatttgaaaatatattacttttggtattttttagttgccacccccaccacaacacatgtcggtgttgccatacggatttctattcatgtgtgtcaatacacattcttagcaataaggttggcaacgccttacatccttcaaataaggatggcaacgccagacatccttaaaaataaggatggcagtgcgccatattctcataattcaggatggcaatgcctgatagctttaggaaagactgaaaatgttgtgtccttttcactctctaacaacagggaatacacttaccatgcacttccatattcgttaagctgtgacccgaaccaatgactatgatcgtaaattttaaataactaaatatatgtgtgtataattaccatttagaacataaaaaatgcgaatatcgtaaaacgccggtcaatcgtcaaatttacaagcactttctatcttcgaaatcagaagacattgcccgccaaatcaaaagacttgtattatttaatctatgttttattggctttctgtaaattattatcatttgttcaatatgttcatgcgataaataagtgtttaaattaattaaataaaattaaaataataactttacagtgtgtgcacaatttaaacaattatttcgggtttcgtgtgatttacaatcgagttaaataaaataaaaacatcgaatcgatcggttagtgactattggattgtgttcgcgttataaagctgtagctagttcgagtctctcaaacgaaaaattaaaaaccaaagtacaaattaaagatacacgtaatcgctaaacgttaatgttgttacttgaaacaatttccaaaacttcggggaccacagaggaattacatctggcctttttgcatcgccccaaaaatacattcaattgactataaaaaactcgtactacatatttgcaaaattcacaaaatacaaaaggttcaggctggctatctcctccgacttttgatttgtttaacaattactctagctctcgagtgatatgttttacatttgtggtttgccattaacaaattacaaattagatacgttttgttcgcattaattatgagcacaataataggattaacaaataatatatgtatacgtaggtttatgctttaggttttcttgaaacttagaactaaaaaataatgtttgaaacattttcaaaatattctctctctcattcctcatctgtgtgttcgttcttctttgtgttaacaataacaattttatggttggaagcactgccctaacgaacaatcgctataaatggattgccagttaccgaatacatttcacaaaacaagaatttattaattggacaaaagcaaaagcagcgctcacaaagaaaatttggccaaaagtttgtatttggatttggacctccgttcgtaaagatttttatggttgatctgaagttgctgatggttcgttgctagcccagttgttccccagtttgtcgcttcagatgggacgcgtgaagttggcggggaagagtcccttctcgttggtgccctccttctgacccatcagccagccttcctcctgtaaattggcaataaagaactgaactcaatatagacaggaagtgctgagatctgcatttggcgcggagggggaaactagcgcgtgcaaagctcaaaggaatgtgtatctccggattccgaagttatacccttgcaaatgatagaatctaacaagtttagcttacttaaattgatggaattttatggaaatgaggacagacaatcccattaacattgaaagtagcttgaagttatataattacatcatctgcaaagggtaagccaacccaactcaagcaactttacctgatcctcgggatcgtcgtactcaataacgcgaataaggtcaccaatctcgaagctcagctcatccacatcctccttggcgtagccataggtggccttcacccggtacagaactccaggcggcaagtcagcagtattggcatctgtttggagaaataaatggttttcatcttaagatccatttgcatgttctggacaccgaaaccctcaaagactcgtacgtcgtcacacagtgtacatcgaaagttgcataaccgagtttagtagacaaaggcacgcaaagaacaacttaaacgcaatcctggccaaaaaggggttagtgggctttagcactttctcaggcttttacatttttgggctgttagttttgttgtcggtgggtcggtgagcaagttgggcaaagaccaatcaacggctaaaacgactgaagcagcgaacgtgcaagcaatggtggatttatgggtgatcattatatagatagttgtagttgtacgataacctacgtgttggcgtcccgaaattaagacaacattagtccatactatgtgtgggtactaaatgagaaacgtatgtagatagatgcacagcccaggaaatgagtttgagatcctgccattgtggatgcgccacgcagcatgccacacaatcgatttacaatacaataccaatacagtaatcctcaatttggtttagacaacaatcacacacacgaactaaagcttagattacgaaagattagacattatccttccaaggatgtgaagagatagtgtggaagagactacagagtgagacataggaagcgaactggacacccagtggactcgtttttgaggtttactcaccagcgggcacctcgtagatgcgttcgtcgtcatcctcaaacggattcttattaagattatttacgctgtgcctattaactactggtactggtctacctttctgactagtgcctgtgctggtcttagtatctgtatctgtattcgtatctgatatggttactatattatcggtatctgttgatgtaactgagtgctgggtgactgttactgtttctgtggctgtgactgttgtgtcattacctagtttcttctgcttgtgctcctcgatggaattgccattgttggccgccgcctcggcagcagcttctgcattggatgtggtagatggcagttccttgggctgtttgccaccttccttaacaatcgagggttcattgttgttgccattgatttgggcaggtgtcgctggcggggcaggtgtcacagatgctgctactgctgctccctcagtttccgatggcttcactgcttcactgaccaccgccttatcctccgtgggcgatgtctgcgtggttgtggttgccttggcactcgcattcagaccactgagctcgggacgctccaatgatttggtggtcaccccattctcgacgggactgctgggcgtggctgatactagtgctgctgctggggattccgggcgtggttctggtgttgaagaaactgaatcaaatcgaggctcttgcagcgacgagctggtagatgtcgctaattgttgtgtcgtttcgcgtgtgttttttattttcgtttttgttttattttatacgtttttatgttgttgattgtcgaatgcatttgttgtgttgcatcattcaatttggtttcgtattgttttgtggttagcatcattccaaacaaaagattaaataaaataaaagagaaaagaacaaatcaaataaaactcaggacatgcaagttagggcaaaggaaaaaaactcaatcagaactttcaataagcaacaagaacatgcaacattccatttgttcgagcagatttggtcagatagcaacctgggatatctcatctacatggcttccaatctcgacttttaattgtttaaataatagaataggaggttacaatagttaaaaggatcccttatacagttagattaaagctagcccagatcgccagaccgccgccaacaatttcgtttttatttacaaacaaattgtctacaaatggaatgttttcgcaatgccaaagatacttttggttaaaattcaaaacgaatagttagggaaattagttgccaaacaaataaatcaaaaaatttcttataaattgccaaaaacttgaccgaaatcatcctcatagagcaatatttcatagagtatatacagattttatggtgcgaatatataagatataatatgtttagttgtaaaatcattctaaatgttgtgaattatattcagctctttttatacaacacaataaatcataaatttatatttaaactttaatggatttgtatgagattgtttgtttattatttgtacagttttgagcaatttataatgattattttttgtttgtttaacggtcggttaaaaaacgtagaaaatcaagaaaaagcaaagaaacataagattcgataaataaataaaaaatacttaggcttctcggggtagagatactaagatatatatatgtatatatggagatcggataataaaccttataaaaggacttacggctgtttgccaaactggagccaccgtttgtagttatttgattctgatagttgctgttgatgttggcattgtttaacttattcactggcgactgcactgggctcgatgtcttgatgggattgcctgttcaaaagtagaaactatagttatagttatagtaattacaggctggactccctacttgtttgcttgcgtagcgtattggagccgcgctgcgattctgtggccaatttgtcgacgattgcctccagttccgagtaaatctgttgtcgcaaagatgaaaataagatttgccattagtcggtatttatgtacatacaaagcaacactcctttgacattcatcttagaaacagtgtgtttgtatttataaggagtttcaagatctctttaatcctttgattatatcttatgttatagcaatagtatcttaagtagttacttagttgttagtttcaaacccaccttagccgtttcgttgtggaacacttgctctgtggcgaagagtgtctgcaagttggtgaccagaaacagtatcctagagtcatacaaggcgggcagctcgtcatgcagttccgtgttcaggatttcgtaggtgcgtctagcttcctccagctgctcgcgtcctttggttagctagtagagcataaacaattgattagcaaatctgttacaattacccaattaaagtgcttactttgacatcatctttgcgcttgttggcattggcctgcagattctgaaacgagtgtcgttggccatcgtaatcaatcagctttcggttgcgcttctctacttttttctggaaaatattcaagacattttatgaattgaacttaatattttgcattcagtcataggtcaccttcatttcgggaaactgtccagtgtatgtgttgagcggaatgaggacttgatcccccaatttgtgcgcaaagtccgcccacagactttccgaggcacccgtttgtgcttgcagggcatcgtaaccgctccattgtggctcgtagatctcgcaaacggaatccatcagagtcttggaggcggcttgtgcggctataggaatttgagatataaatcaaattaaatttgacttgcaattgcacagaattcgagggtgcggacttaccgcgaacacatcttatgtagttattgaactccttttgtaatctgttggcactcgcctgctggcgattgaagttgttcaggtgatcgtcgaagatttcatccgcagtgcgatcgactttgcccaagttttgtagaatctgttggaaaataaaacaggtgattagtaaaagctaaatataagctaaattgtaatagagctaaacaaacaccaacaaaacgtatgaacacaaatttggagtaaaaaatgttattatttcaatagtttgtttgtagaactttgatttttatttgccgctttaggcaactccccacctggtgttgcactttttcgtcacacatctgaatgaatttcgagttcgtttcgagttgtttgtgtgggcagggcaaggtcggtcaatagcagcatttcaaaatcaactatgtttggaatgtgggcagcgttaaacgcggcttgaaatcacacattcattcattttgctcaacggaaccgcaaatgggccaaaagttagaaataaaatagaattatttggcaattgttggcggctgtttgttggtctatttctcgttctatgttcgtgtcggaaaatagaaaaactcgctaaatctgttggcacatgcggatctccgcaatctatcttatcgctaccgaggggttgggcttatccaatatgtgtgttcaaaatgccgctgtcaacggcatttgggttaagaacgatggtatacttatttcttgcctccggtcaatttgtggcacttattcgtgccacacttaatggcttttcgacgaccaattaaagagcagaacaaagtgcaaagagatggggagcgtggcgcacaggaaatactttttgggggcaggctgccttggaatgtggctgtggaacacgttgacaacgcagccttgtaacaatttccatcatcgtcattacagaatggcacccacgccacgaaactcagagtgacttgctctcggccatctgtgcgtatacgcaacgtgctcgcggatatccggcgataagcggagaatatactctatttgccgagattcaacaaatgctggccaaatatttgcagccttaacctatctgagttggccaaaaaaaaaaaaggaagataacacggctggctaattgaattttgcgcgctactcggcagataaataaatagatatacctgcagttatttctcaggtgttcatgtacatttaaatacatgcacggcaagaaatttgcatcaaaaagtagaattgattcaaaattagggcaagttgttggcaacaaagacatattacaattcataagtaacttattcagagttactatgttcttaaactattttgaaaccagttaaaacagtttttttttttgtgtgtattcatataacatcgttaccgagtcggtcggaagttttgaattggacttcctctgggggaacattagtgcctttttaaaccattttttgaccgctcgcttaagccccgttatgagcgattgtcaaatgagccacgacatgtggcacgcatacggaattagccaagtcaaaacatcgaaataaacgaacagcaagaacatggaatgcccttacgcgagcatatcttatctgaaaggtattccagtcagttacgagtgttttatagaccagttgcccgatgttatgctaatacctaaagtgctagcaatcagtagaataagatttatgatggttaatctttttggtgcggcttatgagccactcaacaatctttcttcgcccaagagtatgtcgcacacatccagcaagtgcagctccaccgcatgaaccatttaaggtcacataaacacacatacacgcacgctcaatacctgtggcaatatggcttaaacaacaaactggttggcccctcaagacattataatgaccattttcgtaattgaatccaagcggttggtttcttgtttgtttacttaacttccctagttggttcgatctgtgaggcgcgaactaaagtgggtggcggtgtgagtcagtcaggtgtatagatgtgtattcggctaaagattgtcttattaaaagttattatcaaacggccagactgttaaccgaatatagatattgtgattcttttgttgccaaggctggagttcttatcagttttttttttattttttgggctcaactcaacaaggacagttgtggctggtcacttccgttttggggattctttctacaatagttttatgttggccatatgtaatgtctgtcacagtttgcgtcaccgaattttgttcttggcaattttcatttgatgtgtatatatttagaggcgcgtacatatagtctgtatgtgtggaacgtctgcctctgcagattttgtcatttatttaagaactgacgtcgttctcgcccgccttctgtatctcgttttttcctctctcgatctcttgccaaaaatcatatttgtacgcctagacttgtctatatatatcgatttgtgtattcctatttcgtcggcaaccacccatgcaacatgtgcgtttaacttttctacgcgggtgatcccgaccacagcccaaaaatgggtcacaaaaacttaaagttgaggccaataaacgtgtaaccacgaaaaggttatttggctaatccaaagattcggttagtcaaagatttaataccatatggttgaacttcccacacagacaataaaagcggtcttcgtgatcattaactgtctttttaaaattgtgcaatattacagacctaactgtttgggtttatgattaactctgaaactaagcatttttactaatatttttactaaacgaagtgaaacagaaatttcttcattggcttcctaaccgatatgtaaacattttcgttgagtgcacccattcaaaacctgcagttaaacgtgggctaaactttaggttaactttcggttaaccagtttgcctgtctggcaaaagaagtagaaataaagaccagaaaaagcaacagcaacgacctcgaccacactggaaaatgtctcattttggtgtgttttatgtgcagatttgggcgtaggatgtgggtcgtaggatggctaaaatggatgacaacatcgcacagctgttcgggatgtgttcggagctgggaatcaactgcaatctaatgaaatgaaatgaaacggaacgttcagcgaagtgcaaacaaacaaaagttaagtgcacatcggtgggggaaatgtggggcatgttcgttcgcatttggccataagcagacgttggcccagtttgcaaggaatgcacagtggcagacagtggcagttgcaagagagacccacaatggcgcgcaacaagtctagtaagccaattcgacacttgtaatgctctacaatcattacttcattcactaatggttagggattttatttggaaaatatattcatgtttaaagttgttattaacttataagcttcattcataacttttcaaaaatttcattcttacgttgcttgtcttgattataacgaatgaaaaatgtaactttctttgtaattaaatcaaatacgatcacacagattaaatacattttctaatctaaccaagttttgtgtcccacgttgggcgccaattctgtaacatagtgccataagttctctgtacgtttttttttttttttttttgtgaaaaccctattgatattttcttctccgactttccaaagttaataatccccatttttaccctacttaaatcacagactagagaaggtttaaaacaagtaaaagaggagatatacaagctatatgcatccgagtatctacaagtatctaaccatgtatatatgtatctacattgtctacttatactgagaacaaataacagacgcagaacaattgtgaaaaaaacttgtagaaattggcatgaataatgcgcccgccggcgaaaagccagaaaagagaaagggggatagccggcaggaggagaaaaggccagagaaatgtggaaatgtgccatgacttgggtgggaaatgaaagaggggaagtctatggatcagtgtgctcgaagaagactttttagtcgggccaactcggaccctcttgccttgtgacagtgttgaggccgctcagtttaatgacacgcatctacatatagaaaggtacaatattcaacaaataaataaaactatatataaaatcataatatatggattgtaaaaagttaaacataagtttgcataagtatacatatactactacttctataacttgacctaacctacatattaaataaggttggattttatttgaactaaagtattttgttttcattaagaatgttagtgtttaggtgaacactcacatttgattccaggtattcgtagctttatgttcttgtgtggaacaagccagagacctaacctattaccacaaaagtacatttttctttgcccacttttttctgactattatctgtgtgttttttttcccaacttgttgccccgtttggttagcggtgcttattgagtcgatgatgacagcaaaaaattatttgtgggcagtaaccggttttggcacctcgtccagactatcgaaacccctcctaccctgcaaaaagtacacacaaacaacacccccgagagagtcatgtgacagagaactgacatatggttatggtaattgcgattaatattgacttcaaatggctattaagctcgcgtaaagattgagatgaaaacgcgaatggacggacttctttcatacatacatacatatgtaaatcgaattccgttgcgcaacatcgatgaacgatatcaataccattcccattttgcataatctttgattcgagctctcatttctttctttcttattttgtattttttttattttccatcgctttctttggtcaaatcggctcaggcaagtggaaagtgaaactcgtttgtactcgtagaaagttcgaatcggcgaaagaagggaggaatcggcgccaaaagaagaggcagccgtagaaaactaatatttatcccacatgcatgcacacggatcggggaatatgagatgtttccagccagtcttgtcatgtgatttatcaattagcattagccattggccactaaaactaagaaaagcactggcccgggcaaatttcgctggattctagtcaacttggggagttgcttgctaattagtagagaaatctttctgccaaacgagtttgggaacagcgaatagttggcactaaaacaaaaaatgcatatttcggtgctaaataaatcaaacttattatcaaaactatttcgctgctaaagagtatctgagcagtagctcagttcatattatgattatgagctctttttctcagatacttattgcagagtgaatagatacgtttatgttaatttccttaattgagcccgattaaaaaagacctttgttttcatacccagcactttcatttggcactgcatttaaaatgaaaaacgttttcactgaaccaagtcaaacatttgctcttgttgttatttcgaaacaaatagaaaatagaaaacatgacgggctaattgcaagtggaatacgaatgggctaagtaaacagaaagaagcagcggtcaactgaaatgaaaagccaaaaaaacgttttacaaaatcagcggattccatccgccatcaaagtgaaaagttttaacgaccgcaaaacgaatattggttagattcaatcgaatgcaattattaaatgaataagtgaataagagtcgctcttaaccggatattcaagagagtgtcgtggaagtttcggttttgggtggattgtccgtcggacaggttttttattaagttttatttcattatcggttttatgcgattattaagaaagaaaaagcttccgctcagcacgctttcggcgacagttatttaagcttgactcggcctcagccgtgtgtatctctcagatactcagatacaattttagctagacaaaagccgcacaataattgtcgtttcagcagcttgcgagattattgcatggcgacaggtttttttttttttgtttgcgaattgttttcaagtgctttcgtttggctgtgtgtgcattactatctggttatgtaacgtcgagaatttttcaacgatttcggtgatcacgtcccgaaaggtatatgccacgtgcatatcttgaataaatcatagtcagaatagagcactattcaaaaaagagtgtgattattcagaaaatacttaattagtcatatggtttctttatgaactacaatatatctcgatttatcttagcagcggtgacgaattcaggttaaaaacacagctaaagataacatttgtgtactttaatgcctggctaatatcaaatcgcaatttttaaagcagccagcttactaaacatttcctatagattttatttcgacatcttcttttcaccttcaacttttagaagaattacacaattatgaccgtatttgtgatatatccatgctaatcaatcgcaagatatcgagaaaaccataaacacacattcagcacatatctcagacagccgcaaatgttctcgtaactcacaaatatttgtgaatgcggtcaaatcatgagcgaatacttagcactagtatcttcatgtatctcaaccgcatgtagttggtatctttatctgggaatcattgtatctttcagcttgcctcgtttagcattgaagcgcaaagtgaactcattgaagtgcctgccattagagatcattgaagaaaaactccacgtgatttgcatagacaagcccaaaaaaagtggaggtagtttatggcacgtgacgaattacatggatagtgtgggcaatctttaaacagatcgttagcaaatcgtcggcaaaatcattggggtataaaaatcgggtcaagagcaatagaaatggagtaaaattcccataaaaaatatccattccgatacgagctttgtaaaatttccaacatttgcccattcaactataaagtgcccttcagttcaatctgatgtgaaatgtgtttgttgcataacatggtcacggttaaaccgcacactttttttttttatctctatttcaatatgtgaataaactccgaagaatagaggaaccaaacaaaatgattcgctgataagaaagtatatagaatggttagaatttctagggggttgggggtggcaaattccaattcgttacagaaccactgaaacgagggcttatcaggccccattaactttttttttgttttcttttttggtgccataatagtcaaatctcaacgataagggtatgagttttcaattatttttgccacaatcaactgcgaatatcacgcatacgtcatgttgatcagtcttaaatttggaaacatcataaacgcgaagaaaaattcatttatactgatacgaaatagattcgttgagaaattgaaatacaatgattggtggggaaaagtacaggaaaagtgaaatgaaaagttaccgtacgcatcagtgacgattgacaatttttccgagctcccctccttacaatctcacaatcttctctgctcctcgtctaaacttccccctccccccctttatctctacatttttacacacatttcgcaattgcaaactgtgcaaaagtcagtgaactgcttttaattacaaatccacgcagctggccagcagtacattattacaaagatatttacaaaacgctgcaaaaactgaattttccacttgatcgaagacgaaaacagcttcggtgaaaatgcgctctggagatttcctagcgagcatcagcggcgtaataaacatttttctaatacattttaagttttcaggcattttaaatgctgaaacttttctcacattagtttcggagatcaaacaaatcccctactcacaaatgcagaatgcacttgccgtgccccaattcaatttccattggcacattctgaaaacgtttgttttccacatcgatttcgtgccagcgtttaatgcatttttcaagaatccagttgaaaattgtacaattaaaatgataaacacgaatggaaccgcagaaatctcttattgctaaattatgcaactgacattgaaaaagtcaaatgcatataaatgcagcgctgccctctgaaaatccagtgtaaatctcattgaaattaactacttgcaggggcgcataaccaaccccccccccccactaccccaccccctcttcagcacctgcatctcttgcattcggaaattgcataaaacgcttccagagcgctggaaaattgctcataacctcgaccagagcggcgggaaatcatctgcgagtgcattttggttcgctggtcagaaggggagggggagggggggtagagtaggggctgtctaacaattgtccctgattgggcaataggcaaaaagtcggcaatagctttggctgcaaaaaatggaatcaaatgcgaaggcttccaaacaagcggcacgaatgcgccccctgctggcataaaaatgaaatactgcaggtgctacacagagagaaaaaaccggtgcacttttacaaaaccaatatattcaacagaatagaatcaaacgagtgcatataaaatctttgtatactgaacacagaagatttgtatacacgctgcaatttctctcagtgcaatctaacaaggggggggggaatgctatggcgttcgaagaccgatgcaaattttgaactatgctaattccgatgctaatgccccaaacacagacacaccaacatcggattcatttgagcgtaacaagcgagtgaaaaaaaaaacaatcccaaaaatgagaacgaaacaattaagctgaaaagcaaccaatatttgcgtaacatacatacgagtatttcccactttttcgttcgataaaaagaaagttttcccatctaaaagtgtatgggtgtcgactacatttgcattcgcattaatatttaaatttataaattatatcccactgattgcgtaaactgagacgcagttttaggtccgtcaaaccggttttgcaatccatccaaagcagcgctggataataaaagcaattattataacaagttaactaaccgacaacactttcgcagtatgagaagtgggttcccatgccttggcagtcgccttatttttccgattttttcccctatttttttttctttctttctatttttttactgcacctcaaagtagaacaacagccagagcattagcaaatcgcgtgctctgtatctgcgttgggatctgttttccgatctactgccttttgttctagtcccctctgggctttccccattttccctacccatttccgcaagtgcacagttgaattaaatcggatacctttttttttttacccctctgacacagtcgccagatacgatgctcatgtgcattatgtgcttaggcagatgcgacatacgtctttgccagccacttggagcccagatagcgcagctccctcagttgggactcgaatttggagcaacatttgagggtcagacaggtagacaaacacactgctctccgggattagctttagctgtctttcatccacttttaaatggagaaacttaatagaaacttatcctaaacttgttggcatttagttatcttataaacaattagacaaactcagtaaatcagaaaagtagtatatacattgacacactcattagtagggaaaaagggtttataatttaggaaagaagcaaatcttaaatggacaaaaattcaaaaaaaaacaaattaagaactctataaacttgtgctcttgagtgggcaaggtgagacccattcggaatatgaagtcccagctcgattttcgattatcaaatcgaagagtgtgtgctgagtgtgtgagctaataaagaattacgcatacgacctgtggccgtgtgattttcgagtgcacatgtgtgggtatgcgttcgttcgtttagactcgagtgctcaaatcgacagtaattgaccttgcgtcttttcacgcgccacacattttccaaaagtttgttttcgtttttcagcttcagctttctgcttgcttgtgtttgtagtttttcttcttttcttttcttctgggtgagacaacaaactgcagctgtaaatagaactttttggggattttgcgttagttgtagttgaatgaatgactaacacttgaacttcacaacgccgaatgaagtacgttatcattctgctcgatcataacgaactgcacaattgtgcagtaatgagccaaagtgagacgctgtgaagtaattccaattgttatgcaatcaaaaggtgacacaaagactcagctcctccgttcgtttcctttactttcatgcacgattgttggcaatttcaataattgagcactcttttctataataacctgcgctgtgtattaactcataacaatcacatctgtcgcattgtattgtatctctatctttattgagtattttcctctgacttttagattgcttcacggtcgattaatagagctattgaagtagtagctatctgtggtcagtacttttgaaaacgcccctcttggataaaaagggggcgtagggccagactgcagcacttgatcacttatcaacgtatgtattgtatatatgtataatgtgatatatgatacaacccctcgaaagtcacaaagtgcaatgtcagacattcacgtcaactatatgtaaacatggctttttctgttattattttcggctctttaagtctgccgccaaatgtttccacgtatctgataggtcttcatttgttggctttgaatttcgatccctctggggttaataagaacttgtttgttcgcgaaaaccgataccaaattgattgtgtattgatggattagcattaaaatgcttagtgtaaggatttttttgaacaattactggaaatgaaaccaaagaactggtgggaagtgcaaactgcagcaaatatagcacaaaaaaaaggatcgaatggacaaattagttctttatagttaacttccccggacttttaggccccaattgtctatatttatcagctaagaattcatgtgattacaattaacagcgtatttcgcattgattttgaactgcgtacaaaagcgaggtgtataaataaaaacccaaaaacagttgacatttcgtcggcatgcaacaagaagttcaataagcaacaggcaagtttggatcgactactgccaataaaatgtcaatcggtgctgatgcactgcatcgagtcgaatcgaggggtaaatagccgaaggggaaagcacattttggcagctgttgtgcggtgccgcataaaaatagacaaatggccagggagcgagaagaaaagcgagaaaagcggcgcgggcgaaatgctgtgtgctttccccattgctcctcccattcggcaaatagaaaacttagaaaaactaaaagccaaagagtgtgcgtagagttataaaacaaaagcccaatacccagcacacacacacacacacaacacgcattctgtagattcggaaaagagcgagatctatttaaagattgactactgccaggaagagcgacggcgacattttcacgctgctgactgggccgggggaaaattcaacgcacctcaaataaaaatgtatctaggcatccgcaagatgctgtgtgtgtgtgtgtgcagatgacaagttttctctgccgccgagaagctcgatgtgaaaaatcacaagcagaaatttcgaaaattgagcacacgccatgcgaaataataaagctatgtgaattccgcccagagaacgaaatttgttaaaaatacatttcaaatttctagagggaaaaattatgaaataaactagaccagagagacgggcgaaaatcaagcgaattcggaagttaactgggtctatacttgtatatacttatgtatgtatatagatatagaagatcttcaaacttaagcccaaaaccatttcaccagtgacatttggttgtggaattttgatgctaccaagtttaatgaccaacacacgcgagcatgccaaacaataaaaggagaaaaaaaaaagaagagctcaaataccaacgaactttagaaatcggtcccaaatgccaactcacacggatatacatagaaatcaatagctctgactgagattacagcacttctggccgaaccgccgagccactctggagatcttggaatgcgcccgaccaagcggagtaaaatgtgaagtggtggcatctgtaaacccgttttgggtcagcttttacacgttgtttgggcggccgcttcattgacatttcgcctcgcatcgaacgcaggaaaaacaacaaaatacaacaataaacaacgacaataatgttaataagacaacaacacaactttcacttgtacgcatcggcggaaagatgaaaaacattcaaaactccagcaggcgcatctcatgaatgggcaagatgaaaagcatcgctggagctgggactggctcaaaaccgcgacaggtgtcgccacacattctccacgtcttctgggtggatttactcaagggaaatctttgtgggaagctccacagtcttctactacatttctactacaaactaacttgttgcaatttgtcaagagtttatagtttattaaatagagacagtactttttggctaaacaggtgctctatgtatcaatctacatatatgtattacaaataatatatatgtatattgctttatatattccatttccattcattacggaatgtactgttttagatatatgttttaacttatatcttcggacagttgaattttaaaaatccgatattatgtttaaaaaggctaaagtgtaatcccgtgataactggaaactgaaggatttgggcaggagcaggtggtgacccagctggagaactaggacagggccacgacttcgactggaagggatttgttagcaaggctggcggcgaagggggtggcggtgccctggtggtgggtttcatgaccttcccgtggtgtggcgtgggcgttgcaaagtgcatctggagtcgaactcaccttctccttggcacgtccagcgtgtttttgaacagatttggccagcattatgcctttattttcggtcattcagcggtgagtttagttgagctgcggattgctatttttgatattctgttatctttgtagagatgcacttttgccttccctaatattggcacaactggaaaaagcacagttttccgtttgcgggaaactttaaatgcacgataaacaaccgagtgtgttgtgtttatgtttcaaaaacaaaccaaacaatatcggccccacacacttgttaacggtattatgtatattattttacggccccgataatttttttggcaatgcgacttctgcgggcgcgtcgaattcgctcggaatattcaaaacaaatggcacaagtagtcgacggacgaacggagaagaaaaggcgacgaatgtgcgtggaagacgacggtgataaacgagagaacgcgacttcagctgcggcagagcatgcagtgtgactgtgcgaacgaaataccagcgcactaggatccccaaaaacccgatgcgtggaaaactttactagcgatagcagtgttccaaaccttttcaccaagccaatcttattttaaaactttatcaaaacatttgaacgaagctatatggaagttcaaaaaaaaaatggaagtattcagtttctttttggaacgcatcatacaaaattttttctcctgtacctattacctataccacttgcctacacttttatttcatttctacaagcactcaaatatgaagttctttctttaaggaacgtttgatcttttctacatattactacatttacatatgaatgaaagacaataaaatgttattgtattctgagaaacacacttctcttattttcgtttatttcaataagcaagattttaaacacaatcacagctgagaaacacattgtagcctatattaatttgtatttatatcttaattttctaactaaacaaaattatgaaatacctaaatatatatgttgaagtacaagactacaaagctttaagcatttcccttttttgaacttatattatattgaccgcaattgtaactgctgccttggatgcgataacgtggaatcgaatgtaatcgaaatcgaaatgaaatatcagctctgaagaccacccacgtcatatcgatgtccactgcccgatagacgccgcacacaaaccgagttgggatttcgttgtaattgctggtcatttttcacggctgtgcgactaattaaatttaacaagagagccttaataaataagtgctaaagaccagacgcagcgcgcagtaattcaaatcatctagaagatctcgtaaaacaaaatgtaaagtcctggcgtggggttgatcataacgcatacatatacccatgtgtacgtgtgtgtttccattgtaatctaaagcacgagt

SEQ ID NO: 18635 - DNA, 3155 bp, DROSOPHILA
gcacattcgtcgccttttcttctccgttcgtccgtcgactacttgtgccatttgttttgaatattccgagcgaattcgacgcgcccgcagaagtcgcattgccaaaaaaattatcggggccgtaaaataatatacataataccgttaacaagtgtgtggggccgatattgtttggtttgtttttgaaacataaacacaacacactcggttgtttatcgtgcatttaaagtttcccgcaaacggaaaactgtgctttttccagttgtgccaatattagggaaggcaaaagtgcatctctacaaagataacagaatatcaaaaatagcaatccgcagctcaactaaactcaccgctgaatgaccgaaaataaaggcataatgctggccaaatctgttcaaaaacacgctggacgtgccaaggagaagattctacaaaacttgggcaaagtcgatcgcactgcggatgaaatcttcgacgatcacctgaacaacttcaatcgccagcaggcgagtgccaacagattacaaaaggagttcaataactacataagatgtgttcgcgccgcacaagccgcctccaagactctgatggattccgtttgcgagatctacgagccacaatggagcggttacgatgccctgcaagcacaaacgggtgcctcggaaagtctgtgggcggactttgcgcacaaattgggggatcaagtcctcattccgctcaacacatacactggacagtttcccgaaatgaagaaaaaagtagagaagcgcaaccgaaagctgattgattacgatggccaacgacactcgtttcagaatctgcaggccaatgccaacaagcgcaaagatgatgtcaaactaaccaaaggacgcgagcagctggaggaagctagacgcacctacgaaatcctgaacacggaactgcatgacgagctgcccgccttgtatgactctaggatactgtttctggtcaccaacttgcagacactcttcgccacagagcaagtgttccacaacgaaacggctaagatttactcggaactggaggcaatcgtcgacaaattggccacagaatcgcagcgcggctccaatacgctacgcaagcaaacaagcaatcccatcaagacatcgagcccagtgcagtcgccagtgaataagttaaacaatgccaacatcaacagcaactatcagaatcaaataactacaaacggtggctccagtttggcaaacagcccgacatctaccagctcgtcgctgcaagagcctcgatttgattcagtttcttcaacaccagaaccacgcccggaatccccagcagcagcactagtatcagccacgcccagcagtcccgtcgagaatggggtgaccaccaaatcattggagcgtcccgagctcagtggtctgaatgcgagtgccaaggcaaccacaaccacgcagacatcgcccacggaggataaggcggtggtcagtgaagcagtgaagccatcggaaactgagggagcagcagtagcagcatctgtgacacctgccccgccagcgacacctgcccaaatcaatggcaacaacaatgaaccctcgattgttaaggaaggtggcaaacagcccaaggaactgccatctaccacatccaatgcagaagctgctgccgaggcggcggccaacaatggcaattccatcgaggagcacaagcagaagaaactaggtaatgacacaacagtcacagccacagaaacagtaacagtcacccagcactcagttacatcaacagataccgataatatagtaaccatatcagatacgaatacagatacagatactaagaccagcacaggcactagtcagaaaggtagaccagtaccagtagttaataggcacagcgtaaataatcttaataagaatccgtttgaggatgacgacgaacgcatctacgaggtgcccgctgatgccaatactgctgacttgccgcctggagttctgtaccgggtgaaggccacctatggctacgccaaggaggatgtggatgagctgagcttcgagattggtgaccttattcgcgttattgagtacgacgatcccgaggatcaggaggaaggctggctgatgggtcagaaggagggcaccaacgagaagggactcttccccgccaacttcacgcgtcccatctgaagcgacaaactggggaacaactgggctagcaacgaaccatcagcaacttcagatcaaccataaaaatctttacgaacggaggtccaaatccaaatacaaacttttggccaaattttctttgtgagcgctgcttttgcttttgtccaattaataaattcttgttttgtgaaatgtattcggtaactggcaatccatttatagcgattgttcgttagggcagtgcttccaaccataaaattgttattgttaacacaaagaagaacgaacacacagatgaggaatgagagagagaatattttgaaaatgtttcaaacattattttttagttctaagtttcaagaaaacctaaagcataaacctacgtatacatatattatttgttaatcctattattgtgctcataattaatgcgaacaaaacgtatctaatttgtaatttgttaatggcaaaccacaaatgtaaaacatatcactcgagagctagagtaattgttaaacaaatcaaaagtcggaggagatagccagcctgaaccttttgtattttgtgaattttgcaaatatgtagtacgagttttttatagtcaattgaatgtatttttggggcgatgcaaaaaggccagatgtaattcctctgtggtccccgaagttttggaaattgtttcaagtaacaacattaacgtttagcgattacgtgtatctttaatttgtactttggtttttaatttttcgtttgagagactcgaactagctacagctttataacgcgaacacaatccaatagtcactaaccgatcgattcgatgtttttattttatttaactcgattgtaaatcacacgaaacccgaaataattgtttaaattgtgcacacactgtaaagttattattttaattttatttaattaatttaaacacttatttatcgcatgaacatattgaacaaatgataataatttacagaaagccaataaaacatagattaaataatacaa

SEQ ID NO: 18636 - protein, 602 aa, DROSOPHILA
MTENKGIMLAKSVQKHAGRAKEKILQNLGKVDRTADEIFDDHLNNFNRQQASANRLQKEFNNYIRCVRAAQAASKTLMDSVCEIYEPQWSGYDALQAQTGASESLWADFAHKLGDQVLIPLNTYTGQFPEMKKKVEKRNRKLIDYDGQRHSFQNLQANANKRKDDVKLTKGREQLEEARRTYEILNTELHDELPALYDSRILFLVTNLQTLFATEQVFHNETAKIYSELEAIVDKLATESQRGSNTLRKQTSNPIKTSSPVQSPVNKLNNANINSNYQNQITTNGGSSLANSPTSTSSSLQEPRFDSVSSTPEPRPESPAAALVSATPSSPVENGVTTKSLERPELSGLNASAKATTTTQTSPTEDKAVVSEAVKPSETEGAAVAASVTPAPPATPAQINGNNNEPSIVKEGGKQPKELPSTTSNAEAAAEAAANNGNSIEEHKQKKLGNDTTVTATETVTVTQHSVTSTDTDNIVTISDTNTDTDTKTSTGTSQKGRPVPVVNRHSVNNLNKNPFEDDDERIYEVPADANTADLPPGVLYRVKATYGYAKEDVDELSFEIGDLIRVIEYDDPEDQEEGWLMGQKEGTNEKGLFPANFTRPI

SEQ ID NO: 18637 - DNA, 5015 bp, DROSOPHILA
ttgcgcgaaagttcgcccgatttgagcatcatgagcgcatggaaaccatcgtggatagtttcgatgcagcaatgagcttcaatgatgcagacacctgagaggcggaggccacgacgaggacgacgacgacagcaacagttgagaatgaggcatggcagatggtcggccaaccaatgtgatgaatgtgaatttcaactaaattattttaattactacaaactactattattacgattattattaccgattaccgaactgttctctccatacgtttagtttccttctacgccgattgccgtggccttcgagatcccagcaccactcctgcatttgatcgggtttggtggcggatcgcggacgcagcgcatggcacgcatttagtttaaagcctagttttacgcctacgcctctggggcggagcaggtgcagccgaccaccgaatggttgatagctccacgaacagaacgattccaataaatgcacaaaacgtgttgtattcgagaagagagattactcgacgttggtttcatttatggtgtgatgtgattagtgattttttttactccaaccttaacgattatttacataacgaatacacattgtatgttttctttattaacgttgtatatggacatgtataaggttatttcggttattagtcactgtcaggctcgttttctcgttcaaatggatgggtatgataggttttaaactggagagaaccttgcagttcaaaatctacataagctataccatgaaaataagaagaggggcctttgtacaacaactttaaccaactctagacacttagggagcaatgcagtctctcagacttaacagtgaaataagctggagtcgcaagtctattggggtctttaataacgggatcttaacactatgtagttccgagaactcctttttgtttgcttttgaagcaaatcaataacaattaactaacatctagaagttcttaaaatacatttcgagtaaatttccggatctaatcacgttttgagaagaaatacgccattaggttatcctctagctgctgcggatcggtaactggcattcgacaagctcgctcgtgacaaatgtaaaccgtagttttaccgcccaccatcttaaactttgtctgcaagcgctgattggaggcttcctctggattcgagggatccacatgcactatgatcatgcttggaataaagaacttgcgacaaatttccacaaatcgttgggtgtctggcgaatccggtcccaccactgccacaagatccagcccgttctcgtgcatcagcagggcggacaacatctctggcagagcgtgtccgaagggcgatacgtctgcaaagaaattcagtagtttcccggccttctggagataggcattttcgtcataatagtgggccagtaggacaagattgtgggcggatacactgtttccacaaggttcggctccatcgtggtcttaacaaaatttcgggaaatcagatattgttggagagtgtacttaaaagctatcccactcaccttccttgagtcgcacaataacattgggtgcatcctgttgcgagaagaaatacgctccgtttcgctcgtcccagaaaagcttgtcctgggtgtcctgcaacgcctttgcccaatgcaatacatctacgtcgagtgtagctttgtagtagtccagcaagcccttgatgaggaacgcatagtcatcaaggaacccatcgatttgcgatctgcaacgggcaatttgtaaaatattaaaaaattttatagagtaatttaaaactcacgcattcttctccagggtttcatcacccacggccacaccatagcacgaacggatgagcagcttctgttccggatcatacatttccttgcgaaggaaatcaagaagttcctttgctgtctgcatatactgctccctgttggcggaatagcaattgcctagcttgcagagtcccgacaacaccagaccgttccatgcgcatataatctttgtgtccagatgcggacgcggtcgcttatcccggataacgtgcaatatatcattggttgtggccagcagcttcttaaatcgatcctcctccaacttaaagttagcgcaggtgtcctcctctgatcctcgtacgattagaatgttcttgccagtgagatgaccatggggatcgctgtaggctggaacattacccggtggcttaagaccgtagtggtaagcatatatttcaaaagcccgctcgggcgtaatgtcgtcaaaacgctgcgcctgatccttgaatgcagcttgaatttcgtcccaggtccaagcgtagaatgctccctctacctttactttatcttcgtgggtaggcagggagtccgcgtcctcaccagcatagaatccccctaaaggatgacgtaggtccttaatcaagtacttgtggattttatctgcatagcgcaaatatatttcgtccctggtcaccttgtaggcattggcaaaggccatcattagttgaccctgatcatagagcatcttctcaaagtggacgttgtgccaatcctgagtggtggcgtagcgagcaaagccgccaaaaatgtggtcatgtataccaccctttccaatttgagtcagtgtttcaatcaccatgtccagaacatccggatccttggtgacgagatagccgtggaaaagaaagttgagacgtggcacctccggaaacttgggctctgagccaaatcctccatgggtctgatcgaatcgctgcctatgaacgttgatggcttcgctcagcttttcaatagcacttcccgctccaaatgccgcttctggcacagccgaagcgtcctggttcttctgtaaagcagagagcaatgaagatccggttgcaagaagggactccttgtcggtttcccacttcctagcaatggatttaagaacagtgttaaatgagggcattccatagcgggatttgggtgggaagtaagttcccgccactagtggagccaaagtgggtgttaaccacacactcatcggccaaccaccactgcccttggacatcagtaggaactgcatgtatatcttatcgatgtccggtcgctcttcccgatccaccttgatgtttacaaagttttcgttcataatcgcagccgtttccgggttctcaaacgattcgtgctccattacatggcaccagtgacaggtggagtagcccactgacaagaagatgattttgttctcgctgcgggccttctcgaaagcctcctcgccccacgggtacctgtaacaacgggtcaaatggcaatttaaaatagtcgatatatatttagattacgaccacataacaagtttatataataaccaagagacgcgacttatcagtaagtaatttaaaatgtaaatcaaaagtaacccaaccagttataaacaagcctatattattgttttcattaccattccccaagtgtttgtgctgtttatcaaccttatctcttatcacacgtgatttaagacggaataacacccacgcacttcgaattctcagttctttgctactcaccagtccactggattgtaggcatgctgcaagagatatggcgacttcgaggcaaccaagcgattgccctgcttggcgggttcctctttggacacttccttggatgcttctcctccggtggccattgtgcggaatttctggctgcgttgcgcgcacaaaaatgatatcaaaacaggtggttgataggacgcacaagacttacttgctcacagggcgactacgacaactgttgtgtaggagtcgtaggttccgacggaacgattcggattcggattgcgatgtatctgcttggagtttcaaggtcgtttgcagggagcttcgtatcctggggaggagcggcctgaccctgaacatagcaaacgaatcgggattctcggggcttgcgctgtgctttcactcgacctcgtccaatgccaacaaaagtgcaacgtgtgcaatcgacgcgaattgaccaatgtttttaatattgtttagcttatcggcatagggctggcaccgaatgcgatgttattcgataccatcggatggtcaatttccagcgaaaccgatttttcagagcacttatcgattgttttgaatttaaactaactgttgtgaacttattttttacttaaaaaaattccgatttcaaactaatatttcaagggtttatttttgagacttgatttcggagtaagcaaaacatcttttatacatttattttatgcgtttgacctcatatcaacattaaaattaatacaaatttccagcttttggtgaatatgacagaaaagtataactatttttaaatttattaccacattgagtttatgatgtaaaagcaagaaagtcgtcgtgggaatcacgataaagagtactgaagacaagagttttgtagcctactttcaggctgttcccccaataatcagctcaattcaaaatgtgcagcttaatatttttcatacttttattaatgcatacggtatatctttgctttgataattatgtagaaaatgcttacacctatgcggccgatatatagaataattaacctactagctagttgaaaatcacaaatgaacatacaatatttatacattatagtgtgggtgtggtaattaagcacatcgttttaaactaatacacattgcggactaaactggccgatcctgcgggctctctcgatcggctctcaactttgagttgacagcagggagaatcgaatcggcccagttgcccattagctgttggccaggctaacaatcgctttggactagcgcatcgctgagggagctaagctgctcctcgctgcccttgatccttacggccaggtcgcgtgcatcggcgatcagcttggccttcatgttgatgaagtagtcgtagtcggcgcacatgtccgcgctgaggttcttggccagtaatccggcgatgctgactccacgtcgttctatgtccgatttgagacgctgcgcctcctccatctgctcgtacagcagatcccgc

SEQ ID NO: 18638 - DNA, 2555 bp, DROSOPHILA
ccgataagctaaacaatattaaaaacattggtcaattcgcgtcgattgcacacgttgcacttttgttggcattggacgaggtcgagtgaaagcacagcgcaagccccgagaatcccgattcgtttgctatgttcagggtcaggccgctcctccccaggatacgaagctccctgcaaacgaccttgaaactccaagcagatacatcgcaatccgaatccgaatcgttccgtcggaacctacgactcctacacaacagttgtcgtagtcgccctgtgagcaaccagaaattccgcacaatggccaccggaggagaagcatccaaggaagtgtccaaagaggaacccgccaagcagggcaatcgcttggttgcctcgaagtcgccatatctcttgcagcatgcctacaatccagtggactggtacccgtggggcgaggaggctttcgagaaggcccgcagcgagaacaaaatcatcttcttgtcagtgggctactccacctgtcactggtgccatgtaatggagcacgaatcgtttgagaacccggaaacggctgcgattatgaacgaaaactttgtaaacatcaaggtggatcgggaagagcgaccggacatcgataagatatacatgcagttcctactgatgtccaagggcagtggtggttggccgatgagtgtgtggttaacacccactttggctccactagtggcgggaacttacttcccacccaaatcccgctatggaatgccctcatttaacactgttcttaaatccattgctaggaagtgggaaaccgacaaggagtcccttcttgcaaccggatcttcattgctctctgctttacagaagaaccaggacgcttcggctgtgccagaagcggcatttggagcgggaagtgctattgaaaagctgagcgaagccatcaacgttcataggcagcgattcgatcagacccatggaggatttggctcagagcccaagtttccggaggtgccacgtctcaactttcttttccacggctatctcgtcaccaaggatccggatgttctggacatggtgattgaaacactgactcaaattggaaagggtggtatacatgaccacatttttggcggctttgctcgctacgccaccactcaggattggcacaacgtccactttgagaagatgctctatgatcagggtcaactaatgatggcctttgccaatgcctacaaggtgaccagggacgaaatatatttgcgctatgcagataaaatccacaagtacttgattaaggacctacgtcatcctttagggggattctatgctggtgaggacgcggactccctgcctacccacgaagataaagtaaaggtagagggagcattctacgcttggacctgggacgaaattcaagctgcattcaaggatcaggcgcagcgttttgacgacattacgcccgagcgggcttttgaaatatatgcttaccactacggtcttaagccaccgggtaatgttccagcctacagcgatccccatggtcatctcactggcaagaacattctaatcgtacgaggatcagaggaggacacctgcgctaactttaagttggaggaggatcgatttaagaagctgctggccacaaccaatgatatattgcacgttatccgggataagcgaccgcgtccgcatctggacacaaagattatatgcgcatggaacggtctggtgttgtcgggactctgcaagctaggcaattgctattccgccaacagggagcagtatatgcagacagcaaaggaacttcttgatttccttcgcaaggaaatgtatgatccggaacagaagctgctcatccgttcgtgctatggtgtggccgtgggtgatgaaaccctggagaagaatgcatcgcaaatcgatgggttccttgatgactatgcgttcctcatcaagggcttgctggactactacaaagctacactcgacgtagatgtattgcattgggcaaaggcgttgcaggacacccaggacaagcttttctgggacgagcgaaacggagcgtatttcttctcgcaacaggatgcacccaatgttattgtgcgactcaaggaagaccacgatggagccgaaccttgtggaaacagtgtatccgcccacaatcttgtcctactggcccactattatgacgaaaatgcctatctccagaaggccgggaaactactgaatttctttgcagacgtatcgcccttcggacacgctctgccagagatgttgtccgccctgctgatgcacgagaacgggctggatcttgtggcagtggtgggaccggattcgccagacacccaacgatttgtggaaatttgtcgcaagttctttattccaagcatgatcatagtgcatgtggatccctcgaatccagaggaagcctccaatcagcgcttgcagacaaagtttaagatggtgggcggtaaaactacggtttacatttgtcacgagcgagcttgtcgaatgccagttaccgatccgcagcagctagaggataacctaatggcgtatttcttctcaaaacgtgattag

SEQ ID NO: 18639 - protein, 808 aa, DROSOPHILA
MFRVRPLLPRIRSSLQTTLKLQADTSQSESESFRRNLRLLHNSCRSRPVSNQKFRTMATGGEASKEVSKEEPAKQGNRLVASKSPYLLQHAYNPVDWYPWGEEAFEKARSENKIIFLSVGYSTCHWCHVMEHESFENPETAAIMNENFVNIKVDREERPDIDKIYMQFLLMSKGSGGWPMSVWLTPTLAPLVAGTYFPPKSRYGMPSFNTVLKSIARKWETDKESLLATGSSLLSALQKNQDASAVPEAAFGAGSAIEKLSEAINVHRQRFDQTHGGFGSEPKFPEVPRLNFLFHGYLVTKDPDVLDMVIETLTQIGKGGIHDHIFGGFARYATTQDWHNVHFEKMLYDQGQLMMAFANAYKVTRDEIYLRYADKIHKYLIKDLRHPLGGFYAGEDADSLPTHEDKVKVEGAFYAWTWDEIQAAFKDQAQRFDDITPERAFEIYAYHYGLKPPGNVPAYSDPHGHLTGKNILIVRGSEEDTCANFKLEEDRFKKLLATTNDILHVIRDKRPRPHLDTKIICAWNGLVLSGLCKLGNCYSANREQYMQTAKELLDFLRKEMYDPEQKLLIRSCYGVAVGDETLEKNASQIDGFLDDYAFLIKGLLDYYKATLDVDVLHWAKALQDTQDKLFWDERNGAYFFSQQDAPNVIVRLKEDHDGAEPCGNSVSAHNLVLLAHYYDENAYLQKAGKLLNFFADVSPFGHALPEMLSALLMHENGLDLVAVVGPDSPDTQRFVEICRKFFIPSMIIVHVDPSNPEEASNQRLQTKFKMVGGKTTVYICHERACRMPVTDPQQLEDNLMAYFFSKRD

SEQ ID NO: 18640 - DNA, 2501 bp, DROSOPHILA
ctgtaaccaatttttttagcactgcttaggtggatgaaattaaaattagcttgtaatcctataaataggacagccctttcataaatattctaagttttttctggtcataatcgcgacttaaaacaggagaatgagcgtgatcaagtccatatttctgctcagtattttggctgtgagtacatttggctcacttaattactttttaaatatacttaccattctccataggtctgcctcattccccgggagacggaggcccaggccactataagtgaaagctggggaaggctgggcaagtgtactcaggtggccatcgaaacactgaccagcctggccgataaaatcgtcccgaccgtatatgagttgaaacaatgctccggatacgtaactttggaaccggcaaacggcaaagacagaaagattacctggtacctaaaggtatcctatgaattcttcaagaaacttgtctttgacgaacccaaatgtctgcacggtctactgaacaagttggctgccacaatcaaaccatttgccgagcagatatcgggattaggttgcttggacgaagaagattatatcatttaaaaagaaaagtgtgcacattacataaataaatcgagagcaatatggggtctcaaatgtcagcaacaaaaatgtatttcttattaagtataattttacaatataactactgcatttggaagttaagttgaagttaaagttggctaaacacattcaagttatgtgattaaattttattttatatgattaattcaacagaagcttgataataatggagaagtcgcggccacggtctggaaattagtaagattagattcggattacaatcatattttcggtataacaattgaaaggcggtacattgggtatcagtgatgctcgacagcattactaaagcgattatcctgaggcctatatatatagggcaatatttccacatggcccacaaagttggatcaaaagttgctggaataagaaccccaatgcatttgattaagatcgccttgttactaagctttttggctgtaagtacgtcgacctttaacgggattatttcttaaccatttcgccatttagttatgccaaaagtcgcaagttcaagccgccataagttcggaactcgatcactatctgcgatgtttggaagtggtgactgatgccggtgccctaatgatcgagaactctataacggccataagcctcctatccgattgcgttgattttcagccgaaaatcaaactaactggtagcattctcagatttattagggtggcccatcagtttggcaagaaggcgatatacgatcgaccggaatgtctcgtacaaacctttaccaccggagtcggactgattagaccgattatagccaagtttgatagcttgaggtgctttgatgagtaagacaacctacctagtttgaataaatattcagaatataccgaaagtttgcctggccaagcaaacggatcagaaccatcttaattgttttattctcattcttttaaaattcaaattcaacatatcacagaacttccatttgaaattacaaccattgttatttaaaagtaatgtttattaactctacatatcaactggtggttacacgtttttttatatacaaaattcgatttatcttctggtcgtcggccaggatcagtattagcgtaaaaataactaaaatataaattatgtagaacaaaaaaaatgtataattgtttaaatgtctagtacttacgcagacggagaaaaagcttcattgctattgagttaaaggtgcatttcagttagccgatttatatagcacagtcgacatggaatcgtgactgcttcatttttagataaagaccagaaacaattatatgtctgaaatgttgcactggcaacgtgactaggttcaagatagctacgaaaacaagagctccacttggccaggtaatcctccacttgccagcagcacctgctaagtaattacctcaattccatggtcgaaatccttttcattgtggctatgaaattccatgacaaccaaagctggccaagctcagtgatgcaaatcccacgcagtatgccagtagtgcataagctccgacaagctgctaagtgctttcggagtaagaggatgaggagaatatggagtatactaacttttgaaggacgcacatccataccagaatatctgctgtaattaggcaagttgtcgctactgtttgccttttgccatttggccgctgctcccccggcaatagcattttatgggcttttgttggcgggtttctcttccaacaacattttctaccattttcaaaatgaataattcaatagtccggtagaagcctctggttcgcggttctccctacttgccaacctcggaccaactcggttgcagccataattgaggtcagtgaaatcaaatagttccgaccaagtgcttagcacttgcccagcggtgtgtggaggaactggacttggagctgcttggc

SEQ ID NO: 18641 - DNA, 449 bp, DROSOPHILA
cccaatgcatttgattaagatcgccttgttactaagctttttggctttatgccaaaagtcgcaagttcaagccgccataagttcggaactcgatcactatctgcgatgtttggaagtggtgactgatgccggtgccctaatgatcgagaactctataacggccataagcctcctatccgattgcgttgattttcagccgaaaatcaaactaactggtagcattctcagatttattagggtggcccatcagtttggcaagaaggcgatatacgatcgaccggaatgtctcgtacaaacctttaccaccggagtcggactgattagaccgattatagccaagtttgatagcttgaggtgctttgatgagtaagacaacctacctagtttgaataaatattcagaatataccgaaagtttgcctggccaagcaaacggatcagaaccatctt

SEQ ID NO: 18642 - protein, 121 aa, DROSOPHILA
MHLIKIALLLSFLALCQKSQVQAAISSELDHYLRCLEVVTDAGALMIENSITAISLLSDCVDFQPKIKLTGSILRFIRVAHQFGKKAIYDRPECLVQTFTTGVGLIRPIIAKFDSLRCFDE

SEQ ID NO: 18643 - DNA, 2609 bp, DROSOPHILA
ggacacatacctgcagttggagcacttcagcaccttggtcctgcaacgacgaacccaaattagatagctcacaaaggcagccacatggcgaaacttacgcctccaggcagttatcgcaccgctccaggcggtactgtgatttcaagacgaaggcgaatggtttctccgtgaggatccgctgtcccctttttatttgcggcgccggattctttaggttcttggatttggatgagcatgcggatgcggttgcggatgtggttgcggatctggatgaaccaacggtggcggtggccatttcgctcgaacggagcaacaacaaagactttcgcctgggggcccgtctcactgacgactgaaaatgagcgcacacctgaagatcaaaaatattgtttcgaatgctttttgaatattttgcggcatctgatttctatttttggccacaaaaacaaacacaatttacgcaaatcgctggcaaacacaaaaacaacaacaccatggtgtttattcgcatgcaaacgatggcgttgccagatcggctggaatcatgctttctacagtgggcaccgcgtaaggttaacttgttaaccatatgtgggtagctgcatgtcgttaaaaaatacacttaacaaatcatattcaagttttttaagtaacaaataaaaaatatttcttttatatgttgttcccagtgtctacgatttggtggccttgcgtcctttaaaacgagggagaaagctatattagagcaaaagtcgaaagcatttgtgttggttggtccgcaaaactaaagaagagcgattaagttatatcaaatatgaaaaatatacgattctagatgccattgtatccttgcagagcatagtcatctggttttcggtgcccatgggggctgttttaagatttatttgtagcaaacttagcatagcatagggacaaattgtgtgatcgactcgaacggactcctatgagcagtaaacgcgggtagtgggaacgggactaactaattgttctggggtttcgaccattcgacgctgaggatcaagtggtcgtagccgtgtccattgaggatctcgatggcggcggccgcatccttgcgctgcttgaagtgcacgtaggcgaatcccttgcagagtccggtgttcttgtcgcgggcgagatacatcttgctctgcggtccaatcttcttcaccagctcctcgagatccgcctcggtcatcgactccgacagattcgatatcctaatggcggccgtgtcgtcgcgtccgcgcattcccagcgcgcccttttggctgtccttgaggaacggcggcacatacttgccggacttgggcgcatcgacggcggccgcggcggctgccgaagccttcttctccatcatattcgtgtccatcgccgtgcccttgtacgggcagttgaccgaccaatgctcaccgttgcagatacggcacttggcaatattcttggtgggatctagcagcggatcgttggccttctcgtcctccttggagttgaggaactgcatgatgatctcctcggacaccatggtcgtctgcgagttggggccgggcttgtcgttcttcgagtcgccgaacttcgtccaggtgcgtcgcttggccaccgtcttgggcaccacctgcttggatatcttgtacgtgcgcaccaccttcgtcttcttgtcgtccttgttgtacttgtactccgtcacgtacttctgtccgttctccaccgtctccgtcgtcggaggtagtccaccatagtcgagctccacctcgtccgcccaggaggatttgatcgtttcaacgcccggcatctgaaaggaattgagggcgcagtgagtggggctacactgggcgcttgcttggggtgcactcactctgattttcaacgcgatttgtatgcgaaatcgtaaatgcaaatttcgccacgagttaagcggatttttaatcagcaacaaaagagtgttaccctgccgcggtcacaaaaatatgccgtgtgtgtccaaaaaatataccgctaataccactttgcactttttggaatataccatttgaaatttcgttacatataagttaataagttatcgatttgattttgaagatcgcaagcgaccgtttattgcaatttatcatttgaaactaaatctagcgtacaaaatgtttccctaagtccctagcaatcaagtgaagtcgtcggcagcggcgcagcaggcgtcggccgcggcgcagcgcagaagtgtcgatgtcgcgcttaaccgttcgttggcgttgatggcagcggagactatgtggaaccacaagatgttagagaatcaattgcagggcaataactcctcccctcttaattgacgcttgtcctcgagcggtcatcataaggatgggatgtttttgagtcgcatcgttggtggggtgattcgtggtagtttgggcacagcattaatggtttgaatgccaggtgtttattgttgcgtgcgttcgaggtttgtgcaactcggatgtgttctgcattgacaacttgattgcttctattaaaattctggtttttactaaattactaatgaatttatatctacatatttttagaccattggaacctttgcagaaggcattgat

SEQ ID NO: 18644 - DNA, 896 bp, DROSOPHILA
ctcttttgttgctgattaaaaatccgcttaactcgtggcgaaatttgcatttacgatttcgcatacaaatcgcgttgaaaatcagaatgccgggcgttgaaacgatcaaatcctcctgggcggacgaggtggagctcgactatggtggactacctccgacgacggagacggtggagaacggacagaagtacgtgacggagtacaagtacaacaaggacgacaagaagacgaaggtggtgcgcacgtacaagatatccaagcaggtggtgcccaagacggtggccaagcgacgcacctggacgaagttcggcgactcgaagaacgacaagcccggccccaactcgcagacgaccatggtgtccgaggagatcatcatgcagttcctcaactccaaggaggacgagaaggccaacgatccgctgctagatcccaccaagaatattgccaagtgccgtatctgcaacggtgagcattggtcggtcaactgcccgtacaagggcacggcgatggacacgaatatgatggagaagaaggcttcggcagccgccgcggccgccgtcgatgcgcccaagtccggcaagtatgtgccgccgttcctcaaggacagccaaaagggcgcgctgggaatgcgcggacgcgacgacacggccgccattaggatatcgaatctgtcggagtcgatgaccgaggcggatctcgaggagctggtgaagaagattggaccgcagagcaagatgtatctcgcccgcgacaagaacaccggactctgcaagggattcgcctacgtgcacttcaagcagcgcaaggatgcggccgccgccatcgagatcctcaatggacacggctacgaccacttgatcctcagcgtcgaatggtcgaaaccccagaacaattag

SEQ ID NO: 18645 - protein, 269 aa, DROSOPHILA
MPGVETIKSSWADEVELDYGGLPPTTETVENGQKYVTEYKYNKDDKKTKVVRTYKISKQVVPKTVAKRRTWTKFGDSKNDKPGPNSQTTMVSEEIIMQFLNSKEDEKANDPLLDPTKNIAKCRICNGEHWSVNCPYKGTAMDTNMMEKKASAAAAAAVDAPKSGKYVPPFLKDSQKGALGMRGRDDTAAIRISNLSESMTEADLEELVKKIGPQSKMYLARDKNTGLCKGFAYVHFKQRKDAAAAIEILNGHGYDHLILSVEWSKPQNN

SEQ ID NO: 18646 - DNA, 3071 bp, DROSOPHILA
aacgccagtcgcacaaagaaagtgaaagggaaagcacaggaatcggcagccagaaataggagttaccgaataaacaacgcaaatgatccactaaatgcataagttacataaagaaatacagccataaaagtttaactacttgtcgcaggtcgtccactcgaaaggcattagcattacaattcgaaacagctgataaaccgataaagccatagccaaacggaatacagaacacacaatacacggagatcatcaagaacaatgctcaagttccaggtccattctccgggcaaggtcatactccatggcgaacacgccgtggtctatcatcgtcccgccctcgccgccgtagtgggtttgggcactactctgagatttcggcagctggaggacagccaggtggcaagttttcaactggaggcccttaactgcacactggagatccagttgccggagttcaatggatttttggctgaatttaggagtaaatacccatcagatagcacggccaatctgttggaagccgtccgcgcagaggtgtccaaacaacttgaacgatccggaggcaatgcaccgaagcagcacacccagcgggcattcatctccatatactatttgctggccggcgctgtactctccgcacccggcgacaagaaactgacgctgcaaaccggtttccaggtgcaggtagacagccagctaaccgtgggtgcgggtttgggcagttccgcctctttcggagcagctttggccacgacatttctcattttggccggacactttgatagagacagctacttgtcggaggcaaaccaggcgttgatctcgtcctgggcttatgaatcggagcgtgttaatcatggcacgccctcgggtctggacaacactgtatgcacctacggcggaatgttgcggtatgtcaagggccagggcttccagtcgctgaagatccagaaaccactaaacatcctgctggtggacagtcgtgtgagtcgcagcaccgccgacattgtggccaaggttcgtcatctgggagatgcctttccgcagctcatcgaggccatttggcaggcttgcgaggagcttgttgccgccgccgttccactctacgaaagctttggcaacgcccaagacgatagctcgaaattcgagcaacttgaacgcctgttccagatcaacaatgatctgttgaaggctatcggagtgtcgcacccgaaactggagcaaatcttcaccatcgcttttaagcgtggcttcttttcaaagctgacgggcgccggcgcaggtggctatgtcatcgttctgcttccagagaactacgagtgcaacgaggtctactggaagcttaaagaggagctcgaatcggcgggttttggtgttcatgttacgactgccggcggcgagggattgcgcgttagttcgctggatgactgatgcggtttcgttttgtattgctattgtatgtattcgtggttttgttataaattaaagaataaagatttatacatgtattttgtacggcaatctgtttgtttatcgttgacttctgtcccgagatttgtagacaattccacgattcttcatgtcacgtaaggtagactgcggcagtgttccggatacagaaatggcatagataccacgagtaaagcgggctaaaggaaaatgatttcaaatatatcagtaatacccttttggaacggaagtcattcaggccttacacaatctttgccacttggccacccaggagtcggtgggcgtagttagggcaataattccgtcaaagttgttgctagtgtgatcatagacattgtccttgttgtttttcattcgcaggaactcctcgcagttttcacagccatcagtctcaaattgatcaaaactctgcgggcgataaatgatttcaatgaaaatgtgtgtcgagtctgggcaaaatataacccaccttcactagggagcaaacgaggcaggcgcgaagtcctcgcagatccttgggtatcgcgtcaaaggccatatttacttatcaattatgggtttaaaactaaaaatacaaaatccgtgcaaaaccaagccacgacactgacagagtgaccgtactctaaaattttcttgaatctacgatatcgatgggcgccggttacacccgacaaaaattgtcaaaagaattttcacgaagctaacctttgtattaaaacgtgttttaaaagtgtatatttccttagcagctatatgaattttaaacaaagttcaacggcttgggcagtggcttattctttttttgcttgtaataatcctctagaatttcaaaatagatcaaaaccagtcccaagtgaattcctggattggctcctgaaaagttaaatgcaattttgtaatcctgaattggaagtatgggcagagagacctcgtccaaacgaaagttacgcgcaatcaaatgaccctttagaaacatatatatatattcaatatattgagaaaatttaactatattatatatacataagcttaccctatatgggcaactgtggtttacattagtccactccgtcaaatggctaatagcgtatttttgcagaaaattactttgcgttttattctttaacaattggcaaacatcaaatttaaatttaacggcgaagggcttgtacaaattcgaagaatccttgtagaacacttctactgacatctgaaaatttccattattattgtaatacttaaattaatgaaacttctcaccttaatatcagttaatgcctcctttatgtcaccatccatgttcaataccgatcgagtccagtttacaggcttcagaatgcaagagacattgctgaaatatgctccgtttgctatgcactcagtttttctgattttgaaaaagtatccattggaatagaactaaaaactaaaatatttttgaaatctgtatttatacgggcttatttacgcacaatggtatttggaaggcataataaaacgcccaagtacacacaagagacagcaagccactttgccatcattgaaacaaataaacataacttcaaccgaacaacttaaagcatacgctaactacattttaa

SEQ ID NO: 18647 - DNA, 944 bp, DROSOPHILA
tcgtggcttggttttgcacggattttgtatttttagttttaaacccataattgataagtaaatatggcctttgacgcgatacccaaggatctgcgaggacttcgcgcctgcctcgtttgctccctagtgaagagttttgatcaatttgagactgatggctgtgaaaactgcgaggagttcctgcgaatgaaaaacaacaaggacaatgtctatgatcacactagcaacaactttgacggaattattgccctaactacgcccaccgactcctgggtggccaagtggcaaagattgtcccgctttactcgtggtatctatgccatttctgtatccggaacactgccgcagtctaccttacgtgacatgaagaatcgtggaattgtctacaaatctcgggacagaagtcaacgataaacaaacagattgccgtacaaaatacatgtataaatctttattctttaatttataacaaaaccacgaatacatacaatagcaatacaaaacgaaaccgcatcagtcatccagcgaactaacgcgcaatccctcgccgccggcagtcgtaacatgaacaccaaaacccgccgattcgagctcctctttaagcttccagtagacctcgttgcactcgtagttctctggaagcagaacgatgacatagccacctgcgccggcgcccgtcagctttgaaaagaagccacgcttaaaagcgatggtgaagatttgctccagtttcgggtgcgacactccgatagccttcaacagatcattgttgatctggaacaggcgttcaagttgctcgaatttcgagctatcgtcttgggcgttgccaaagctttcgtagagtggaacggcggcggcaacaagctcctcgcaagcctgccaaatggcctcgatgagctgcggaaaggcatctcccagatgacgaaccttggccacaatgtcgg

SEQ ID NO: 18648 - protein, 116 aa, DROSOPHILA
MAFDAIPKDLRGLRACLVCSLVKSFDQFETDGCENCEEFLRMKNNKDNVYDHTSNNFDGIIALTTPTDSWVAKWQRLSRFTRGIYAISVSGTLPQSTLRDMKNRGIVYKSRDRSQR

SEQ ID NO: 18649 - DNA, 3162 bp, DROSOPHILA
tataacccaaaacacacaaacgtcaggggctggaacgcgtcactgccgtgctcctccagccggcacagtcattccccgcccccacaccaagcaaaaccggccgcttgtgcagatgacataggcgcgaccagccaactgacccggctgaccagacttgcaccgtgcgccatcaactggaatcttggccacaagcacagcaatagtttggcccgctattcccacacagaaacccagagtgggggcctatggaagaccacaagtggttgcgtggaactgctaaaaatataaaactgtaaaactaaagactgaaactagaaaacaaccattaaactcagaaacggaaaactgcgtaattgtttttattttatggggtggatgggacaacatttttacagggaatcatttttttaaacaaaagttgatataatataagaaaaaatgcaattagccaagctctacaaagctcacgtatttaataaatgctccaccgaatgaaatgaatattacaatatgccatataaaaatacaacattaaatgatattaaaactggtttctttatttcaatataattaaatgtctcagcccttctagacgttatgtataataatttcaagtggctacaatcagacttaaaatctaactggatttactttctactaataatatcccaatcagaagtcagatgttgtgtgattacatcttgttacatttttgatgatatttaaataaattatgctacatcattagtcattgtgtcaaagtaattttaattttatacagttgcagtttcgaggtcggacggaacggtctgaaattaactaacaatatctcgtgtattttgtgtgtgctttcgaaaaaagtttgtttgaaaaatgtgttaagaaagtggcgccgccgaaataccgatatcgccaagtatccaattatcgacgtgccgtgggtcccgattgtctaacataaataaagcctgctgatatcgaagtacaacagcccgataggtggaagcaaatatcgatgacagtctttatttatatatttcctaatcaatatacctgatatcaacaactgatgcacaaaacacaccgtctcaccaccgacagccagtacatggaggtcgaaggcttgctgcaggtaagtggatgcactgcgtccgcagataaatgaataggtttaatccagtggctgctgcaacgccctttcttttcgccccgtcgcaccacacacgacaccactttgctcttcgctctccactcgccgctcgccacactccacccactcgaaaaacctggccaaaaaccacgcacacacatgcacaggccatggacatgcccaccagccacgacccggaggcggaactggaaccggagtccacgtcgctgtgccgcctgagccgctacaacgtgaccaacctgtacgacgggccggcgggcgggggttcctcattgagctcgggccgccagcgttgctacacaatgccgcatgtgccaccgccagcgccgccctccacgcccactctgctgaccagcgggtgcggcggcagcagcaactccgtatccgtctccatctcgcccacctgctccgctggaagccatcccttggatagccaaagtttgagccagagccccttgaaccacttcatctacgtaaagaatggcaagaacctgcgtcgcgaatcgcgctgcgtcgactcggagctgtcaaagttattcaacgtggtgtccatcacaaaccggctgacggctattaagaaccgcagcaattccatttcgaattccagtggaatactcaatgcctcgcgcaccatatcgaagttaaacggggcgacggccaccaagatctttaagattcatcgggatccgaaggaatttctgcgcgaaacggacgaggattccgtgtctgcgccggagtacgacgaggaggaggaggacacgcgcttccgtttctttcggcgtgcgcgcttctcgaggaggtacagtaccgcacgatccggccggaaatttgcgcgaaagttcgcccgatttgagcatcatgagcgcatggaaaccatcgtggatagtttcgatgcagcaatgagcttcaatgatgcagacacctgagaggcggaggccacgacgaggacgacgacgacagcaacagttgagaatgaggcatggcagatggtcggccaaccaatgtgatgaatgtgaatttcaactaaattattttaattactacaaactactattattacgattattattaccgattaccgaactgttctctccatacgtttagtttccttctacgccgattgccgtggccttcgagatcccagcaccactcctgcatttgatcgggtttggtggcggatcgcggacgcagcgcatggcacgcatttagtttaaagcctagttttacgcctacgcctctggggcggagcaggtgcagccgaccaccgaatggttgatagctccacgaacagaacgattccaataaatgcacaaaacgtgttgtattcgagaagagagattactcgacgttggtttcatttatggtgtgatgtgattagtgattttttttactccaaccttaacgattatttacataacgaatacacattgtatgttttctttattaacgttgtatatggacatgtataaggttatttcggttattagtcactgtcaggctcgttttctcgttcaaatggatgggtatgataggttttaaactggagagaaccttgcagttcaaaatctacataagctataccatgaaaataagaagaggggcctttgtacaacaactttaaccaactctagacacttagggagcaatgcagtctctcagacttaacagtgaaataagctggagtcgcaagtctattggggtctttaataacgggatcttaacactatgtagttccgagaactcctttttgtttgcttttgaagcaaatcaataacaattaactaacatctagaagttcttaaaatacatttcgagtaaatttccggatctaatcacgttttgagaagaaatacgccattaggttatcctctagctgctgcggatcggtaactggcattcgacaagctcgctcgtgacaaatgtaaaccgtagttttaccgcccaccatcttaaactttgtctgcaagcgctgattggaggcttcctctgga

SEQ ID NO: 18650 - DNA, 977 bp, DROSOPHILA
tggaagcaaatatcgatgacagtctttatttatatatttcctaatcaatatacctgatatcaacaactgatgcacaaaacacaccgtctcaccaccgacagccagtacatggaggtcgaaggcttgctgcaggccatggacatgcccaccagccacgacccggaggcggaactggaaccggagtccacgtcgctgtgccgcctgagccgctacaacgtgaccaacctgtacgacgggccggcgggcgggggttcctcattgagctcgggccgccagcgttgctacacaatgccgcatgtgccaccgccagcgccgccctccacgcccactctgctgaccagcgggtgcggcggcagcagcaactccgtatccgtctccatctcgcccacctgctccgctggaagccatcccttggatagccaaagtttgagccagagccccttgaaccacttcatctacgtaaagaatggcaagaacctgcgtcgcgaatcgcgctgcgtcgactcggagctgtcaaagttattcaacgtggtgtccatcacaaaccggctgacggctattaagaaccgcagcaattccatttcgaattccagtggaatactcaatgcctcgcgcaccatatcgaagttaaacggggcgacggccaccaagatctttaagattcatcgggatccgaaggaatttctgcgcgaaacggacgaggattccgtgtctgcgccggagtacgacgaggaggaggaggacacgcgcttccgtttctttcggcgtgcgcgcttctcgaggaggtacagtaccgcacgatccggccggaaatttgcgcgaaagttcgcccgatttgagcatcatgagcgcatggaaaccatcgtggatagtttcgatgcagcaatgagcttcaatgatgcagacacctgagaggcggaggccacgacgaggacgacgacgacagcaacagttgagaatgaggcatggcagatggt

SEQ ID NO: 18651 - protein, 280 aa, DROSOPHILA
MHKTHRLTTDSQYMEVEGLLQAMDMPTSHDPEAELEPESTSLCRLSRYNVTNLYDGPAGGGSSLSSGRQRCYTMPHVPPPAPPSTPTLLTSGCGGSSNSVSVSISPTCSAGSHPLDSQSLSQSPLNHFIYVKNGKNLRRESRCVDSELSKLFNVVSITNRLTAIKNRSNSISNSSGILNASRTISKLNGATATKIFKIHRDPKEFLRETDEDSVSAPEYDEEEEDTRFRFFRRARFSRRYSTARSGRKFARKFARFEHHERMETIVDSFDAAMSFNDADT

SEQ ID NO: 18652 - DNA, 6011 bp, DROSOPHILA
ggtgttgtgatgcccgtggaaaactcgatgaggaagccccagcatttcttgggatgccccggcgtgcttaacattgctatggtcactgtggtctcgctctatgccatcatcggattctttggatatgtgcgatttggcgaccaggtgcgaggcagcatcacgctgaatctgccggaaggcgcctggctgggcgatacggccaagctcctgatggccgtggccatcctgttcacctttggcctgcagttctatgtgcccaacgagatcctctggcgcaagatcagtcacaagttcagtcccgagaagcacaatattacacagattctgctgcgcagcggcattatcctgcttagcggtggtgtagctgctgctatccccaacctggaacccttcatcagtctggtgggtgccgtgttcttctcgctgctgggcatctttgtgcccagtttcgtggagaccgtctatctgtggcccgaccgcctgggcgtgtgcaagtggaagctggtcaagaacatcttcctgggcgtgttctccattcttgccctggttgctggtgccgtcgccagcatcaacgagatcatcgaaatgtatagcgacgacgactaaggattcgatatgtatgggttcaaccttcaaacagagacgtagtattacactagatgcaggtagctccaacaatggaagcgcgatgaaagacaagtatgagttcaaaaagcaggcgaagcccacattcacatcagacccaacttatggccatgttgaacatggtcaagcggctcggatgccaaattgccgatgccgttgactgcatgaacaagatgatattaagtttaagtgccctgttacacaaactaagcagcaattcatagaatttatatatgttattacgttaagttgctcagcattccaaaacataaagcgaacagtaccaaaacattcaatatgtcgccttttacttacggggaatccacctctgaatataaagtgaaacaatctgtatgctgtgttgatttatataaatataatgattatagtcttagaacacaatacaattatttggaatagaatacagcggcacgcaatagtaatgtagtcggatgtgtaggcgggtgtttaaaaaaacttcagattttgggggtggggttggtgtgatattgcttccggcgtgagatatgaactattaactatatagagtaaaatatgtttaagtaatcgcttgtcttaactatttaactgcctagtgctgagtgtagagccgaatctcagaaaaatatctgtttgctttgtcgctttacttcttcttctttttcgagttggaactggttgccaccacctcgctcttccgcttttgactggccttcggttggggcgcgggtgctggagtgttcgagctggcacttccacttccagcggacacgctgccctttggtgcctttttctttttctcggcgcgttctttctcttccagctcaatgttttcacgttcaataagggtaatcaacgtgttgcagcgacgctgtagctccaaagcggttctagatttgatgaaccagtcaaagcggaattgcggagaagctctgtaagagaacggaaatgtataaggggtttactcatatttaaaaccaagtttttgctcaccttatagccgctcgcagctcttcgtagacattctccttgtcaaagcccaacttgtgaagcatgcataccagaaagcgatcctctatttcagtgtaattcttgcccttgttattaccatattgcagccgcaactgatggaagggggcgcgataccgcgacatctacaacaaaaatatattcatatatattaaagatactctacagaaacaatgctaactaccttttgatccaaagccttcttaatagacaatcgccgttgaatcttgccctctccacgctcaatctgtcccattattcgctcaatatcctgcaactcagtgcatcgctcccaaaacacggcgttgtactcgataacctcctccggagtcttgccctccacgtccttggcaatgttgtcaatatcatcccgaccgtacttttcgttagccttgatgaactggttgaaatcgcgcttggtccaggcagtgaaaccctgtgagagtagattctccttctcctggatctcttcctcggtaagcggctctgcctcatcgatcttgcgctgctcctcgcgctgcactttggtggcatccgatcctagttccgtgttcttgggcaccttgtaaccaacagtcttgcggaaatagtagatttcctggtcgagcagctcaaacagacggggtgggaagaactgaaagtcctgaacgataggctgcttgggtgggcggggagccttcggtgccttgggttcggagacacggagagcctcgcggaaataggcatccacagcatagttggctttgcgttcacgcttcggtggctcgatccagttgcccagcgcatttagcttttgcttctcgcgccaatcctcaccctcgaattgatatacggaagaagttcctgcctcgccgtttgtgtccattgtgaacgtccgcagcgaactctcgcccagactgtccagtgctgccttttgctcggccgtcttggcctcaccgcgctccaaaataacatcgatgtcctcatcggtaatgtctgtctccttagagctgaacacttggttagctccaaaacggattatattaagcatttcatccttgttcaactgattggagcggttgtcaaccaatctgcccccctggatgaccatcttgtccagacggagcttgacctctgctctctccacgatcttctcctccactgtactttcggtgatcagccggaaaacgcgcacttgcttcttttgaccaatacgatgagcacgatccatagcttgcaaatccatttgaggattccaatccgagtcgtaaatgatgacaacatcagcggtagccaaattgatacccaaaccaccggctcgggtggacaacatgaagagaaacttggcgctgttgtccatgttaaattcctgaatctgcctgttacgatcttcgtgcggcgtctgaccatccaggcggcaatagttgtagttgcgccagtgacagtagtcctcgaggatatccaacatcctcgtcatttgtgagaaaatcaacacacgcgatccctgctcttggagcttgggcagcagcttgtccagaatagccatctttccggagttatacaccaaatgcgtgtccgtggtgtatggcggaccgggctcggcgccatcaaacaaatatgggtggttggtgcacttgcggagctgcataaggatgttctgcagtcgcatcttctccactttgccagcaccgttcactacatcaatgtccttaagcagcaccttggtgtaccagtcgcgttgcatcttggatagacccacaaatattttcatctccttcttcggcttcagacgcttctccacttcggcctttagacgacggagcaggaaaggtttcagcacggcatgcaaacgcgtaatcaatgcatcgtcacccaggcaggtgttcgtgttgaaccattcgtcaaaatcctctgacgaattaaacacatcgggcagcaggaaattaagcagggcccacagctcgtggaggttattctgcagcggagtacccgtgataagtagacgattagcggtcttaaactctcgcagaatctccgacagcttcgacttctcgttcttgatacgatgcgcctcgtcgatgaccaaatagcgccagttgaacttcttgaatacagacttctcgcggatacacatctcataggaggtcacgcaaacgtcccactcgccaggcatgagcacatctctaatgaaggtgttacgggtgtcctggtcaccaataaggcagacggctctgagggaaggacaccactttttaaactcatttacccaattctgaagcgttgactttggcacgatgacgatgtgtggtccagcttgatttctgcacgcaaatatggtatttagagatttctttaaaacaatagatgtttatgaaaactcacttgaaatgcttgaggtaacccagcagagatatggtctgcagggtctttcctagacccatttcatcggccagaattccattgataccattttcgtaaagcgaaatcatccagttaagaccgcgaatctggtagtcacgcatctctccacttttgatgtaggcgggtgaggcatcgaagcgaaagatctccttggtggccgagtcttccgccagcaactcctcatcctcctcctgctctgtcttgcgatgacgatgactgtttaatacaaaagtacaccaatagataaagtagttggcttttttatagggggagtttaactcactcggccacatccttttccttgtccttgtctttgatcttcttgggtctacccttaggcttcgtgggactcttagcgctgttagtcatgaagtgggtgaatatctccgtctgctttagcaggaaatcaaagcgcctactgcgatcagcctcgattttgttgtcgaactcagcctccttttcaccggatgaactggtggccgcatctgaagtcgtctcgttctggcagagttcagaatatatgtatagaagtccttagacaaagcctgctgtatattaacttaccgagttctcttcggttgcctccacggcagctgtatctgttttggacatatttgcaatgccggcgtctgtctctaaatgaacttaatttttccacaaatttcccctcgccaatcaagcgtgctgcacactggtgtcgtttaatgtgaactgaaaatcgagtgtgcaacctgttagttatactttcagtatataaataaaaggcaatttacacaaaacaatgtttgtttcgcttaaacaaattgtaaataattacatgcgattttttttaatgaatggtgggaaatctgcgcgtgctatcgctagattatgcgatgaatgcgcgaagttggctgcggcagcgacggtggcggcaaacaaatcgagaatacgaactatcgatagttttgatggattactatgaatggcagcactggccgtgtgccgttattattagttttagacaaagccgttattctgattaatcaaataggttatctttttaaattgtttgcgtttgtttaaaaattattgcctaatgtttaagtttgagatgatggaatatagcaggaatcgaaaagtctaatggggtctcataatattttagaaataagccctgtggtggaaactgaatctaaatatgacaatatgtactacatcgttttagacttgaatggctgccccaaactatatgaacaaagacaaaatctgttaaattacttagacaacccccatattaaagtatttaatagatatatcgcaagaaaccccccgaaaaagaacatttaaaatggtgctaggtgtggccaaggtcagcgcagatagaaaaactaccacccggcttatggaaaacctgtttttgcctgaagcccaatacggtcacacaaccactccatcacctcgtttcgtttgaaaaaaaaaccatccaaaatgagtaaatacgactcaaagtacctcgaggagaagctcaaacgggaactgcagacggagtacgtgagtgttacggacgaatcagacggctgtggcggcaagttcagcgccgtaatcgtatcgccagccttcagcggcaagacccttctccagaagcatagattagttaactcaacgcttgccgaagaactgaaagaaatccatgcattctcccagaaatcctacacacccgaagagtgggagaaagtgaaagcccaatagtagtaccgaataaaaaaaaaccaacaacacacatacatatacacgagcgatacaacaacagcaaacactagccgcaaaaacctgttgttcgttttgctgatggttgcgctttccgatcgaagagacgaacaagccgaaaaacgccagtcgcacaaagaaagtgaaagggaaagcacaggaatcggcagccagaaataggagttacc

SEQ ID NO: 18653 - DNA, 3700 bp, DROSOPHILA
agttcgtattctcgatttgtttgccgccaccgtcgctgccgcagccaacttcgcgcattcatcgcataatctagcgatagcacgcgcagatttcccaccattcattaaaaaaaatcgcatgtaattatttacaatttgtttaagcgaaacaaacattgttttgtgtaaattgccttttatttatatactgaaagtataactaacaggttgcacactcgattttcagttcacattaaacgacaccagtgtgcagcacgcttgattggcgaggggaaatttgtggaaaaattaagttcatttagagacagacgccggcattgcaaatatgtccaaaacagatacagctgccgtggaggcaaccgaagagaactcgaacgagacgacttcagatgcggccaccagttcatccggtgaaaaggaggctgagttcgacaacaaaatcgaggctgatcgcagtaggcgctttgatttcctgctaaagcagacggagatattcacccacttcatgactaacagcgctaagagtcccacgaagcctaagggtagacccaagaagatcaaagacaaggacaaggaaaaggatgtggccgatcatcgtcatcgcaagacagagcaggaggaggatgaggagttgctggcggaagactcggccaccaaggagatctttcgcttcgatgcctcacccgcctacatcaaaagtggagagatgcgtgactaccagattcgcggtcttaactggatgatttcgctttacgaaaatggtatcaatggaattctggccgatgaaatgggtctaggaaagaccctgcagaccatatctctgctgggttacctcaagcatttcaaaaatcaagctggaccacacatcgtcatcgtgccaaagtcaacgcttcagaattgggtaaatgagtttaaaaagtggtgtccttccctcagagccgtctgccttattggtgaccaggacacccgtaacaccttcattagagatgtgctcatgcctggcgagtgggacgtttgcgtgacctcctatgagatgtgtatccgcgagaagtctgtattcaagaagttcaactggcgctatttggtcatcgacgaggcgcatcgtatcaagaacgagaagtcgaagctgtcggagattctgcgagagtttaagaccgctaatcgtctacttatcacgggtactccgctgcagaataacctccacgagctgtgggccctgcttaatttcctgctgcccgatgtgtttaattcgtcagaggattttgacgaatggttcaacacgaacacctgcctgggtgacgatgcattgattacgcgtttgcatgccgtgctgaaacctttcctgctccgtcgtctaaaggccgaagtggagaagcgtctgaagccgaagaaggagatgaaaatatttgtgggtctatccaagatgcaacgcgactggtacaccaaggtgctgcttaaggacattgatgtagtgaacggtgctggcaaagtggagaagatgcgactgcagaacatccttatgcagctccgcaagtgcaccaaccacccatatttgtttgatggcgccgagcccggtccgccatacaccacggacacgcatttggtgtataactccggaaagatggctattctggacaagctgctgcccaagctccaagagcagggatcgcgtgtgttgattttctcacaaatgacgaggatgttggatatcctcgaggactactgtcactggcgcaactacaactattgccgcctggatggtcagacgccgcacgaagatcgtaacaggcagattcaggaatttaacatggacaacagcgccaagtttctcttcatgttgtccacccgagccggtggtttgggtatcaatttggctaccgctgatgttgtcatcatttacgactcggattggaatcctcaaatggatttgcaagctatggatcgtgctcatcgtattggtcaaaagaagcaagtgcgcgttttccggctgatcaccgaaagtacagtggaggagaagatcgtggagagagcagaggtcaagctccgtctggacaagatggtcatccaggggggcagattggttgacaaccgctccaatcagttgaacaaggatgaaatgcttaatataatccgttttggagctaaccaagtgttcagctctaaggagacagacattaccgatgaggacatcgatgttattttggagcgcggtgaggccaagacggccgagcaaaaggcagcactggacagtctgggcgagagttcgctgcggacgttcacaatggacacaaacggcgaggcaggaacttcttccgtatatcaattcgagggtgaggattggcgcgagaagcaaaagctaaatgcgctgggcaactggatcgagccaccgaagcgtgaacgcaaagccaactatgctgtggatgcctatttccgcgaggctctccgtgtctccgaacccaaggcaccgaaggctccccgcccacccaagcagcctatcgttcaggactttcagttcttcccaccccgtctgtttgagctgctcgaccaggaaatctactatttccgcaagactgttggttacaaggtgcccaagaacacggaactaggatcggatgccaccaaagtgcagcgcgaggagcagcgcaagatcgatgaggcagagccgcttaccgaggaagagatccaggagaaggagaatctactctcacagggtttcactgcctggaccaagcgcgatttcaaccagttcatcaaggctaacgaaaagtacggtcgggatgatattgacaacattgccaaggacgtggagggcaagactccggaggaggttatcgagtacaacgccgtgttttgggagcgatgcactgagttgcaggatattgagcgaataatgggacagattgagcgtggagagggcaagattcaacggcgattgtctattaagaaggctttggatcaaaagatgtcgcggtatcgcgcccccttccatcagttgcggctgcaatatggtaataacaagggcaagaattacactgaaatagaggatcgctttctggtatgcatgcttcacaagttgggctttgacaaggagaatgtctacgaagagctgcgagcggctataagagcttctccgcaattccgctttgactggttcatcaaatctagaaccgctttggagctacagcgtcgctgcaacacgttgattacccttattgaacgtgaaaacattgagctggaagagaaagaacgcgccgagaaaaagaaaaaggcaccaaagggcagcgtgtccgctggaagtggaagtgccagctcgaacactccagcacccgcgccccaaccgaaggccagtcaaaagcggaagagcgaggtggtggcaaccagttccaactcgaaaaagaagaagaagtaaagcgacaaagcaaacagatatttttctgagattcggctctacactcagcactaggcagttaaatagttaagacaagcgattacttaaacatattttactctatatagttaatagttcatatctcacgccggaagcaatatcacaccaaccccacccccaaaatctgaagtttttttaaacacccgcctacacatccgactacattactattgcgtgccgctgtattctattccaaataattgtattgtgttctaagactataatcattatatttatataaatcaacacagc

SEQ ID NO: 18654 - protein, 1027 aa, DROSOPHILA
MSKTDTAAVEATEENSNETTSDAATSSSGEKEAEFDNKIEADRSRRFDFLLKQTEIFTHFMTNSAKSPTKPKGRPKKIKDKDKEKDVADHRHRKTEQEEDEELLAEDSATKEIFRFDASPAYIKSGEMRDYQIRGLNWMISLYENGINGILADEMGLGKTLQTISLLGYLKHFKNQAGPHIVIVPKSTLQNWVNEFKKWCPSLRAVCLIGDQDTRNTFIRDVLMPGEWDVCVTSYEMCIREKSVFKKFNWRYLVIDEAHRIKNEKSKLSEILREFKTANRLLITGTPLQNNLHELWALLNFLLPDVFNSSEDFDEWFNTNTCLGDDALITRLHAVLKPFLLRRLKAEVEKRLKPKKEMKIFVGLSKMQRDWYTKVLLKDIDVVNGAGKVEKMRLQNILMQLRKCTNHPYLFDGAEPGPPYTTDTHLVYNSGKMAILDKLLPKLQEQGSRVLIFSQMTRMLDILEDYCHWRNYNYCRLDGQTPHEDRNRQIQEFNMDNSAKFLFMLSTRAGGLGINLATADVVIIYDSDWNPQMDLQAMDRAHRIGQKKQVRVFRLITESTVEEKIVERAEVKLRLDKMVIQGGRLVDNRSNQLNKDEMLNIIRFGANQVFSSKETDITDEDIDVILERGEAKTAEQKAALDSLGESSLRTFTMDTNGEAGTSSVYQFEGEDWREKQKLNALGNWIEPPKRERKANYAVDAYFREALRVSEPKAPKAPRPPKQPIVQDFQFFPPRLFELLDQEIYYFRKTVGYKVPKNTELGSDATKVQREEQRKIDEAEPLTEEEIQEKENLLSQGFTAWTKRDFNQFIKANEKYGRDDIDNIAKDVEGKTPEEVIEYNAVFWERCTELQDIERIMGQIERGEGKIQRRLSIKKALDQKMSRYRAPFHQLRLQYGNNKGKNYTEIEDRFLVCMLHKLGFDKENVYEELRAAIRASPQFRFDWFIKSRTALELQRRCNTLITLIERENIELEEKERAEKKKKAPKGSVSAGSGSASSNTPAPAPQPKASQKRKSEVVATSSNSKKKKK

SEQ ID NO: 18655 - DNA, 4991 bp, DROSOPHILA
tttttctaatataaccaagtacattttcacctattttttcttcgtggaaaagggatgttgaatgaggagcgaggatccgagccaagagccgcatacaaatgaggcgtacccaatgttgacaatgaatattaaccttgagtggtgccccagccggtttttgcctggccaaggtcatctcatcccatcgcgatgccagaggatgtggatgcggagatggtgtgatgagatggttgccgataattgccatgggcatcgactggagtcgacctaatggaaacgcggtgaatgtcattcgcgttgatgtgtgtaatcgattctgcagagttgttttattaaatgaaatgctaaaatgcaatttattcgattcaaaattacattgcatggctcttaaactattaacgtaacaaccgaataaatgtttcatacgaccttgatggtacagatttctcgggacttatagcgacagctgatacaaatatctcagattgaaagcctcgtgtttgcccacagaaactttatgagatgcacttcgatccggagaaacagtttccacttctacttgaattctactatataatttcattggtcttagctgctatcgattgggttcacatgcgaagtttgcattcacagtcacttggctggttttccagttagctatttggctgctttgcacctcgacattaaggcagttggagaacagctacgattgagactggattcagactgctaacccagttttaataatcacgaagtggaagttactccgcggtaattaccttttgcattcgctagatttttcaatttttttttgcttttcgccttttgtttgcggcacgaacggcagtttagcttttcggtgactgacatatcgcatcgtataaatctcaacttaagtcgaaatttaataattttagagcccaggcattaggagttttgctgggctcgaaaattttaaattctcgccttgctacaccgatgcaacactgggagaaaagccctatgcctggtccttctttttacgcccgaatgtctctccgtcctccagggtttccggcagtggagttccacgtgtctccggcaagaaaattgtgccgagcattgccagaatggagaaaattccaaagatcaggggcgccacccacagaccgtatgcagccagatcgacgatgagcggagcaacaatggaacctattcgaccgaccatcgagcagagaccaaccccactggaacgcacaaccgtgggaaagagctctccgccgtacaagtagacattcggaaaggtgattgatgcgccaaaaagtccaattgtggcgcaggtcacacgcacagcctctgcctgagtagaaaggcatgccaataggattaagcccaaagcactgcatccattggaaagaagcagggtcttcttgcgtccgaggtacttggtcatgagcgcacagaggcatgtgcctggaatgcccactccggcggcgattgcattgctgatgaagatgttgccgcccagcgcggagacatactgagcggtgccgtagtagaccatgcaaaccactagccaattgtttgccatgaatatggtctttatccgcatatagggtgtccggaatagatccacgacggtgccttttttgaccggctggcgggctgccagtgccccataggcagcttcgatctccggccgaatcgtttccgtcggagccttattacacttggcgatcttctccagaatctttatggacttgtccagcttgccggtggtaaagagccagcgtggcgactcgggaaccagccaaatgtagatcacgaacacgatagagaaaatggtgatgctgaactggaaccagcgccattctcgaataaagtaggcaaacagggccagggaggcgtggccgatgttaaaggggatttggtagagaatggctaccatttcgcgctttttgggtcccacgatttccatcagcaagacgaaactgcggatgggattagtcatttatattactgggaatatccttggtagtgcctttacacccacctggtggtcatcgttcccgccgtggccacagccaccaggaacctaaagaggcaatagaaccagtagtagggggatacgcagacgatgaggccagtgatcagctgcatgaagcagcacgtcaggaaggcagggcgtcgtccatacctgggaattgaaaaattctatagtaggcggactaactcaaaaacagaaaaattgttttaaaactaataaataggtgttcgctaatggtccaccagttaatctagtggtttaactagtaagccagcaaaggctctattttaccgacttgctttcaggtttcttttagcataagaaaacttattaataatcttgagatactcaccgatcagcgaacatgccaaacagaatactcccgaacaaaatgcccagcatgacgatactttgggacaagctagccagctgtttgctttcgcaggtgagattccactcggttatgatggtggattggaagacgctagtgtcgaactcggtctcggagcattcgtcactgcagggatccgtgacgttctctgtcttgcaggataacggcgttggtgctgcgaggaatatgtggccgagggtgtgccatcccgtgccaaatttgcacagtagaacgatgaagaaaaagaataactggtagcgccggaagtcgccgatctgcgaaattatcggatcacctgtcttggtgacgggtttcagtggctttggagcctttggatcctgcggtcgatcggccatgttgctgaaaactaatgatttttggctgtcagtcaaaaaaaaagtgtatattttgagtgtttgtaaaatattctaaatttgtttttttcagtgcagtggcctaccaagccgactggtttcttagtgggtggactttctcaaatatttgccggcctcagagcaaattggacatatcgaccggtgcggctcagtgcagactggcgtgaaatatggaacccgggcagatggagatttcgtttgcgaccggccaccagagaaccggttttcgcggagagagagctccagtctgtggcagcgtgacaagttggagctcaaagacatagcaatcggcggggctgggggcattagcacttggccgcttggatccaccgccaaaatggcatttgaaaatagaaataggagtacggcctccatgcgccgctgcagtttgtcagcccaaaaggccaagagactggggctaagacgctaaacttttactctttaagtaggtaaatgaagttggctgcctggttaattgaaggaaggtgcgcccggggacccggcccgatgatgctgggatctagctggcagattaagccattgtctgcccgcagataaccgaacgagccccagttacccattaagatggcttaattaaggaagcactgcctcagtgaaagttgaaccggagagagagacgaaggtctgagatttctggtcggagattccgccacaagttcccacggcaacgacaacctgtctggcgaaggcatttggcgcaatcgtcagtggctggcaaaatgtcacaacaattgcaaataaattatatatgcaaattggctggccaatgaatgacaaaacgcagcgttataatacgatcgccacatgctaaatctggcaagacacaaagcgctcacttgggaactaaacaaatgcccaatgtttaaagcaatgccattgtctgcattcatggcatttgaatgttgtcctgctcatttcaattgcgattaacatattttacctcatttatatatgtgaggcaaaaagcacttacctaaagagccgatttaaatggcaatcaaaacaaaaacagttataagtaggtcgaaaccaattctatttatattaagtaatcggaacttttcgggggcttgtctaccgcccgagttatataactcagcaagttgattgataatactctgttcgcaatctcgcactttttgaactacgtctggtgggcttcgacgctctactatcaatggcagaaaaatctcatcttgtctcgccggatgagaaaagcaactgagatggcgataaagtcgtgtgtactttaatcccagatgataagaggcgttcgacaagcgtcgcgaatatgacaaataatgccaaatgccctgaacttctggccaacttgtgcgagataacacgtatatattgtttacctgcagaaagcctttgggcaaatgttaatcatataatcagttgagcacacattcagcttagcctaccttatagctcctgtattccaaaatagatgatgttttgtataaattaatagagatgtctcgccgtgaatccgatagctgatcacaatgaaatccaaacataatcacgcagtgttcatcagtttagcacgcgtttatcaaactccaaaatgtttggtttacccatgatattgaaagtccaaatatcaataaagcgagtcgcattgttgacttatttggcaagacgataattgagtataattttagtaatatttttagttcctaaacgtttcctgtagatacaaacttttgatttgtgcaaatcaacttattaatatgttaaggtaataaattatcctaaaaagacacattttaattacacgtgactaatttttaaaagatgtattgatgttaagagctaccagttcagtaatgtattaatatagtatatattaacgatgtgttgtatattttgtatgagtcacatgctattttgaagttgagaattccaccaaatatttactataccctttattaatattatttatttatttatttaaatctgaaactaaaatttcaaggcccagccgatatactgtgtatttgcgaaactaaatccatttaaatggccccgtttaatatttacatttggtgggctgacaagtgttctaagccgatttcagtgccccgaatgggccggcaagcggactgtttgggccagatattttccaggggatatatatatggcccggcaa

SEQ ID NO: 18656 - DNA, 1705 bp, DROSOPHILA
cccaccagacgtagttcaaaaagtgcgagattgcgaacagagtattatcaatcaacttgctgagttatataactcgggcggtagacaagcccccgaaaagttccgattacttaatataaatagaattggtttcgacctacttataactgtttttgttttgattgccatttaaatcggctctttagttttcagcaacatggccgatcgaccgcaggatccaaaggctccaaagccactgaaacccgtcaccaagacaggtgatccgataatttcgcagatcggcgacttccggcgctaccagttattctttttcttcatcgttctactgtgcaaatttggcacgggatggcacaccctcggccacatattcctcgcagcaccaacgccgttatcctgcaagacagagaacgtcacggatccctgcagtgacgaatgctccgagaccgagttcgacactagcgtcttccaatccaccatcataaccgagtggaatctcacctgcgaaagcaaacagctggctagcttgtcccaaagtatcgtcatgctgggcattttgttcgggagtattctgtttggcatgttcgctgatcggtatggacgacgccctgccttcctgacgtgctgcttcatgcagctgatcactggcctcatcgtctgcgtatccccctactactggttctattgcctctttaggttcctggtggctgtggccacggcgggaacgatgaccaccagtttcgtcttgctgatggaaatcgtgggacccaaaaagcgcgaaatggtagccattctctaccaaatcccctttaacatcggccacgcctccctggccctgtttgcctactttattcgagaatggcgctggttccagttcagcatcaccattttctctatcgtgttcgtgatctacatttggctggttcccgagtcgccacgctggctctttaccaccggcaagctggacaagtccataaagattctggagaagatcgccaagtgtaataaggctccgacggaaacgattcggccggagatcgaagctgcctatggggcactggcagcccgccagccggtcaaaaaaggcaccgtcgtggatctattccggacaccctatatgcggataaagaccatattcatggcaaacaattggctagtggtttgcatggtctactacggcaccgctcagtatgtctccgcgctgggcggcaacatcttcatcagcaatgcaatcgccgccggagtgggcattccaggcacatgcctctgtgcgctcatgaccaagtacctcggacgcaagaagaccctgcttctttccaatggatgcagtgctttgggcttaatcctattggcatgcctttctactcaggcagaggctgtgcgtgtgacctgcgccacaattggactttttggcgcatcaatcacctttccgaatgtctacttgtacggcggagagctctttcccacggttgtgcgttccagtggggttggtctctgctcgatggtcggtcgaataggttccattgttgctccgctcatcgtcgatctggctgcatacggtctgtgggtggcgcccctgatctttggaattttctccattctggcaatgctcggcacaattttcttgccggagacacgtggaactccactgccggaaaccctggaggacggagagacattcgggcgtaaaaagaaggaccaggcatag

SEQ ID NO: 18657 - protein, 502 aa, DROSOPHILA
MADRPQDPKAPKPLKPVTKTGDPIISQIGDFRRYQLFFFFIVLLCKFGTGWHTLGHIFLAAPTPLSCKTENVTDPCSDECSETEFDTSVFQSTIITEWNLTCESKQLASLSQSIVMLGILFGSILFGMFADRYGRRPAFLTCCFMQLITGLIVCVSPYYWFYCLFRFLVAVATAGTMTTSFVLLMEIVGPKKREMVAILYQIPFNIGHASLALFAYFIREWRWFQFSITIFSIVFVIYIWLVPESPRWLFTTGKLDKSIKILEKIAKCNKAPTETIRPEIEAAYGALAARQPVKKGTVVDLFRTPYMRIKTIFMANNWLVVCMVYYGTAQYVSALGGNIFISNAIAAGVGIPGTCLCALMTKYLGRKKTLLLSNGCSALGLILLACLSTQAEAVRVTCATIGLFGASITFPNVYLYGGELFPTVVRSSGVGLCSMVGRIGSIVAPLIVDLAAYGLWVAPLIFGIFSILAMLGTIFLPETRGTPLPETLEDGETFGRKKKDQA

SEQ ID NO: 18658 - DNA, 4672 bp, DROSOPHILA
aatatataatgcattcccagtcgttcaagtattgcccagatttatgttgtctattattttaagccctaaaatgttggatacaatgtgatctctcactcttctatgcagaaaattctttgttaaacaaacaattctattgtttgtcataggtcactaacccgttatgagattcaatagaaattcgtttatgcaaaatcactcaatagccagttgaaatacttttgtggcgattagtaaagttcacgctctttaccactcgaacgtttatttactttacttgattttggaattaattaaacgaacaaacaaatcgcaggcaatgcttatttaacatgttaacttgttagggtttgttgtgcatgagttttgtcttcgattttatatttcaaaaatttgtatttgtcaattaacttcaatatactgtgcatatatatgctctgctgtatgtgcaaattatttatgtgcacatagaatcggaaataatatttatttattcggcactaagcgtacacctaccgccaaccgttttaattcacgcgccaactcagactgaaaaaaattcccaaacagcggacgctgagccgcagacttttaacagtgaaagcaaaacgctgttaaagatcgaaatctattcgcacacagagggaagtgcgctacagagcgcttcgtccgtcgaaattgttgctttcgttgacctccgacccgtggtaccagaaagggaaaacatttcacaataagtgcactatttataaacacgggatgtgaaggaatatctaggctttttaattcaacaaactacgttaagaaacagatatattcaaaccacgggctcctgtcaagcccgcgacaatacacttttaatgcttagttttaggtttatatctagaagtacacaatgggaaataaatatatgctagacaggcaataatttcttatagaaagcaaccaaatcacccaatgctttatgtatttaacagtcccccaggcgaatagagggcgattagagtatttccaggtccacatggcgtatttccgggaattgtgtctgttaaaatttaaagtatatacgtttaataagaataactagattatcatccattttagctaacccgcaagttcatctcaatgcgatcaatttcgccgcccatcaggtccacaatgttttcgccttgatccagcagaaagctctccagatcctcaaccttttgaaagcctcgaaccgtctgcgggggtaaacaaaaaccggtcaatgacaggcccagaaatgggtcaataccacgtaccgtgagcagttttgcgagatcctgtttgtccagatacgaacgggtcagctcacggccgtcaaagtcgagctcagcctatggaaatgaactttagtctcattgaagccctttaagagcaaggttttaccttataccgaacccgagcattgccaatatcgattcccttgacatcgtaaatcgctctgatcattacatcagcctccaaagcagagttaatcttttctaggcgctcggaagcaatggatatccccaccaacgcattggcatttgtataaataataaaagaggccacagcgcccagaagagcacctataaccagtgaaccagcggcgtcgaagatgggcgatcctgtgtaactacttaatcccatgcaagctgcagccaccataacgccagttaccgctgcagcgtcttcacacagcaccacattcacgcacggatccttgccagaaatcactgtaaaataagcattatgatttatgttcatattacacatgctaaactcaccataatccttaaaggacatattgttttccttagccgatcgcttaagctcattaatggccaccaccaatgtggctccctcagaaactaatgatcccatcaagatacagtacacccaaaatagatctgttatgggttccggatggagaatgccatcaataccgtggtatatggacaggccacagccaacgcaaaagatgccaacgcccgaaatcagcgaggaaacatatcgcatgttcatgtatccatatggatgatctatatcgggactctgagaggacttgtagatgccaaacgcgaggatgagctggttgattaagtcggccaaagaatggataacttctgcaaacatgctgtgagaaccgctgtacagccaacctcctgccttgaaaagcaaattggctgcattgctagaaggaacagatcttattcatagaaactttagtttcttaagtaatataactcacatagcgatggcggtggccaccacttgcccggacttctccgactcctttctgttgtcgagcattactttggttcgagatcccatttccctgcggtagtcacgcaaccgccgtttaacagtgaatagatctgcggagtcatagactttagcacccatattaaaggtagaacggacacaggacacaaaaacacttactctgctggtattgcttgcgctccacctcccgcttgagtcgctcccgcaacagattttccttggacccccacacttcgacggccttagcctccacatcccgtcgccagtagacagtcatgggtggctcctgctcgtacggcgatctccgcttgatcttgggcagactttcgagttgagcagcggtcaacaagaaatcgctgatggcccggttgggggtcacaaagttgcgctctagggaagcacgataatcgaatcggggtcgctttagaggaatcacaggcgctggaggcgttacctctgcaggtggggatgttcgaataccttctcccgccttttcagctagcacagcaccagacggagaatttttaggtgcgcttttcactgtttcaggaggattcataacagaaccagagctctctcccaatcctacagcaccagttgctactccagtagacgtagaacgtagattaatggcacttgcggccaaaaccggctctttcaccttcgttaccggtggcagatcggatttttcaaacacaatctcgttaattttggagtcctcgatggtggtgctgatagacaggatgccctttgtggtcttcacctcaaagtttttcgtttcctttggcttggcaactggaccagcggtggcctcctcctgcacaggtttttccttcttggaatcactgccattggcgctgcagcgaaactgaaggaacgtgcttggtcgcttccacggctgtagtttgaatgcctcgccgtcatgccgcctccaagggttcctgccgtcttgacgtaaggagcactggctaaaagcctttcccaagtgctggtgtcttcgctgcaggatctgcacgccgcgcaacagcatcctgcactggaaaggaatacatattaggcttatctcttccacacatatggtaatgcttacacggcgcgctgcgtcactatcgcactatagattccaatcagttcttttctattgtggggggtgctccgtggtttctcctctagcgcaaaactacgtcatgcgggccaaatggaacgggtgcaaaacgaattgcggttgtaactactccggatagggtcgctctgtggaatgctccaatcgttcctggggccacaatccttggagcgttgagggcgtacttgcaaatatgctttaaatatacattggcgattttttatactgaaaatttaaccatcaccggctggcgctttttgcctgtgctttggccgttgatgttgtggttttcttttcatgccgaaacagcttggtcacacttacagagcttatcaattgttctcactatgcagcattttgaagagtgggagacgcaaataaatacaaagatcgcaaatctaaaaattcgtaccatgaaagcatttattataattcttataaagcggcttatctttatatccatatacattgatattactattttatatatttggtcagaagaatgccgtaaaatgttaaagcagtgtgaacaaccgcggttattaaccgccttggtgtctttaatactgttatcgatagtggctttaagcttttgtcagcaccagcggcaacagctgttttctgccggtcgttttataatcagcttattgccttttcttgctttctttttatctgttttcaacgttaaaatgtcaatgttaataaaaagagcgtctggtttagctcgacagttagcccggccacttgttgcatcacgtaatttggcgtcggcagcgccctatggcgatggaactgaagttctcgtggagcgtttggatggagctcggcagggtatctcagttattggcctaaaccgaccagcagcaaagaattcctttagccggggaatggtggagaccttcaacgatgtcctggaagatataaagaaggataatggatcgagggtggttgtattgaggagtctgagccctggaatcttctgtgccggagcggatttgaaagagcgaaaaggttaatccttaaatattttacatccctgtgataaagctaacttatcttatacatatatcccaggcatgactcccgaggaagccaccgaatttgtaaaagagctcaggggactgcttattgccattgagcagctgcccatgccggtaatcgccgctgtggatggagctgctctcggcggaggtctggaaatggctctggcctgtgacatccggactgctgctagcgacacgaagatgggtctggtggaga

SEQ ID NO: 18659 - DNA, 2261 bp, DROSOPHILA
caaaaagcgccagccggtgatggttaaattttcagtataaaaaatcgccaatgtatatttaaagcatatttgcaagtacgccctcaacgctccaaggattgtggccccaggaacgattggagcattccacagagcgaccctatccggagtagttacaaccgcaattcgttttgcacccgttccatttggcccgcatgacgtagttttgcgctagaggagaaaccacggagcaccccccacaatagaaaagaactgattggaatctatagtgcgatagtgacgcagcgcgccgtatgctgttgcgcggcgtgcagatcctgcagcgaagacaccagcacttgggaaaggcttttagccagtgctccttacgtcaagacggcaggaacccttggaggcggcatgacggcgaggcattcaaactacagccgtggaagcgaccaagcacgttccttcagtttcgctgcagcgccaatggcagtgattccaagaaggaaaaacctgtgcaggaggaggccaccgctggtccagttgccaagccaaaggaaacgaaaaactttgaggtgaagaccacaaagggcatcctgtctatcagcaccaccatcgaggactccaaaattaacgagattgtgtttgaaaaatccgatctgccaccggtaacgaaggtgaaagagccggttttggccgcaagtgccattaatctacgttctacgtctactggagtagcaactggtgctgtaggattgggagagagctctggttctgttatgaatcctcctgaaacagtgaaaagcgcacctaaaaattctccgtctggtgctgtgctagctgaaaaggcgggagaaggtattcgaacatccccacctgcagaggtaacgcctccagcgcctgtgattcctctaaagcgaccccgattcgattatcgtgcttccctagagcgcaactttgtgacccccaaccgggccatcagcgatttcttgttgaccgctgctcaactcgaaagtctgcccaagatcaagcggagatcgccgtacgagcaggagccacccatgactgtctactggcgacgggatgtggaggctaaggccgtcgaagtgtgggggtccaaggaaaatctgttgcgggagcgactcaagcgggaggtggagcgcaagcaataccagcagaatctattcactgttaaacggcggttgcgtgactaccgcagggaaatgggatctcgaaccaaagtaatgctcgacaacagaaaggagtcggagaagtccgggcaagtggtggccaccgccatcgctatcaatgcagccaatttgcttttcaaggcaggaggttggctgtacagcggttctcacagcatgtttgcagaagttatccattctttggccgacttaatcaaccagctcatcctcgcgtttggcatctacaagtcctctcagagtcccgatatagatcatccatatggatacatgaacatgcgatatgtttcctcgctgatttcgggcgttggcatcttttgcgttggctgtggcctgtccatataccacggtattgatggcattctccatccggaacccataacagatctattttgggtgtactgtatcttgatgggatcattagtttctgagggagccacattggtggtggccattaatgagcttaagcgatcggctaaggaaaacaatatgtcctttaaggattatgtgatttctggcaaggatccgtgcgtgaatgtggtgctgtgtgaagacgctgcagcggtaactggcgttatggtggctgcagcttgcatgggattaagtagttacacaggatcgcccatcttcgacgccgctggttcactggttataggtgctcttctgggcgctgtggcctcttttattatttatacaaatgccaatgcgttggtggggatatccattgcttccgagcgcctagaaaagattaactctgctttggaggctgatgtaatgatcagagcgatttacgatgtcaagggaatcgatattggcaatgctcgggttcggtataaggctgagctcgactttgacggccgtgagctgacccgttcgtatctggacaaacaggatctcgcaaaactgctcacgacggttcgaggctttcaaaaggttgaggatctggagagctttctgctggatcaaggcgaaaacattgtggacctgatgggcggcgaaattgatcgcattgagatgaacttgcggacacaattcccggaaatacgccatgtggacctggaaatactctaa

SEQ ID NO: 18660 - protein, 655 aa, DROSOPHILA
MLLRGVQILQRRHQHLGKAFSQCSLRQDGRNPWRRHDGEAFKLQPWKRPSTFLQFRCSANGSDSKKEKPVQEEATAGPVAKPKETKNFEVKTTKGILSISTTIEDSKINEIVFEKSDLPPVTKVKEPVLAASAINLRSTSTGVATGAVGLGESSGSVMNPPETVKSAPKNSPSGAVLAEKAGEGIRTSPPAEVTPPAPVIPLKRPRFDYRASLERNFVTPNRAISDFLLTAAQLESLPKIKRRSPYEQEPPMTVYWRRDVEAKAVEVWGSKENLLRERLKREVERKQYQQNLFTVKRRLRDYRREMGSRTKVMLDNRKESEKSGQVVATAIAINAANLLFKAGGWLYSGSHSMFAEVIHSLADLINQLILAFGIYKSSQSPDIDHPYGYMNMRYVSSLISGVGIFCVGCGLSIYHGIDGILHPEPITDLFWVYCILMGSLVSEGATLVVAINELKRSAKENNMSFKDYVISGKDPCVNVVLCEDAAAVTGVMVAAACMGLSSYTGSPIFDAAGSLVIGALLGAVASFIIYTNANALVGISIASERLEKINSALEADVMIRAIYDVKGIDIGNARVRYKAELDFDGRELTRSYLDKQDLAKLLTTVRGFQKVEDLESFLLDQGENIVDLMGGEIDRIEMNLRTQFPEIRHVDLEIL

SEQ ID NO: 18661 - DNA, 3149 bp, DROSOPHILA
caacttgtgcagcttctggtcaatctgttggcgcagtgccaattgctcgcgctgctgggcctctagttgtgccgcagtcatctggtcagctttctggataaggagactttcattgcgttcccgcagcgccttttgttgcaactggtcgcgctggcgttcctccttcctttgctgcgtctctcgcgacaggcgcatggcgtcctgtttgtcccttatcgcctttagctgctggcggacacacctcttaccctcctcctccagttcccgcctaacaatgctagcgttgatagcctgtaggtcgggaaagcaagatatattaggctcaaaatctattttgggcagcaggggaatctcgttattgggctctggagctgggctttcttcgggtaatggtggctcaggtgtcttccgactgccctccacccatataggttcccgatcctcgcccaaagtcctgcccgtgcacgttgcggacgccagagccgcgttgcgcaacgtcgctgccatatttagacagtccatcgcccgcatcatgtcgtccatgctctaaaaggtctcgaatagcgccaatcacaacccagtgtcttaatacgattactacttttaatttcgaatatgtttttacactttttaatcaacaaaaatatagcataagactgccaactcaatttaatattactcgcattgggcggcaatcaggattccgttattgttaaggggatacggtcttacttacgaattgaaatgctttggtccagcgattccgaactcgaatttttaaaatatattattagtgcaaactttatttaacttacttttaagacagtatacataagtatacagtctatataatttgctttccactttatgataaaaccaaaattaacgattattcattcaatgcaagcaagagattcaatgaacaaatttgcgataccccagtaaacatggtatattttcgcgaatgtttcacggtctctctagtcaaaacaacacataaatgaggcgattaaataatttagtgactttcttcacagccataactgccttcttcttcggtagttttctcacaaagatactcagctccgtagaccaatgtccggcgcaccgcagcagaatcccccacctggagccgcacccgaacctcttcctcatggtgttggtgctaagcgcaccgcacaatgccgatgagaggaacgcgatgcggaggacctggttggcaaatgccggccaatccatcgcacagccctacctgcccgaggaactgatttatcttccgacattcaacgcccagggccacttgcaggtggagctggtggcggagcaggcgagccggctaaggcagtacacgaattggcagcaaagcctgctgacggaaggtcctccaaggaccaaaaggctgatcaccgtgaagcacgtattttccattggcacactagatttaagcagttccgcgctggcggagctggagaaggagcagaatcaaaacaacgatctcttgctgttgaaccgccaccatgacacatacaagaatcttaccgcgaagctcatgcagtccctgtatatcctgagacgccactacgagttctcgtatatgctgaaagtggacgacgatacctatgttaagctggacagtctagttaatacgctggtttcctacgatcgcaagttgctgcgcaagaggtcggagtatagggaccatgtgttgcctcagctttactggggctactttaacggccgatccacaattaaaacgaagggccagtggaaggagtctagttactaccttagcaaaaactacctgccgtatgcactgggcgggggatacgttctgtcccgaagtctgtgtgactacattgtcaataactcccaactgctatcgcactatgggtccgaggatgtctccgttggcacctggctcgccccactgcgccacgtctatcggtggcacgatcccagattcgacacctcctacgcaccgcgcaagtgtcggtcctatcacatggtgctgcacaaacgcaatgggcagatgatgagggacattcatgacggtgaactctgcagtggcattggttcgagtatattgtccgattactattacgattggacgagaacagcggacaaatgttgcgacagcttagtagcgtagtcgtgtggacaggctaaccagcgctcaactggccattctataggattttcctttccttcacgactagctaccacgactcagccggctgtgcagagctcctcgctatgctttgtatttgcagccgagcagcatcctccactgcgatggccaaaaaccaacactcgctttgcggctagtggggcacgtttgcatgcgtagaagtagtttgaaatgtcgagactgcaatggcaggtaataaaaaagtattaaagatgtacattttacaatactttactccattatgacataattcgggatgcgccacaagacaaggtaaacaattagaatggacacttagaagaacttaacgccgtggctgccgtccatctcgatcagctcacacctgcccttttcctccagcaaccggagggcactgagcagcaccgcctcgtccacgccgtaaaagtccaggtgagaggtgttctcgccggaggctatttcgtacagcgtgcagatggtgttcgtctggcccgtttcctgcacccagtcgtacaccatgttgccgtactcctcgagggtgaaccagtacacctgccactcctggcgtcgcttgtccagcggattcgcatgcccgctccgctccagctcgcccagaatggccaggacgagttccggcgagaggcggcgcttcagcgcttcgttgtggaacagcggcgagttctggtccccaatgctgagagtaaacctattcgtgtgcctgaggtatttgagaaagagatctgtccagaccttcagctgctgctgtctggtttcttcgtggggctgtagtctgaaacccgggtgttagtcgagtgatggagcatctcctggtcggaactcacgtaaagaagggtgggaaggtgtactcccagggccactggaactccgccatgctgattaactacgatctaaacatttgtttttccaatgtaagttattactaatggcctagagtgaccatatgcgctaaatagcaaaatac

SEQ ID NO: 18662 - DNA, 1149 bp, DROSOPHILA
atgaggcgattaaataatttagtgactttcttcacagccataactgccttcttcttcggtagttttctcacaaagatactcagctccgtagaccaatgtccggcgcaccgcagcagaatcccccacctggagccgcacccgaacctcttcctcatggtgttggtgctaagcgcaccgcacaatgccgatgagaggaacgcgatgcggaggacctggttggcaaatgccggccaatccatcgcacagccctacctgcccgaggaactgatttatcttccgacattcaacgcccagggccacttgcaggtggagctggtggcggagcaggcgagccggctaaggcagtacacgaattggcagcaaagcctgctgacggaaggtcctccaaggaccaaaaggctgatcaccgtgaagcacgtattttccattggcacactagatttaagcagttccgcgctggcggagctggagaaggagcagaatcaaaacaacgatctcttgctgttgaaccgccaccatgacacatacaagaatcttaccgcgaagctcatgcagtccctgtatatcctgagacgccactacgagttctcgtatatgctgaaagtggacgacgatacctatgttaagctggacagtctagttaatacgctggtttcctacgatcgcaagttgctgcgcaagaggtcggagtatagggaccatgtgttgcctcagctttactggggctactttaacggccgatccacaattaaaacgaagggccagtggaaggagtctagttactaccttagcaaaaactacctgccgtatgcactgggcgggggatacgttctgtcccgaagtctgtgtgactacattgtcaataactcccaactgctatcgcactatgggtccgaggatgtctccgttggcacctggctcgccccactgcgccacgtctatcggtggcacgatcccagattcgacacctcctacgcaccgcgcaagtgtcggtcctatcacatggtgctgcacaaacgcaatgggcagatgatgagggacattcatgacggtgaactctgcagtggcattggttcgagtatattgtccgattactattacgattggacgagaacagcggacaaatgttgcgacagcttagtagcgtag

SEQ ID NO: 18663 - protein, 382 aa, DROSOPHILA
MRRLNNLVTFFTAITAFFFGSFLTKILSSVDQCPAHRSRIPHLEPHPNLFLMVLVLSAPHNADERNAMRRTWLANAGQSIAQPYLPEELIYLPTFNAQGHLQVELVAEQASRLRQYTNWQQSLLTEGPPRTKRLITVKHVFSIGTLDLSSSALAELEKEQNQNNDLLLLNRHHDTYKNLTAKLMQSLYILRRHYEFSYMLKVDDDTYVKLDSLVNTLVSYDRKLLRKRSEYRDHVLPQLYWGYFNGRSTIKTKGQWKESSYYLSKNYLPYALGGGYVLSRSLCDYIVNNSQLLSHYGSEDVSVGTWLAPLRHVYRWHDPRFDTSYAPRKCRSYHMVLHKRNGQMMRDIHDGELCSGIGSSILSDYYYDWTRTADKCCDSLVA

SEQ ID NO: 18664 - DNA, 2507 bp, DROSOPHILA
tagcaccgcagtggtggtaaaataaaaccatattatccatgacctaattgttaactaaaatttatgagcgtaacccgttgcccgaaaaccatagccaggtgcattttgcatgtgagttatgggcagactgctttcaaattctgattgattagcatctcccaaactagggaaaaattagcgataatttgtgagagggtagggcaaatccattggccatttcacgcccagcgcacccaccaaacccaaagccacgcagcacgagccattccatccacttatctggatccacggcatggataaatctttgggcacagtgaatccattacggatttcgtaaaagtggtcgtcttacatacatacatacgaatttggtccgataagtgtgcgcaacttggtcgtggataattaatgaattaacacaaacacttaattactcaagggccggcagcgaagatccgcggtttcttgaatcgcgggaagtggagctgcagaagggggtcattcgaccaggtggcctgaacccggttggattcggtttcggtttcagtttcactcaaaacttttgttaatggaacccgctgtggaagccacctgaagtcgatataattgccggttgcaaacgttgctggctctcggctgtgaaatccaaaatgaactgccacatgtgatgtgtgatgtgatgagttcccccaagctccaccgcatccacaattatcatcaccatcaggtctaatggctgcacaccactttcctcactttcgttagcagatcaattcggattttctggggtataaaagcgccgggtcgaggttactgaggcatcaaacatagtttagctctttgggtcaaaccagcaaataaaccataaaccaaatctcaacctaagccaggcgaaaatgtcgaagatcgtaagtcaaaggagcaggagccccacgcatgagctccccaagggatataataacaattcatgtgattgcagaacgtcgttgtacttgtggccatgtccgtgctgctcggtgtccaggctcggccttccgattccccggatgcccatgccgagatccggagctttgtcaacgaactgaagcaggaggatggcatctacaattaccagttcgagacgtccaacgggattgcgcagcaggagcagggagtgggtggttactacgctagcggctcatcacagtactacacacccgagggccagctcatccagttgacctacacggcagatgagaacggattccagccgcagggcgagcacctgcccacgccccatcccattcccgaggcaatcctgaagtcgctggagtacaatcgcaaccacccggaggaggatggggagtacgagcaccacgaccatcaccatgaccaccatgagcatcaccagagccatggtcaggagcagggcaagcagtatctgcagccagccggtgctctgctcgcacctgcgtcatcgccagtgttgtctgtgggtcaggtcctgccctacgacaggaagctataatgctgcatccgtccattgcatccgtagcctccgcatccatcttgtccagctgtccatgttgttgcctgtctgtttgcatagtccatagaccatccaacatacggcatccagcatatatagtgcacatcaagcagcagaaagaaccatcggagcaactacatctggacgcggtgacacacccactcacacacacacacacacacacacacactgtatatatatgtaggaaccatcatacatttccatcaacatgctcccgggctcctcaaaggtccttcgtcctctgaccccggctccttctccattccgtgtccgttgtcggctcgactgacgttgacatttattgccagagataataataatgtaataaaagaaaaatacaatttaatatgcttgtttatactatgagtgcctgtgccgagacgagagcatatggccgtgcctgaagccattgcacaggaaaaaaaatatgccgactacgcggtgaataaatcatatctgtggcacagtgattcaaaaatatttaaaaagaaaaacgccgggggtggggagtaccctctacagtgtgagcaatatcaattttggcaaaaactttaagggacttccccttcgccagctaattgtgacggatttgcttacaagcgtgagaaaccagtttaattttcatttaggcattaatatttctctctgtgtcaatgccatcgcatcgcccacatgcatcatcgcagcagctaaccccttgagtttttcctacaagtgtgcagatctgggttcagtattatctatatataaattcagaccggaggaagttcaatcagaaattaataaatgcacgctggtatttgttgctgctcgggagttttgtattatgcaaattggcattggcccttcgattccaagttgattcgcgtctcgagccgaagaaatgttgtaacttcaatcatcattgttgggttgattaaattaacaagttgtagttgttgttgccaatctcgatggc

SEQ ID NO: 18665 - DNA, 507 bp, DROSOPHILA
atgtccgtgctgctcggtgtccaggctcggccttccgattccccggatgcccatgccgagatccggagctttgtcaacgaactgaagcaggaggatggcatctacaattaccagttcgagacgtccaacgggattgcgcagcaggagcagggagtgggtggttactacgctagcggctcatcacagtactacacacccgagggccagctcatccagttgacctacacggcagatgagaacggattccagccgcagggcgagcacctgcccacgccccatcccattcccgaggcaatcctgaagtcgctggagtacaatcgcaaccacccggaggaggatggggagtacgagcaccacgaccatcaccatgaccaccatgagcatcaccagagccatggtcaggagcagggcaagcagtatctgcagccagccggtgctctgctcgcacctgcgtcatcgccagtgttgtctgtgggtcaggtcctgccctacgacaggaagctataa

SEQ ID NO: 18666 - protein, 168 aa, DROSOPHILA
MSVLLGVQARPSDSPDAHAEIRSFVNELKQEDGIYNYQFETSNGIAQQEQGVGGYYASGSSQYYTPEGQLIQLTYTADENGFQPQGEHLPTPHPIPEAILKSLEYNRNHPEEDGEYEHHDHHHDHHEHHQSHGQEQGKQYLQPAGALLAPASSPVLSVGQVLPYDRKL

SEQ ID NO: 18667 - DNA, 17741 bp, DROSOPHILA
accgcaagtcttacgtcgtcatcatcgctggacaaaagtcagttgacttcattgaagtgccctacgatttgatttgctagccacgtgagaagcgccatatctgataagctggccgattagatggaaggttcgaaatacgaaaatcgtctcatagaggggaccgtatcgataaggatttatacacgcttagcattaacttattcgcctttcatatctacaatacgtctgattgtttccaggaaacgataatttcattggcgaacataagaggtgcacggtatagcattagtcatcaatgttctcattgatcacatattaaaaaaaaaaacacacagatgatacaacctgtgacctgtcaacgtttcggtaaaagtttatgacacaaagtgtataaattgacagaacaatataactattaatgtgcagcgccatgaaaatatctcccaagactttatgttgataacttcacagaattatgacttattaagtgaaacggcttttatattggtatttttattttctttattgttttacttttattctgcatataatattacttcatcttcttcttaattcgttttttctcttggatttgtatgtcgcctcattgcactaaaaatgtttgttgccctctctttctacgccgtgttggcgatacctattgccacctcgctctaacgcacttaaacgcaaaattatacaaatatgtaaaaagaaattgaacaaacacgcacgttgaaaaaaaaacacataaacaaaggcgtcttacaattactcgcaaaaaaatttatagtaaatataaaattagtttctctgtttttctcgacttcttttgtttctgaatattccccattcctgatcttcgttcgttatctttctttaggcaacgcgtttatggaaaaatatatcgatttatgtaaatttatatgttatgtatatagacgcatatcgtaatcgtatataaatatatatgtatatatattacagagttaattgttttcgtcgcaatgttaatattataattctttcttaatcctgcacaagtcgctttttttttctttcttttgtttcaccattcttttcttttaaggattttaagcggaacaagctaaacctttatttataaaataaggttacagttgtataattaatcaattgttaaacaaaactaattaagaaacaccccgccgggctcgaaaacagatgtgcgacactctaaaatctgtttgcttaattacaatagggggaaactcatactcaattatataatatataaatatataataaaaaaattacaaaaagtaattgaaataaaaaaaaaacacaaaaatgtattggtagcgcaggaaggaacgcaatcgaatagagttattagtaattagcgaatacgacaaatttacgtagttcccactctgttcttccctttcaaaatcccatccttttgtttatgtataaatgagttgtggctatggcgcctaattgctgttgttggcggagctgttgtggttgttctggtccacactgtccatgttgggcacgtagtcgagggccatcatgcaggcgaaaacggtcatcaccattttcggcttcacctcggtgatgtcctcgggcagggcgtagacacgggcgccgatcttgcgggccatggagatggcatacttggcattggccaggttatcctgcggaatcaataagcgctagtttagtctgccacatatcatgacatagtcaggactcacctcctgtgttccgctagtgcgcaccaactcgtagttaatgctgccctccttgatggcatcgatcagatcgatcacgatcttgccatcggcgatggccggatcgttgaagttacgcagctgcgactgtttgcctgcctccgacagtcggttattcacccactggacgatctccttctcgataatggggttgccagtgttggccaagcgggacagaatggacagggtgtaggcacgcataagctgccagatgagagctgtaaccataagatagttcagaattggtaacatccaaaaatacaattagaatagcaatgcttacccaacgtcagcgtggcattgccatcgtttagatcctggcctgcgattccgaccagcgagaatttgagctgcttgcccagatccaccgcatagttgcagttctccagcttttccatgaacttgcgcagcgggctgaaacgcttgtgcacacggctccagttgacaatacccggcttgatgacgtcgaacagctggaaaatgaccagaccatcggccaaatcggagtaaagccagttcacgtgcggtgccacgcccattgagttcatccaattgcggtaggctagatagaaaaatagaaatgattggtgtaagttaaatattttccaaatatgtatataacacctgagtattataattctaagtaatcgtattcttataagtacacatatattattgtattatattcttatattcttcttgtgataaatggtcttgcgagctaaaaattcccggtttttatggcttgcacttcttgtgcaaagccgattgataaacatatatatttataattgctttaattatgctatataagtggcagttgatatctacattttttttataagaaaccctggatttttcctgatcaactttgatttcttgtgtttaattttcaattaaataaaaacggtattttgtaccgatcttacgtatggctaaatattaagtacttactcttctcttcgcgcgtctcctcaatggactcgagtccctcgatctgctcgggcttgtccaatcctggatggttgttgaacagattagccacgaaggctagattgagtttgtagactccgttgacgacatcctgtggcgtgaggaagctgcggcagttgagcttggcggcctgctgcaacatgatctccgcgcgcgactgcagatcggattcccgcagggcatccagattgacatcagcatcattgccggcaatttgcttcagcaaatgcgaatagatctcagaatcgacgatgtccgactggaagttggtgcaccgcctcgagatgccggctcgctccaaatgatggttgacccaacgcaaaaggatggcctccggcgacatcttcatcagatcctcgagacgttcgttgtcgaagagtaggccagccaatcccggacagctgtccagggtgatgtggctaaacagaccgatgcggatgatctgccagagaagacccagcaccagatgtggcttgcccttggccagatcgtgggcatcgatgtttacgatgttgcatccaatcgcctgggaggaaaccaaggccagggtcaagttctcaaactcccggtagacggtgaggttcttcttgttgatcgcacgctcatcgattgtgtccgggcaggagtggttgataattttgcacagcagaataccatccttgatgctcagatacaagcgcttgccctcgctatcgatgggcagcagatgttgcagatccttgtcgtggcccagattcgagttaatccagtcggagaaggccagctgctcctcgaggcgcaccgaatgggtggtgccctccgacgaaatgctcgacatgccgcccagggtctccaagttctccttcttggagacgaccgtcttgaatgtgctggccacatccttgctcttcaggtccaggcacagtgcctcgaactcctccagattcaatttgccctggaaggcagtcagctgtttgcccttgtactcgtcaatcatttcgcgcacctggtagccggccagcttgaagcccacctggttgagggcatcctttagctcgtgcagatcgatgaagccatctttgttggcatccaactacaagaaggagagggattttaattagtattggtttaaaacaatttgcaaaaactattagatctagacagttttcattaacattggcataaacattattgacctttcctgaggcataaacttaatttctggccttctcggaactcaaaatgacttaaggggcacaccaatacaaattgaatacaggaaagatccatgagtaatccccggtcatgagtaagttgtccgccgcctattgccacgatcgatctgtgagtcatcaatcaaatccgaaagccaaacacacagccgcattccagtgcctgttttatctgcggaattcggaatgcaaaatgctatattccatctcccgcaaccttatcgctatattgtctgtgtgccagccttatcgaatttaatttccatttttcagttttcagttcgaggggtcttatctcccacctgactgacatatcgctgattatcgaaaattgttcgcttcaatttatacagttcaaaagcgtgagtgggcgccacagaaaataagagaaaatatacaaaaaaaaaaaaaaaaaagaactaaagaagtgaaagcctgaacgaatgaatcagtttgtaaacacttgagattcggacccgacttgattatttcttgcaaagtttaatgactaagaggtggccactttaaatactaattttaatctagctgggattcctttaacagatttacatataagagctatataattaaacagtccagtcaattcgatatattattatatgggtttcaccactttacttagatttattagtcatatttaatggtttaaacgcgatttttggtcaaaatgcttgaaataatttagattagataagcttttattgttggcatcgaagggaaatatttatgtttatggtttaagttgttacaaaatgaaaaattaaattaacaaatgcgaacccgtttgtttaaaactataatagcattgaaaacggtggctgatctatgttgcagtgtatactatctttttaaacttactgagaactaacctaactcaataatattaaggttaaattatttggaaacataacattttaacgtgtaataatgtattataagtactttttcttaataaaatataataattttggaatatgttttgaaaatattcccagctgatatgtttaatattccacataaaatcatattgtagcttagtcctcaactatgccacagtttaataagcttgaagttagttagttttgctccaaattgttgcgatttccatgggtaccccccaattcgaaatatcgaaattggtgaaaacccaagtattcagccggacggtataataaaacgttcgacattttcgccatattcggtgtgcgaaataggacaaatctgaggggaaaaggggcagttggatcggctgatatactggactgtggaatttatggctcactggttggtaactcggtttagtagtggtgcgttgattgctccgcttttgctgtttgtcgataagataaatttctgtgcgccaaaaaatgaacataaaaaatcgaaagcagcacacgattacgtgtatggtaatgatatgataggtggttcacgggttttcgcggggggaaaaccgttaagccaacgagggtgttgtccttggccaaaagagagactatcaagcggactgatagctgggatattcttttggccaacatttgactgacatcgaacggaagtgattctgattttcgccataatttcggggggaggtctgtagtgggtcagtttgaagcgcgtgcactttatcggaggtgttcactgtaaaggcccctcttattggcattgggtattggtatgcgtggcacctgtcggtgttatcgattaaaaagctataaagtgctccgagaaaagttgatagggcagaaaaataaagagggcgaaaaaaaaacacagacacaccaaaatcgagagggagtgattacgtgaattgtgggtcataaaaaattcaaaattagcgttttaaaggctgttcaactcaagactctcaatttaaaaacgaagttttttttaagtatgtgaggaatttaaaaattaacatccgtattcaatttttcaaagatgctttaatgcgatatcttccttatatgcgttcctaattgcatatttttgtatggtatagttgtttgctttagcggttatccactgtagtcgagaccgtggcgccacctacgttgggaatgagctcctcgagattctgcttgaactcctgaaccgtttggtgctgctccacgttgagaatatcggccattattccaatgtatgtttgcacgcggaattaattttattatttacgatattccttctggttttcgttgcgaaaacaaacaaacaacaaaaaattaattgatttgcacacagtaagtacacaacacacgcacaaacgcgtcagaaagagagtgggtggtgcgcgagcggaagagatctccaattgatcgggagagagcgaaagaaagtcggcgcgagagagccaaggatgcgagctttaattaaatatttcttgtaactactccttgctttcttcctcgttcttcgttcttctttcttttttggctgattcgctttccacgggctattgttgagtactaattgagtggttcagtggaacggactatttatgccttttcttttatcacaaaaaaacagaggcaaaaaacagcactccaatcgaacggagccttatcagtaaatgagagagtaaaagaggggagaagccgtgcaaagagaggcagacgaacacctttagaaaacgcgtcatcctgtatcgctaaaaaaaaactatgataaaaagttacttagtttcaaaaacggcaaagtaaaaggttcagtaaatgtgcagaaatcatctataaagaaacattgttaggtatatattttaattttctcctggaagggacaagatccagttccctccttactttatttctttcaatgatattagccattctcttttgctctctcccaggtgcaacaatacagcagggttgccaagtcgccataaaatgcggggtgattataacatacaaacagcaacatatcgcagcataatttaaaatatttatttcgtaatctcttatttgtttatcattttttacatgtgaataaatcgttaaactgtacaccatgaatgtacaaacgtgacgtagatcaagtgattcagcttataagaaattatgcaagctgtatgaatcgttgcctggatagttaaatttagttttagttcatatttcagttgattcacttgtcaattttcggtctctagcgtgacgtggcagccctattcgcaacactctcaaaagtccgaaatcgctttcaacaaattgcttacgcatcgaaaagttttcgtttaaatgcaatactacttggcgggtgaacttatagagagataatgggaaaatgagtgtaaaaagtacctgagagagggacacggtatttaaacgtaattggttttttaatagccattatatcagcgagggaattatgtggcaattgtcatttcggttaggttataacttgtacaacataaatctaattccagccaagataataaaagttcgaagcgcgataagacaaggaaatgcgacaataaacgtttagaacttccttcgaacataaaaaccagggggttaacgtaaaactttaaaggatcttgtgttcagaaaaagtcctcaagactgccaaaatatcttaaaaaaaataagctttgcagataataaaaatcgaatagtttaagagcacactttccccagtgtagttatgcacagtggccagtagtgttatcgatcagttactcgcgatgactaatcgctggacatacaaaggcttttgttgtttgcttgtaagtgtcgccgctcctcgatcgaccgatatttcgaattaaagagaataagcccagctgagcaaacgcatcttttgttataaaacagttgttgttacataatactatccacaagtttgagcaagagcagctgggcttagtcctataggtaatgctatcagattggttgcaatcgaaaatgttgtgctaagtacatatatacatatttatattacaatatatctgatatatgtatgtaaatctatcggtcgttaacctttctaaacagtttactgtttcccctcgataattactccaaattgcaataatttaacaaatatttacctcataagatgagtttattgtacttcaattcacaaaatatattgcacttaattagcacctgtagtacgcctaccatttcattgattggaacgcgttcatttacacatttaaatttgttaaaagccactttcaagtatcttatttactggcagtaagaaatcaaacaccagaaccgcacacgcctgaccccaagcaactttctacgggttcacttttggtgtcaccgatgtttgccaacccttcacctatgtacactcgaaaaaaagggcattaaacagcaatttgtttttattttatatacttatatgtagttttcctataaagattatattattttagttatggtttgagatcctgaaaaaagtcataaattaaaaaccttttttatctaatagctagttttatttgtccaagtgtaagatttctttttttttacccagaagagaacctaggcggcaatcataattatgacaaacaacgcgcgaaatttttgttaatgaacgtttttccttgtattttgttgtttattttttcagtttgttgtttttatttttttcgagcgtcaatgtttgcgccgctattcggagcttagtcactgtcatttaaaggcaatttacggcaaatgaagttcattagcagcggcgaaaaattcgagaaagaagcaaaaacaaaatgctaagcggtctttatagtttttaaagttttgtttgccgcggcttttagggggaaaaatgtttgagtgacgtaattgtagatgtcacctggccgagaaaacggaaaacatcaagtatttgtgccacttttttcgctttcgttgaaccggttttcgagtccaaaaactgtcatttcgtatgcccggcacgacaattggaattagcctagcttttgcatatcaagtaatgccgtgcgatagtgcaactacggttttttaattccccaccccttcatcaccttccccacgcttcacaatccaacccattccacccacttattcagtgtgtcgcgacctcgacaacaaaggcagcattacatcaacatcagcagcaacaataaaaagcatacacaaataaacagcaacaatacaacgcgcgctgattaaacgtgagtcaacaacgttcagcattcgaaacatgttaatcagcattgtttgatagatatactcataccgctttatgcatacgacgagtataagacccccaaaagtacccacaaagtacccaagtgcgcccctcctttgaccccgctgctgccctggaggtcgaagtgggctataagaagtggctgttcgaatcgaatcgaatacagtcaagggaaatcaattgaacaaaaattaataatgcgcccatgcctatgccgatgttggcgataataatgatgatatgctagatagttgtttaccgttgcacggccgtaaaaaagaccaccaatagatactttacgagcgtgcaccccacaaaagtggaaacatattctatattatatttatttcagcacaaaaagattaaactgatgatttttcgtatacgtgcatttttgagatacaattaaagcaataacgatcttaacaaagcaaaataccactgatctactaaataattttgaactctgtgaagatcttataatataaatatttatccgaatattatcattttgcataactttcacgaatttagtttgaattgtcttattttatacaacttgtttggtttaagtcttttgattatactagagaatcgatcttatgtagttatccttgtatgcaaagaataaaaaaaaaaaactttttagccttctgaaatctttaaaatcataccatatcccattttacgatcactaccgattactgaagattgcaaatcaagctgcatcaaagttcgaatatacttcgaatgcttctttcccaaataagcaacactgttcaaaacttttgtcgcctggcgtgtcaatcggtgtcagtgcgttacttttcgtttctcttggcgttgttgtggttttttttttgtatctgctgctgtttttctggttgtttgccggtcgttgttcgcattcaactttttaatactttttttttcgactttgtcgcagtcaattgaaatttgtaacacgtagagtaaattttgagtcttcgcttgtctgcgattactcgcaactttgagtgtagtaaatatttctgtagaaatttgcacagtgtccagccagcgcacgcataaaaaaaaaacctgttaagtaaattgtataataaaataaagcagtgacacatatccgccaactagacggagagtcccttaccaagttgtgggcgtggaccggagaagacagttagccggtaaaataatagtaatgctggttgaggtcgaggtctttatgagatgtttttagccacagggcgtaacgaaaaacttcgcatgtaaagtgtcatcaaataaaattgaagtcttctagtcttcacaaataataaatattaggtaataaaatatatttgaaaacttagcagcatatctttgagaaatcgtgatgcatgctatgggtttcttaacaaagaatacattttatacgatatatagcttatttactatacctaaatatacttcgaatttctcaaaagtgaagaacagtttacttttttataaacgtttttagaatttctttattatctgacctgagtttttttttttttttttggttactattttcttatcctctactatatgtacgtacaaatttcagatccgcttccttttgccacagagactcgccctgccgactgattacactttcgcgagtgatatataatatgggtattagtcaggggcgaggataaattaccagggatgagtcataaaggccacttgccaattaggcgagcgaacaccctcaatggattgaaacagacgccacagcatatcgtatgaaacagtctttgataaattaagtgggcttgaatttaagtttcgctttcctttaaaagtttcttggcctaacaaaaatacgaggaactatttaaatgtcacacaaaaactgggatgaaacacaacagacgattaacgagattcttgcaaatataacatattaactattttatgttccttcccaaatagatctttcttgaattaatgttcttttcagaaattttccaacaagagagtgaattttttgcagtgccctgcttattgaagtgcatcacattgtggccactcaattgtgccgctaaagaaacgtttagttcggctaatgaactagttccccgcgctccgttatgggtgttaattgtattggccgcgcccgaatgatttcccacaaacaaacaaaacagtgtttcgtcaagtgtatagagcacgcgactaccactacgagcgatctgtgaaagtcaactctgcacttcattatgacaaatttacagttaatcagcgacacaaaaagcactgtggaaaatgcgcagggggaatatgtggaaaaagggggaaaaggcaagcagtaacactctggtaaatattggaaatgaggcactaaatcatccgtgtctctatttacaatacccgtatccatatccatatcccccgtttttccctctcccttcccctttccttctgacaagtgccaagtgaaaaccgaaaatggcaaaaactgataaaaagaaatgacaaacaatccgacgctgcccccaaaaggtaaccggccagagttcaacaaacctggcacgcaaaaaaaaaacaactcgaaaacaacgagggaaggcgcccaaaaatggtatccggaatttgaatacccttaaggagagaattccattagaatcggtcatctattcgaggttttgtacattatgatattcctgcactataattctttgtacatccatacatacattatttattttatgtaagttactacacatagcaaaaaagttgtaacatttaaattactccaagcaagggtattaaaacgaaaggaaatgcagtgcgtcgacttgagaaaaaggactaccaaataagaaagagaaaaagtggtaaagtgagggagaggttgtctttatgcagctgcaacttatcgcacataaaatgcaatcaacgcattacgaacactttcactcttgatagccatgcacagtgtaactatgcggatttccaaaacaaatgatataatactgtcattttacacaagtgtcttttcacagtttggtgagcaaatttgtgttgatttaatacgcaaattcttaaaacgacattttaaatggctctcaaataattcccaacattcgatttgtttgcttcccaatcacgtaacacttacgtgtcccacggactttataagcacacaatcttcggatcgaatgatatcatcgctgtttgatcacgacccactgtgcggcacgacttttgatggacactgtgtgccggttgtatgttcgggtattcaaaactctttggcatgtgcattaaaatgacaatgaaattaaaaacgaaataaataaagaaagcgtttttagcgctaagtgcccgagtagcctgcactcaaaatgcacttgagagggccccaaacaatgttgataaaagccaagctgcagcaacatccccaagaataatatacatattcggaaaagacaataataagtgttgttttttgtgtgaatgggaacaccctagtaaaagcaggaaaaaaaaaacgccgggagagaaaaaacagcagcagccgaaagacctaataaacgcagccaaatgaattatgtgcctgtccatcaacttttgaaaagagcaacatgcaatgcaacaaaggcggcacacacttgcgctcaagataatagcatccataaatcgaggaataggaaaagtgtaaaatcgaacataactgcagtttaatgccaagagatttggactctcaatgcggcttactcataaatctgctataaattgcgtaatgtattcatcgaaacgctttaatttctaccgtcattgtttatcaagtatgcaagctcgataaaccataaaaacacattgcatatctccttcacatcggggcactcaaaatgcggggctttgcggcaattaacactgacactcccacgcagaagcagaaaccgaaacagaaacaaaaacactggaagaatgggaaagaaacacagaaactcgagacgaaaacgaaagacaaacaaaagcagcgctttgtatgtgggtgtggcaacactgtcttgctgcttgacaagagcaaatggcaacaatgtgccactcatatgcgataggcaataatcctgaatccggatcctcaatactctgaaccataatgcttttgcgtttagattgcaacataaatattaaagtatttaatttaaatttaaatcgccatataccgattagatggaaggggaaaccgctgtattgccgccagcaatttcaacaatatcaaatagagtccccgtgggataaacaagtgtgtttaccataatttcaatatcataattaggcagcctttattcagtgaataaaaagagcgcggaattgttcattcggatattacaatttttcccttgatctgaggcatacggtattagtcatcgcagcatccaacaacaatagtggaacaacgaaaacagatttcagctttcaagtgtcaatcagtgcagcgattgttcgccgcccacacaactcccacccattgtatgtattgtgcctggttcagtagtgtttatcctgatctcgtttggaatcagcttcttgcaaaccgttctgttggccacgcggatccattggagttccaagcacaatggacccacattgttcgaccgattaacggccaaagacgcgtgcgacggcagtcgacttaaatggtacactgagataaaatgtggtgttatttagtaatgcgaatttatcaatgagatgatacttttaattttaaattttatatttaacgaagaggttttcaagacaagattagattcttttttttttgcctgcattccgttttcgttggcagttgcaatcaagcatggttttttttttatgtcttccagcatatatggattttatggcctgcactcgaagcaattgcagcgtgggcgtttattatattcctctttttttggtttcggaattgccgggaattacgagctcagcgaaaagccaaatgccaaatgcagagcgggattcgagcagtcgggcgagcgaaaatcagcaagaaacaattgtaaactattaagtgtgtgcataaaattgaacgaaaattgctcgactccggttgccccctgaaccaaggtgacgaatgcacagtgggtcaaaaactacgaattgtaggtatcgaatgttgcttgattgcgaagttcactgcaatagtgttagtacttatgcatgtatataatgaatagcaatgctcaaaactataaatgtaacatagtaataacaagattgaatgatattcaatgaaaccgaataagcactcctattgtcggcaataccgatgtatggtttttgaattcatttcgtagggccaaccgccggcgacccactgtgcgacttgtcttgcgtttgagagcagatatctgaatctgaattgaagctgcgaccgagctgagacgtagtttttcacgctctcccggtgacggggcttgtatatatgtgccctggcctgtgatttttatatttatttttagtttaagcagaaactggttttcatgctattccactccgccccctgcgaaccccaccaaaaaaaaggggtggcagtagagcgacttttacgtggtgtcatggtatggaaataaatgcacgttatacgctaactttataccgctggccttgcccaaatattattctcgcgaaattcgcaagaaagattcgttcgtcaagtgaaagatgatggttggttggttggtgtcaacattgttgtgttattttttagtttgcttttagcattagtcactatgggggatgggcagcgacgccgactgcggcattgaacttgcgtttctccacgcatgcgctgcccttatactcgtaatgatttcgttttgggctttgcagttgcagagggctccacccaaaaaataagacaaaaaagtgttttcttctgtaaacattcgaaggaaattctcgatgcacgataagaaatatttgcatactttatcgaggcggtgacaagacaaagtaatgtgtctactgtggatgtcggcttggtttatctagtttcgtttttacggtacatggctcagacagtttgataagtgcaatattcgtcaacagcttttgcattccaatttaccacaatacacaatacacataaagaaatcaaaaacaaaattcactttatagtacaaattaaagtaattttttcctcttgcttctcgtactcttgataacgactctccactgtgcgaagagcgggagataagagatgcgggaaagggaaacttgtttgctcatctgctgtcccctcccacccacatccacgcacgcgcccctctccctcgcactggcatatgcagcagcgggcgcagcgcattaaccgttagctagcgatgcttgtctttgcttcttttcacggtcttttccagtggcggatcaaggggggattttgaagggctaaaggactaagttactctcgtaagtgtaatgcaaaatttgatctctgttcttgtacgatttcctcttctcctgtccaacattcgtgccagctgattaagttaagttttagttttacaattcccaatttaattaacttcttgctggttctgcttctttgtcgattaaaaactaagcaagaacatgaactaaaatcggagtggtaagaccctttcaaagtccgactctgttcttctcctgctcctgctgcccccgccactgcttcttcttcgcttaagtccacttcatggggggttgctttgcactgttgaaggccagccgcgctgtcggctgcgcagccggcgttggcgtcagcgtcgctgctccccattgtcaacgccgacgcccacatgcaccgcttaacggttttcttcctgcgcctcatgcgtgcgtgtgtgtgtgagtcattcaatttgaatttcaacaatttgccacctatgactcttattgattgaatgttgctattgccattgctaaaaccatttcgttttgctgctctttttgtcatctcacctctatgaatttctccttgatctccgccttttcatcaatggacagcgtttttgtgaatttgttaagtgttgccattttcgctgccgatgtgtgtgtggtgtgctgctgctgcttttcttcttgactttcttaattatttataactgacgccgctgattggtaattattttaaataaattatccgtttataatcaatttcactttgtcgccgttttcgcagtcggcgattttcttctttttgctcctcttcttttttgttttaccgcgcgctccttttcctatacgtatctatgtatttgtgcgtttctgtgctaatattcttaaacttcttttacttttttcttaacttttcacccatacacactcgttgctggttttgtttgttgctggtttttaccaaaaaaaaaaagatgaagccagatttaaagcctccgtgttgttatttacaacgtcaaccgagcaaattttgttttcaaacgttatttagcacgtctgaattcggaatcgaccggtttgctgtgcgtgcgaagcgcttttgttagatgtttaacaacaaacagaaaactaaattgcaggttgtattgtgagaaatgaaagaagacaacggagcgaaaacagtgtgcccgttttggaatttgaaaaacctacaaaaatacggtggtacttaccgcgatatttccaaaactgagcacagtattccatttgaacttaaattttcgatagaattgaaatacctcttaatgtcataatagacagcacattgtttttcttcaagtttaaatatagttaatttaagcttggaagagaatttaaaaaaagcttaaagctgcttatgctaagttatgtgcgcaaatttattttttttacattttacatgtgcgtagaatttccgttgttgagttagcagcaattgaagaacgttggaatttgaattatggggacgttttttattcagttatttttctttattaggaggtgaattcgaaaaagatatttctttatctctttctttgacgcacatcatattacaatgttaacaaacataaacgtttagtatttttccgctatcgggtagtatttcgcggtcggctcgccacggttcctcttcttttgtctaaaagaatagaatcgcctggtcacaccgcagggtccagtattgttgcctttttattttattcccgcatttcttcgctttgaagcgatcgcttttcggctttctttgaggtcacaggtcacgccagcggacgctggaagccgaaacgccccccgcctcgcccccttggccatggtgaccgtcgctgttgttgtttttgtcgccctttaaaaccagctgctgcatctgtgtgtgcgcgcgtgcttgcgagtatttccaaccaagcgtgcgtcggtgtgcgtgcgtgtacaagtgctgaaacaacaacaaaagcgtaaaacgcattttcatttgattgcgattttgatttgatatattaattacagaaagaaagggggagaaagcaaacaaaggagacaaactgtgagagaaagacagagcgagatcaagacagtgagcgagatggatgtggaggagaactacgaa

SEQ ID NO: 18668 - DNA, 2902 bp, DROSOPHILA
caacctgcaatttagttttctgtttgttgttaaacatctaacaaaagcgcttcgcacgcacagcaaaccggtcgattccgaattcagacgtgctaaataacgtttgaaaacaaaatttgctcggttgacgttgtaaataacaacacggaggctttaaatctggcttcatctttttttttttggtaaaaaccagcaacaaacaaaaccagcaacgagtgtgtatgggtgaaaagttaagaaaaaagtaaaagaagtttaagaatattagcacagaaacgcacaaatacatagatacgtataggaaaaggagcgcgcggtaaaacaaaaaagaagaggagcaaaaagaagaaaatcgccgactgcgaaaacggcgacaaagtgaaattgattataaacggataatttatttaaaataattaccaatcagcggcgtcagttataaataattaagaaagtcaagaagaaaagcagcagcagcacaccacacacacatcggcagcgaaaatggcaacacttaacaaattcacaaaaacgctgtccattgatgaaaaggcggagatcaaggagaaattcatagagttggatgccaacaaagatggcttcatcgatctgcacgagctaaaggatgccctcaaccaggtgggcttcaagctggccggctaccaggtgcgcgaaatgattgacgagtacaagggcaaacagctgactgccttccagggcaaattgaatctggaggagttcgaggcactgtgcctggacctgaagagcaaggatgtggccagcacattcaagacggtcgtctccaagaaggagaacttggagaccctgggcggcatgtcgagcatttcgtcggagggcaccacccattcggtgcgcctcgaggagcagctggccttctccgactggattaactcgaatctgggccacgacaaggatctgcaacatctgctgcccatcgatagcgagggcaagcgcttgtatctgagcatcaaggatggtattctgctgtgcaaaattatcaaccactcctgcccggacacaatcgatgagcgtgcgatcaacaagaagaacctcaccgtctaccgggagtttgagaacttgaccctggccttggtttcctcccaggcgattggatgcaacatcgtaaacatcgatgcccacgatctggccaagggcaagccacatctggtgctgggtcttctctggcagatcatccgcatcggtctgtttagccacatcaccctggacagctgtccgggattggctggcctactcttcgacaacgaacgtctcgaggatctgatgaagatgtcgccggaggccatccttttgcgttgggtcaaccatcatttggagcgagccggcatctcgaggcggtgcaccaacttccagtcggacatcgtcgattctgagatctattcgcatttgctgaagcaaattgccggcaatgatgctgatgtcaatctggatgccctgcgggaatccgatctgcagtcgcgcgcggagatcatgttgcagcaggccgccaagctcaactgccgcagcttcctcacgccacaggatgtcgtcaacggagtctacaaactcaatctagccttcgtggctaatctgttcaacaaccatccaggattggacaagcccgagcagatcgagggactcgagtccattgaggagacgcgcgaagagaagacctaccgcaattggatgaactcaatgggcgtggcaccgcacgtgaactggctttactccgatttggccgatggtctggtcattttccagctgttcgacgtcatcaagccgggtattgtcaactggagccgtgtgcacaagcgtttcagcccgctgcgcaagttcatggaaaagctggagaactgcaactatgcggtggatctgggcaagcagctcaaattctcgctggtcggaatcgcaggccaggatctaaacgatggcaatgccacgctgacgttggctctcatctggcagcttatgcgtgcctacaccctgtccattctgtcccgcttggccaacactggcaaccccattatcgagaaggagatcgtccagtgggtgaataaccgactgtcggaggcaggcaaacagtcgcagctgcgtaacttcaacgatccggccatcgccgatggcaagatcgtgatcgatctgatcgatgccatcaaggagggcagcattaactacgagttggtgcgcactagcggaacacaggaggataacctggccaatgccaagtatgccatctccatggcccgcaagatcggcgcccgtgtctacgccctgcccgaggacatcaccgaggtgaagccgaaaatggtgatgaccgttttcgcctgcatgatggccctcgactacgtgcccaacatggacagtgtggaccagaacaaccacaacagctccgccaacaacagcaattaggcgccatagccacaactcatttatacataaacaaaaggatgggattttgaaagggaagaacagagtgggaactacgtaaatttgtcgtattcgctaattactaataactctattcgattgcgttccttcctgcgctaccaatacatttttgtgttttttttttatttcaattactttttgtaatttttttattatatatttatatattatataattgagtatgagtttccccctattgtaattaagcaaacagattttagagtgtcgcacatctgttttcgagcccggcggggtgtttcttaattagttttgtttaacaattgattaattatacaactgtaaccttattttataaataaaggtttagcttgttccgcttaaaatccttaaaagaaaagaatggtgaaacaaaagaaagaaaaaaaaagcgacttgtgcaggattaagaaagaattataatattaacattgcgacg

SEQ ID NO: 18669 - protein, 640 aa, DROSOPHILA
MATLNKFTKTLSIDEKAEIKEKFIELDANKDGFIDLHELKDALNQVGFKLAGYQVREMIDEYKGKQLTAFQGKLNLEEFEALCLDLKSKDVASTFKTVVSKKENLETLGGMSSISSEGTTHSVRLEEQLAFSDWINSNLGHDKDLQHLLPIDSEGKRLYLSIKDGILLCKIINHSCPDTIDERAINKKNLTVYREFENLTLALVSSQAIGCNIVNIDAHDLAKGKPHLVLGLLWQIIRIGLFSHITLDSCPGLAGLLFDNERLEDLMKMSPEAILLRWVNHHLERAGISRRCTNFQSDIVDSEIYSHLLKQIAGNDADVNLDALRESDLQSRAEIMLQQAAKLNCRSFLTPQDVVNGVYKLNLAFVANLFNNHPGLDKPEQIEGLESIEETREEKTYRNWMNSMGVAPHVNWLYSDLADGLVIFQLFDVIKPGIVNWSRVHKRFSPLRKFMEKLENCNYAVDLGKQLKFSLVGIAGQDLNDGNATLTLALIWQLMRAYTLSILSRLANTGNPIIEKEIVQWVNNRLSEAGKQSQLRNFNDPAIADGKIVIDLIDAIKEGSINYELVRTSGTQEDNLANAKYAISMARKIGARVYALPEDITEVKPKMVMTVFACMMALDYVPNMDSVDQNNHNSSANNSN

SEQ ID NO: 18670 - DNA, 3362 bp, DROSOPHILA
gcgctttttcccacatttttcacctttttacataccatatttctaatggcttttctgtttttccgtcagccgacacacattcaatctgctcactagaagaggtgtcacaatcgatagtattgcagccgacaagcactaaaaaatacccggcaaaataatgggtgcccttttcgttgctcacttttggcgggctttttacaagggaattaagttggtatacatgttcagttgttaataccattttatgattctttattttaaaatgcatttaaattctttcttgatagtgtccagtcaactctatcgctattatcctaagctaaccacattgcttacctgtaattatattataattcatatgttagtctgatctgaatacaatatttatataccccaataaaaatattcaaaagaaaactatttaattctggtatattttgattaacgataatattattctaatgtattagtaacactgatctaaataaaaaaatatttatatacgtatattataatagtcgaaagaaatactttctttttaaacaaaatgactggtattaaccagtcctatatatttctgaaatattttgctttttaatgaatcggactaaattatatatatatatgcataaaaaacatatttgaaggagacacttgctttttaaatgatttgttaaccaaaaccatctaattttggaatattttgcagaccggtagtcatattttaattcatcagtcacgctgatctaaatgttaatatttatatacgttcataaaaatattcgaaagaaaatgaaataaatatgtaaaaactaacaatttagcgaataaaaaattttttgacgttctggtatttatgtattgaaaaggcggtcactcttgttggcaaaaaagcgcgcggcgtgttttcacaaacaaaacaatttgataaacccctggctatacttaatataatcatatatttaattaattacaagtgttaagttaaaataaaatcgccatgggaattttgggcttatctaagctcattgccgatctggcgccacaggcgattcgcgaaagtgagatgaagcattttttcggtgagtccggttctatttgctaaatataaacaaaactttaatagtatgctcacatttcaaaggtcgcaaggtagcaatcgatgctagtatgtgcctgtaccagttcctcatcgccgtgcgctccgaaggcgcccagttggccaccgtaaatggtgatcccacgtcccacttaatgggcatgttctaccgcaccatccgattgctggacaacggaatcaagccggtatatgtcttcgacggaaagccaccagatctcaagtccggtgagctggcgaagcgcgccgagcggcgggaggaagcggagaaggcactgaaggcggccaccgatgcgggagatgatgccggtatcgaaaagtttaatcgccgattggtccgggtaacgaaggagcacgccaaagaggccaaggaactgctcacactaatgggtgtgccctatgttgatgcaccgtgcgaagcggaggcccagtgtgccgctctggtgaaagctggaaaggtttatgccaccgccacggaggatatggatgccctcacattcggatctacaaaactgttgagataccttacctacagcgaggcacgaaagatgcccgtcaaggagttcagctacgacaagctgttggaaggtctggccattaacaatcgagagttcattgatctatgtattctgctgggttgcgattactgtgagagcatcaagggtattggacccaagcgagcgatcgaactgatcaacacctatcgggatatagagactattctggataacctggactctagcaaatacaccgtgcccgagaactggaactacaaggtggcgcgggaactcttcatcgaaccggaggtagctgatgccgactccatagatctcaaatgggtcgagccggatgaggagggccttgtcaagtttctctgcggcgaccggcagttcaacgaagagcgcgttcgcaacggtgccaaaaagctgatgaaatccaagcaggcccagactcaggtgagactcgatagcttctttaagacactgcccagcactccgaatgccacaaacgctgcaaaacggaaggccgaggaagcaaagaagagcgccaataacaaaaaggccaagaccagcggcggtggacgaggccggcgacccaagtagttcattcgtgtgttatctggaaaaacgtacaattctttaatcttaacttaaccgtaaagcctatgcatacaatataaactacatctttgagcttaatgctagttggtctgcttgtgggtgcgggtgaggttgggatgttggattatggatattggattttgaattagagtttggactgtgggggctgcgactacagcaaatactgcttggccagggcacgcagaaatctcgatttccgcaccatggcagattctcgtttgatctcctcattgttgtttgcattcagctccagagtgcccatcatagaaatctgttttttaaaaatgttataaagataaatgattacccgcaaatgagcacagagtaatagattcctaccgcttcaagtttccgactgtgttcgcctcgcttagcgtgcagattgacgatgaactccagcagagttgtatcccagatgcagctgtaatatgcatccatggcatcggtgaaattcgacgatttctcgctgagattcttgaacacaatgccgtagtcgatctcatcaaggaactgacacagaacggtggcctgcatgtgacagcccagattggcggcacatcgaatcatcttgcggatcacgtagtcgtcggccacatttctctgcagcggcatggtgcagtagtcggtgccagtaaccagcgcatttacatagcaacgcattgcggactcattattgccgatggctagatctagatcgcctttcatcttcagccatgaaatggtttgcggatagtaggacaaagcctcggaaagaagccattgcagggtctcgcaaacgctcctcaaactgtagctgacagggctgaaatgaggattaaaagttattatttaaaaaaaaactatattactgtctgtctactcacttgttaatgctggtaggccacagctgcatgtactcgcagcttaaatcatgattggggtcatccttaagtatgttgtggactttgcctatcatggagatggcgagtccgaaaacgctttggtggcggattcgctgtaggaaggcctgcagggaactgataccgccaactcctgaggagccacgcttcggaacgttaaggaacatgcttagcatcagttcccaggcatcgcgacataccttc

SEQ ID NO: 18671 - DNA, 1300 bp, DROSOPHILA
atgggaattttgggcttatctaagctcattgccgatctggcgccacaggcgattcgcgaaagtgagatgaagcattttttcggtcgcaaggtagcaatcgatgctagtatgtgcctgtaccagttcctcatcgccgtgcgctccgaaggcgcccagttggccaccgtaaatggtgatcccacgtcccacttaatgggcatgttctaccgcaccatccgattgctggacaacggaatcaagccggtatatgtcttcgacggaaagccaccagatctcaagtccggtgagctggcgaagcgcgccgagcggcgggaggaagcggagaaggcactgaaggcggccaccgatgcgggagatgatgccggtatcgaaaagtttaatcgccgattggtccgggtaacgaaggagcacgccaaagaggccaaggaactgctcacactaatgggtgtgccctatgttgatgcaccgtgcgaagcggaggcccagtgtgccgctctggtgaaagctggaaaggtttatgccaccgccacggaggatatggatgccctcacattcggatctacaaaactgttgagataccttacctacagcgaggcacgaaagatgcccgtcaaggagttcagctacgacaagctgttggaaggtctggccattaacaatcgagagttcattgatctatgtattctgctgggttgcgattactgtgagagcatcaagggtattggacccaagcgagcgatcgaactgatcaacacctatcgggatatagagactattctggataacctggactctagcaaatacaccgtgcccgagaactggaactacaaggtggcgcgggaactcttcatcgaaccggaggtagctgatgccgactccatagatctcaaatgggtcgagccggatgaggagggccttgtcaagtttctctgcggcgaccggcagttcaacgaagagcgcgttcgcaacggtgccaaaaagctgatgaaatccaagcaggcccagactcaggtgagactcgatagcttctttaagacactgcccagcactccgaatgccacaaacgctgcaaaacggaaggccgaggaagcaaagaagagcgccaataacaaaaaggccaagaccagcggcggtggacgaggccggcgacccaagtagttcattcgtgtgttatctggaaaaacgtacaattctttaatcttaacttaaccgtaaagcctatgcatacaatataaactacatctttgagcttaatgctagttggtctgcttgtgggtgcgggtgaggttgggatgttgga

SEQ ID NO: 18672 - protein, 385 aa, DROSOPHILA
MGILGLSKLIADLAPQAIRESEMKHFFGRKVAIDASMCLYQFLIAVRSEGAQLATVNGDPTSHLMGMFYRTIRLLDNGIKPVYVFDGKPPDLKSGELAKRAERREEAEKALKAATDAGDDAGIEKFNRRLVRVTKEHAKEAKELLTLMGVPYVDAPCEAEAQCAALVKAGKVYATATEDMDALTFGSTKLLRYLTYSEARKMPVKEFSYDKLLEGLAINNREFIDLCILLGCDYCESIKGIGPKRAIELINTYRDIETILDNLDSSKYTVPENWNYKVARELFIEPEVADADSIDLKWVEPDEEGLVKFLCGDRQFNEERVRNGAKKLMKSKQAQTQVRLDSFFKTLPSTPNATNAAKRKAEEAKKSANNKKAKTSGGGRGRRPK

SEQ ID NO: 18673 - DNA, 2450 bp, DROSOPHILA
gaaaaacgccgggggtggggagtaccctctacagtgtgagcaatatcaattttggcaaaaactttaagggacttccccttcgccagctaattgtgacggatttgcttacaagcgtgagaaaccagtttaattttcatttaggcattaatatttctctctgtgtcaatgccatcgcatcgcccacatgcatcatcgcagcagctaaccccttgagtttttcctacaagtgtgcagatctgggttcagtattatctatatataaattcagaccggaggaagttcaatcagaaattaataaatgcacgctggtatttgttgctgctcgggagttttgtattatgcaaattggcattggcccttcgattccaagttgattcgcgtctcgagccgaagaaatgttgtaacttcaatcatcattgttgggttgattaaattaacaagttgtagttgttgttgccaatctcgatggcgtttagcattgttgatgtttgccgaagagcaacattcgactttgattttgatgcattgaggttgtgtcatcagcgctccacccaagttcatgattttttagggtatagctaagtttaggagtggatttaataataatattgctagtgcacgttttaaaaacataacagactttatataaatcaattaagcttttactgattcatgtttgtttttatgtttaatttttattggcttacttattaatctacatttatataaatcttaaaaaaaagactcaaaagggtatccaaaagtcgctactcttccattgaactccatgccttgcattaatgaatgaaaacgtgtggccaaaagcagtttattgggcgaaatatgggtcgctctgcatgcccgacttgtttgcatattcggagtctgtgtctgcatgttggctttgtctttgactatcggatcggatcactataaatagtcaatcgggggcccagagtgacagcattagccactcggtcaacaaaccagcagcagcaacatgtacaagctcgtaagtggacggcagattccttttgcatggatccagtgatttaattggacaattctataccaatagcttctcgtcgtcgcccttttcggatgcgccctggccgcgccactgaacgatgataccatcaccaagttcttggccaaccaggatacggacggcacctacgcctatgatatcgagcaggccagcggtatccagatcaaggaggagggtttggccggacacgaagctcacggatcgtactcctacatctctcccgagggtattcccgtccaggtggtgtacaccgccgatgagttcggcttccacccacagtccaacctcctgcccactccaccaccaatcccagaggagatcctgcgctccatccgctacatccaggagcatcccactcccgaggagctggccgatcgtgctgttcgcgcccagcagatctagagctgaatggaaattagtaatcttaagtttgccaaagtagtcatcacacgatgtgttcatcatcccagccatccgattaaaccacaaccagctcttggctggtgttaattccacttatttgccccgtctatctaattcgcttgggaaagaactaattagtggagcaatataatagatcttattctagccgaagcggagacaatgctccgcacttcatactgaatatttaacgccagtctcgtgacatttcctttgctgtgaacagtggctcgaaagttgccaaaaatccattgagtttcgtttctttgactgccaaatgattttcaaaagttccctattgtttaggattacaaaacgaaatctggacaaccgaagaaactttctgtggcaatctaaacagctgaaggccaaggtcaacgtgggcgaaaagcgaaaacaataccttcgagggagactttgtttcaaataacatggaaagtgcaaagatattgggctaaacttgtttgcggccaaaacaagtctgtggacttactttgttgactttattttaccacaggtgcggataggcgagaaatggcggtaaaatggtaaaaagcttaaaaacaaaatgtagttttttttaataaaatctaaagttaaatttaaatattcatagaactcccaataataatccgaatcacattgtccaatgaaaacactgtgcgcttgctgctcattaacatttgacatgaggcaagttaatttctgcttttggctgcgattttatggacgggaattgaatgagtgtctgctggaaatggaaattcattaagacacttacattcagacgagcaggagcagcagcagactcacacggacgcacagaagagacttggctaacacgcacatagcaccattgaagcgtgatggttttttggcggcggaaaatgaggggaaaatcggaggaaaattggggaaactctggcagcggttctctcatatcaattaggcacgctcagca

SEQ ID NO: 18674 - DNA, 384 bp, DROSOPHILA
atgtacaagctccttctcgtcgtcgcccttttcggatgcgccctggccgcgccactgaacgatgataccatcaccaagttcttggccaaccaggatacggacggcacctacgcctatgatatcgagcaggccagcggtatccagatcaaggaggagggtttggccggacacgaagctcacggatcgtactcctacatctctcccgagggtattcccgtccaggtggtgtacaccgccgatgagttcggcttccacccacagtccaacctcctgcccactccaccaccaatcccagaggagatcctgcgctccatccgctacatccaggagcatcccactcccgaggagctggccgatcgtgctgttcgcgcccagcagatctag

SEQ ID NO: 18675 - protein, 127 aa, DROSOPHILA
MYKLLLVVALFGCALAAPLNDDTITKFLANQDTDGTYAYDIEQASGIQIKEEGLAGHEAHGSYSYISPEGIPVQVVYTADEFGFHPQSNLLPTPPPIPEEILRSIRYIQEHPTPEELADRAVRAQQI

SEQ ID NO: 18676 - DNA, 4036 bp, DROSOPHILA
catcatcgtcaccttcgcggtgcggcgttccaatgcgcccgcctcggcgaaggtctacgtcacggagcgcatttagacggtccgtccggctcgtcagagtctccgccgccggaattggtccacggccaggagggtaagcgagtcgcagcaggtgtacccgaggattccggaactcggtgacttggactggacttggggaaacggaccggcggtgtcctttcgccaggcttagcgcacagagaccacgcttctgcaactctatccgaaccctttgtaaccttttatatgccaaattaaatccacatcatacacttagactactccatatggctataatcaaaacctttgcccactttcaatctctcagtaggtgtgtaggattaggaatctcagcagatgagcagaagaccaagcaagcaaatctaatcaaaattttgacgtgttcagccgaacttactgatgcatccaggcacttgcaagctagattagccagttttttggtactatagtagaattttgatatactcgtaagcccatgtaactagtgtatgtatgatcgtaccacgtaacgcattgaatgtacgcactcggactcaaaactgtcgcatttgatgtttttttgtaatcgtgcaagtatttgtattttcataatgcgctaagcaacctaagctgtaaaccaattttacaaacaaataaatacttttgccctgcctgagggctctcataataatcgcaattgtttatgcactttttaaatatttaaaaaacggtgagaactcggaaaataaacaaatcatattcccttgaaagggaaattaaacagaagtgatggggattgtcttattttctttgtgtgataatagtcgaggttatcagatggacttcagatatatatgtctaataggcattgtctatattcctacttcaaaactacttctactttcaaaatcatttgaaccatgtcatatcacatcatatcgtattatatcatatctttattctacacagtctttgccaaagtaatatccccactaaaagtatcaagatcgttattttgatagtccccaaagtttgtccacgtatagttccagaatctgggatcagctcgaggatcagctggtttattcgagggcggcactgcggtggcattgaatcgctcgagttctgtcatcaatgcgtttaccacttccggatatcttaaatgtgatttgtaaaaaaaaatatgaatttttcaatgaaattcacagtacttactgcttggccagattgtactgctcacagggatcatcgcgaatgtggaacaagcacggagcagagaatgcggtggccacacaactggttccttgggaggattgtcccgggcacgacaccgtggcagctgctcgtattctctgctgatccgcccgacttggcagcatcttgagagcctccagcgctttgcccgccctactcctgcccaccaactgccagtcgtacagacgaggatctctttccccagccggaccgtaccaaccatcccaactaccccggtaattggtgcccttgaccagcttccaatctccaacgctgagcgctgcactgccccatatatcatcgatattgtgcagtacattcaagcgaggagatgccttgtcctgaaccagtgcccgccaaatgctctggccatcgatttgcttgctgagattagacaacgctggttgaccaccagctgcctccaggagcgtgggcaaccagtcaatgatgtgcatggtctggttggacactcgttggcttttcttcagcagaggtgaccacatgagacccgctgctctaactccgccctcccacagggtattcttcacacccttcaggggatagttggaggcgaagttaaggttgaatccttgggctggtcccccgttatccgaggagaatatgatgatcgagttctccagcatgttcgacttgcgcagctgatccacaatttgacccacagagttgtccattttggaaaccatagctggaaatagtaggtatttacattttagaacaatacaaaataaacaaattttaaaatcataaaatggctattatttctcctttctgaatagtacaatatcgaataaaacttaccagcaaattttcgccgtttatagttgggaatgtgcgacatcttgatcacatcgttgtccggaaccggcagaggattatacggattactcgagtgacaagccgcatgggctacgtagagaaacagtggacccttggtggcattatggttggcaatgaccttaaccgagtgatcggttatcacatccgtggtgtagtgaccatgcaagtcataggccacttgtgttccattgcgcatgtctagaccccactggttgttctccacggcggtgtgatcgttgtaatcctggtgacccgaccagaatcccacgtggctactgaagccgcgatacaacggagtgtacttcagcttccaatggcctaaatgccacttgccagctatgtgagaggtgtagctggaaatggagattgtgtttataaagtgggcatgatattgacattgacctaccccaactcattcaaatattgaggtagtattttctcctccaagggcaaacctcgtggttcagcggcatagagaactgtatgttgcattcctacagaaaatgacactaataactataattacaagaaaaggatgatcttaacacacctgtgtgtatgggatattttcccgtcataagggcagatctggatggagtacaaatgggtgccacatagtaacgattcagaataatgccagaataggccaaggcatcaatgttaggcgtgggaatctctgccgagccatggaatcccacatcgttgaagccctaaaatagtaaaaatattaaaatattgagttaatatgtgtattaaatttatagtaatcaaactcaccaaatcatccgccaaaataaatataatgttgggctttgcaggagatttttcaacctcagctgcatcaatgattggcagcagcaagcagatcagccataaaaaccacattgtttatctggaaaactaaaagattgtgatttatatttgacacttaaaaacaaagcataaataacaattagttagttaactaatcgatttattagtgacacagacattacgagaacgagctcgattgattgatcttccagcgttttgaatagcattgaatggcattgatcgtcatctgggttggaattcagttgctgaatcagcaattgcactcaatgcgacctcaatatgagtgggttgctcttcacctgcgcactgaatgaattgattcgcgagttgagttgcgattcatgaatcgtagggataccccccaagaacctatctacacatacgtgatgggaaacgagtatattcatttggccattgttcaaagcgatatcatgtggcacctaattaacatgtaaattgagtttgtcgctgtttgcaccgttaatgggtcagcaagtaccactcggcaatcggaaagctcaaattaaaaaaccaaattagattcggacattttttttcttgacatatcgaactgctaatgctctaatgaccactgccaacaaaaatataatacataacaattattattaatgttgcaattagaatgtttaaagtttaagcactttcatttaacgcatattgaactttttgctcagaaattgcttaagattatttaattttctgtaattacatatattttagttagaataacataacataaatgttatcgagcctgcggcactttcacatcagtcattttatcttatctttatatattttaaaaactataatatataatgcattcccagtcgttcaagtattgcccagatttatgttgtctattattttaagccctaaaatgttggatacaatgtgatctctcactcttctatgcagaaaattctttgttaaacaaacaattctattgtttgtcataggtcactaacccgttatgagattcaatagaaattcgtttatgcaaaatcactcaatagccagttgaaatactttt

SEQ ID NO: 18677 - DNA, 1629 bp, DROSOPHILA
atgtggtttttatggctgatctgcttgctgctgccaatcattgatgcagctgaggttgaaaaatctcctgcaaagcccaacattatatttattttggcggatgatttgggcttcaacgatgtgggattccatggctcggcagagattcccacgcctaacattgatgccttggcctattctggcattattctgaatcgttactatgtggcacccatttgtactccatccagatctgcccttatgacgggaaaatatcccatacacacaggaatgcaacatacagttctctatgccgctgaaccacgaggtttgcccttggaggagaaaatactacctcaatatttgaatgagttgggctacacctctcacatagctggcaagtggcatttaggccattggaagctgaagtacactccgttgtatcgcggcttcagtagccactggggtctagacatgcgcaatggaacacaagtggcctatgacttgcatggtcactacaccacggatgtgataaccgatcactcggttaaggtcattgccaaccataatgccaccaagggtccactgtttctctacgtagcccatgcggcttgtcactcgagtaatccgtataatcctctgccggttccggacaacgatgtgatcaagatgtcgcacattcccaactataaacggcgaaaatttgctgctatggtttccaaaatggacaactctgtgggtcaaattgtggatcagctgcgcaagtcgaacatgctggagaactcgatcatcatattctcctcggataacgggggaccagcccaaggattcaaccttaacttcgcctccaactatcccctgaagggtgtgaagaataccctgtgggagggcggagttagagcagcgggtctcatgtggtcacctctgctgaagaaaagccaacgagtgtccaaccagaccatgcacatcattgactggttgcccacgctcctggaggcagctggtggtcaaccagcgttgtctaatctcagcaagcaaatcgatggccagagcatttggcgggcactggttcaggacaaggcatctcctcgcttgaatgtactgcacaatatcgatgatatatggggcagtgcagcgctcagcgttggagattggaagctggtcaagggcaccaattaccggggtagttgggatggttggtacggtccggctggggaaagagatcctcgtctgtacgactggcagttggtgggcaggagtagggcgggcaaagcgctggaggctctcaagatgctgccaagtcgggcggatcagcagagaatacgagcagctgccacggtgtcgtgcccgggacaatcctcccaaggaaccagttgtgtggccaccgcattctctgctccgtgcttgttccacattcgcgatgatccctgtgagcagtacaatctggccaagcaatatccggaagtggtaaacgcattgatgacagaactcgagcgattcaatgccaccgcagtgccgccctcgaataaaccagctgatcctcgagctgatcccagattctggaactatacgtggacaaactttggggactatcaaaataacgatcttgatacttttagtggggatattactttggcaaagactgtgtag

SEQ ID NO: 18678 - protein, 542 aa, DROSOPHILA
MWFLWLICLLLPIIDAAEVEKSPAKPNIIFILADDLGFNDVGFHGSAEIPTPNIDALAYSGIILNRYYVAPICTPSRSALMTGKYPIHTGMQHTVLYAAEPRGLPLEEKILPQYLNELGYTSHIAGKWHLGHWKLKYTPLYRGFSSHWGLDMRNGTQVAYDLHGHYTTDVITDHSVKVIANHNATKGPLFLYVAHAACHSSNPYNPLPVPDNDVIKMSHIPNYKRRKFAAMVSKMDNSVGQIVDQLRKSNMLENSIIIFSSDNGGPAQGFNLNFASNYPLKGVKNTLWEGGVRAAGLMWSPLLKKSQRVSNQTMHIIDWLPTLLEAAGGQPALSNLSKQIDGQSIWRALVQDKASPRLNVLHNIDDIWGSAALSVGDWKLVKGTNYRGSWDGWYGPAGERDPRLYDWQLVGRSRAGKALEALKMLPSRADQQRIRAAATVSCPGQSSQGTSCVATAFSAPCLFHIRDDPCEQYNLAKQYPEVVNALMTELERFNATAVPPSNKPADPRADPRFWNYTWTNFGDYQNNDLDTFSGDITLAKTV

SEQ ID NO: 18679 - DNA, 4018 bp, DROSOPHILA
tattgatgatgccaaagccacgaaaaagactggctttaagttgcttttttgtttttttttattcacggatgctttgctccttggttagcactaggttttacttcactttgggcaattattacacttatatttcggattaaactccatacaacgcagacgatcctattcgcttgagagctcgattcacaatcaactttcttttagaaaaattctgtatacttgaatgtctggttgaagctggagggtgttgccagcctaaaaacgcaactatcggactgccaacttgctgctgggaagagcgcgcaattcaaataggaatgtaacgtggtgattgttatgcatacatcgaagacaaattacttattgataaatacaaacatatttaactgtttaaaagtcctttgaaagtgcataaatgtacttggtattattattcactttgagtttcctaacaagttaagatacagtttaaaatcacctcaaaatctttatcatgctggctaaaagtaatatcattagtaaaatagtaaaatatttctctatatcagcggagcagtaataaaaagggcatcagttggaaaagtatgctgcatcaagttcacgatcacgctccaagttcagaaactcttatctgcagtcggcttggcattagctattgtttcctgatttgcgctcaacttggtgaatgcatttcgcttgccatttcagtttaactttgatttcactgagcgcagctcgaaaacggctccacccgcaatggaatactattcaattatactgatcctcataatgctgccgtcagcgtggtgccttcaagtcccttcaaaaataaagtccactaccaaagcgcccgtgaaggagattccaccgactaatggaacccaaatcgggaatgtgacagcagtggctccagttccagagaaactggcggaagtgcacatcgatcagcacaaaacaattcgaattagcaagggcgatttggacgatcctggacgtttacatgggaaagatagccgagagtgccgccacgattaaggacaaggagaacgagataaacaagctgcagaccaaggaccaaacgggcgatgagctgctgaggaaattcgagaatctcacccaggtgtgcagtgcccagcagtcgtcgttcacgacggccattaaagagaaggacgaacagatcaaggaactggagcaaaaggtgaaggtgtacgagacgcgcctcaagaggaaacagcacgttctggcggagctgcgcaagctgaatggctccagtgctctactgatcgagcatctcaagggtaaggttgtgtacttcgagcggaagtttcgggagaagaaggacgacctgttggcggactgggaggcagcgactaccagctgcgtgccctttggacgatcgcccggcatccatctgatccatctgcccggattcctgcccttcttggtgccctgcgaggggcaaactgccgccggacccggctggacttgcatccagcggcgtctggatggatctgtgaacttctaccggaactgggatgcctacagcaagggattcggcaagctgaacggcgagttcttcatcggtttggagaagctgcaccgtctgaccagctcccagccccacgagctgtacattagcatcaggagatttggcggcgagacgagctatgcccactacgacgacttcctcatcggcagtgaagaggagggctacgaactgaagctactgggccattaccagggcaacgccagcgatgcactgcgcacccacgacaagatgaagttctccacctacgaccgggacaatgacgccttcacgcacatgaactgtgcggagcaccaccagggagcctggtggtacgacttctgttcccgcaggtaaggatgggtactattgatataaaaaggattaaagtatgtattttataagtactccctagctacttttctgaagcttaaaagatgtgtatatcactgacactttattcaattaattatcttgattactaatataacttgtcagtatttgaatacttatcatatctgaaataagtatgtgatactatgatttgacttgttgtccagttggtcattttaaaatagttatttccgtcacccgttgaaatgataattctgaacagtgatattgatatctttatctttgaaaacagcagcagatatacacttgatactttgatcttataaggttatctattagaagcaaataaatatgttagataataagaaatatttaaccagtattgcactcacaaaataataaatactcttttatatccaagcagagggtatatgggcttcagtcagaagtttgcaacaaactgtatattcttatcacatccttatcaagagtagagtcgatatagccatgtcagctcgcgcgttcgtccgtttctaaggaaactaatatttttcttttaaaatgaaactttcccaaacttttagttttttttagttttcttagaaacggaccgagatattctattgagatagtccagatatcctcatcaaagaaaaagcgaaaaataatcaaatatacatttatggttttttaacatagagtttattaattcagtacccaccagtttgttcacaattatataaatgacaaaaatttaattgaagatgggaaaaaacacatcgtatatttgttgtttttgatcgaaaagtgattgtatcaataatagtttgtatttaatatgtagtgcaagggtatttaagcgtcggcttgggaaagcgagctacttttcttgtgttgaataattttcaattttccattatacaattattaaggtacaaaacatgtaaagggtaattttttttttatttaacagcaatttaaatggacgttacttcaagggagaggtggacaacccgcagagcatctactgggagccgtggtacagcttccgctccctgaagtccgtccaaatgctcatccgccccaagagtcagctggagctgaaggatctgcctcggccgatgcgaccgccaggataatcggaaattatttgacgagtgtccgagcagaaaattgtcgaacctatgcgagcataaatctcacttcgatgccgatcctattaatcttcgtttgcccctttggacgcccctgcgacagttgattaggtttcgatttgtttgcggcccccgtctttgggtaattaccacgttacagttgactgcatatcgccctagacattttgtttgtttcgcacacaagtcattgggtgcaattaattttcattttcattttcatttccattttccgcctttgtcgtaatttgctctgttgcaacaatttaatgaaatctaattgagtgtgtgcattgggccgataaaaatgaaataactctggtcactgggcgactcctccgcgactcatttgtcacttgcactttcatcgaggcgacgactggagccgctcaattggagtcaataaacgttgggtaaataagccaaaggggcggtatctaaattaataccgattcgatggcagatttacgactttggcaaagagttatacgcgtgtgctcataagttccagtttattatggaaaatacctattccgactggcgaaaaccagtttaagctccttcggtattcttaaatgtacaactctagtcgataagccagatgaaaacattacaaataaatacattgactatatgtttatttaaaacacacgcatatttttggtttcactttcgatgactttgggattcgaattataaaccagttacaagcattgcacgaatggctggctaatcgtctctgattacgacgataagacttacagaacgcaaaaggcaacacttgtagccatttatcagacattcttaaatagcatataaatacattacttacattagtgctagattaacgatatgattggtatatgctagacggcaaaataactttaagtacacggacacacatctaacgccctacgattgctttgtaaatattataaagtgcagagcaaaaacttcgagtggctga

SEQ ID NO: 18680 - DNA, 1044 bp, DROSOPHILA
atgggaaagatagccgagagtgccgccacgattaaggacaaggagaacgagataaacaagctgcagaccaaggaccaaacgggcgatgagctgctgaggaaattcgagaatctcacccaggtgtgcagtgcccagcagtcgtcgttcacgacggccattaaagagaaggacgaacagatcaaggaactggagcaaaaggtgaaggtgtacgagacgcgcctcaagaggaaacagcacgttctggcggagctgcgcaagctgaatggctccagtgctctactgatcgagcatctcaagggtaaggttgtgtacttcgagcggaagtttcgggagaagaaggacgacctgttggcggactgggaggcagcgactaccagctgcgtgccctttggacgatcgcccggcatccatctgatccatctgcccggattcctgcccttcttggtgccctgcgaggggcaaactgccgccggacccggctggacttgcatccagcggcgtctggatggatctgtgaacttctaccggaactgggatgcctacagcaagggattcggcaagctgaacggcgagttcttcatcggtttggagaagctgcaccgtctgaccagctcccagccccacgagctgtacattagcatcaggagatttggcggcgagacgagctatgcccactacgacgacttcctcatcggcagtgaagaggagggctacgaactgaagctactgggccattaccagggcaacgccagcgatgcactgcgcacccacgacaagatgaagttctccacctacgaccgggacaatgacgccttcacgcacatgaactgtgcggagcaccaccagggagcctggtggtacgacttctgttcccgcagcaatttaaatggacgttacttcaagggagaggtggacaacccgcagagcatctactgggagccgtggtacagcttccgctccctgaagtccgtccaaatgctcatccgccccaagagtcagctggagctgaaggatctgcctcggccgatgcgaccgccaggataa

SEQ ID NO: 18681 - protein, 347 aa, DROSOPHILA
MGKIAESAATIKDKENEINKLQTKDQTGDELLRKFENLTQVCSAQQSSFTTAIKEKDEQIKELEQKVKVYETRLKRKQHVLAELRKLNGSSALLIEHLKGKVVYFERKFREKKDDLLADWEAATTSCVPFGRSPGIHLIHLPGFLPFLVPCEGQTAAGPGWTCIQRRLDGSVNFYRNWDAYSKGFGKLNGEFFIGLEKLHRLTSSQPHELYISIRRFGGETSYAHYDDFLIGSEEEGYELKLLGHYQGNASDALRTHDKMKFSTYDRDNDAFTHMNCAEHHQGAWWYDFCSRSNLNGRYFKGEVDNPQSIYWEPWYSFRSLKSVQMLIRPKSQLELKDLPRPMRPPG

SEQ ID NO: 18682 - DNA, 2852 bp, DROSOPHILA
gatattctgaatttgattgaaaatgtaatgtaccatagatatatgaattatgaatgtgcgaaagatttatcagactcatgattgtaagcccaagaatagctatctttcagatgatatgtaaaactgttgggaaagatccagcaaaggcatgaggtgatttaatggttttgaaaccaaagaatttagataactatcctgcagccctagaacctataagtgaacttcggtgcgaccccgcctctcgaatgctgtgcattgagatctagtgcaagttcgctgcaccgaaacccgtttgcaatgacgcggaccaccgctgccttccgggcagaccaagaccgggcgacatgtggcagtggcatgccaaggcgatggtggaaccaatggcaggccgatggcgatggtggtggcgacctgtgcctcttacacgatccgaatccaagtccaaatgcgaatcggagcggagcgtagtgattcacgaactgatccgctggcaaatgcggatcgaaaattggccaaacgccaacgcgactttgtcaaatgtacccgtacgagcccaggctggagatttctttttggccgaaatgcaagttgggggcttagttcattgctaatgacggcatgttgtcggtaactcgataggggagtgcgcactcgtatgtgtttgcatagttgggtgtttaagcatattacccgtatgtatgcacgagtatgtctgtacatatctatctgtccgtcggccccgttcgatttatttgtccgcgctccacaacaaagactcataataatctgttgggccaatcaagtaaaatatgcgcgagatcagtcaactacagaaacaaaagcaaaagtaaagcaaagccactgcagcagcagcaatagcaaaagcaacaagcacagcagccgcagtaatgaaagtgaaaccgagtctggccgagagactctggctgagattgagacccggccaagagtcggttctagccagcaccgctatataagcttgatggccgggctcggcagcagcagtgcagcgccgaccaggaacccaattggaagtttgagctacgactccatagtccaattcggcaaggattaccataagccccacaccagaaccaactccacaactaccaaccacccactcacctcagccaacatgttctgcaagctggtaagtgccctttgagccaagtttctgcccacaaggatagcgtctgaaaaagttcctttaactactaagtggagctggaatccaaatctgcaacattttagttgaagttcttaagatccgaggatcctaagttccagatatttttcaaactacagatgtatcttattacatttaaaaattccatatttttttaaaatcttttcaaagcttttcgctaccttcgtggccctggcggtggccaagccacaacaccaacctgctgcccagtatccggctggcgtgaatccgcaggactgccccaacttccccatctgtgataatgcgcgcctgcacaatccgcagccgcagtggggtgccccgcagccacagtggaacccccagccgcagccacagtggaacccgcagccacagtggcagcaacctcaaccccagtggaacccccagccgcagccacagtggcaggcacagccctcgtggaacgcagcccctgctgccgcacccggtggcgataagtatccagctggcgtcaatccgcagacctgccccaactatccctactgcgacgtgaacgccggacacgctggtgctcccgtggcagctcctcctctacctggctggacggagcgtctgtatcccgccggagtttcgccgcaccagtgccccaacttcccgtactgcaactagggcggcctagggctcacttgcggccagccgcagcttcctttaacgcttcgcctttccccagttctcaattagtggacattaatctgaaattctttgttgttggcgccgaaataaatgcaaaatgttggtcaaagaaatgggactttctatggttgatagctgcagatacatgggggtatacaaatcgttctattcgcaactacaacttcttactatattacaaaatgtaattgttggttggttcatagaactcttactaatgaagaaaagattaattgaccaaagtaagcatttataattaaataaagtaatttgaactgtctacaatcagaaactcattcagtcaagtgcgctaaatgaggtatgaaagaagactgttaagatcctgctccatgaaacttgatttacagaaaggaatgatcctgctactttaagcttgaattatatgacggaaatatcccaaattctcaagttaaattgataagagttccgaaagtgtaaaaggtatatacttaattaaacatttccactgccctaggaccagttctagctgaaaagcgtgctgaactaggaaccaagagagctcatgccccgagaatgtgccctgccacgcccctgacttgcagcacagtaagtacttgggcaaggagcggagtggacggaccggaccggatcggatcggatcgggttcgtggagatcgtaggaagggagagatcggagcggagcggacgcggactggcggtcgacctcagtcggagctggtcaagtgagtgctttgtgaaagtcgttcttgcaaaacttcggcttaattgccgcctttgggagaccggcccaaggtcaagtgcaactgcaaattacagtcttgcagtgggattaactaatggagcaatgatccaatcgaacctatcacattcccgaccaattcacctgaaatatgcgtgcaatcattgctttatttataatcaatatagcattgccccattttttttgctctttttt

SEQ ID NO: 18683 - DNA, 645 bp, DROSOPHILA
atggccgggctcggcagcagcagtgcagcgccgaccaggaacccaattggaagtttgagctacgactccatagtccaattcggcaaggattaccataagccccacaccagaaccaactccacaactaccaaccacccactcacctcagccaacatgttctgcaagctgcttttcgctaccttcgtggccctggcggtggccaagccacaacaccaacctgctgcccagtatccggctggcgtgaatccgcaggactgccccaacttccccatctgtgataatgcgcgcctgcacaatccgcagccgcagtggggtgccccgcagccacagtggaacccccagccgcagccacagtggaacccgcagccacagtggcagcaacctcaaccccagtggaacccccagccgcagccacagtggcaggcacagccctcgtggaacgcagcccctgctgccgcacccggtggcgataagtatccagctggcgtcaatccgcagacctgccccaactatccctactgcgacgtgaacgccggacacgctggtgctcccgtggcagctcctcctctacctggctggacggagcgtctgtatcccgccggagtttcgccgcaccagtgccccaacttcccgtactgcaactag

SEQ ID NO: 18684 - protein, 214 aa, DROSOPHILA
MAGLGSSSAAPTRNPIGSLSYDSIVQFGKDYHKPHTRTNSTTTNHPLTSANMFCKLLFATFVALAVAKPQHQPAAQYPAGVNPQDCPNFPICDNARLHNPQPQWGAPQPQWNPQPQPQWNPQPQWQQPQPQWNPQPQPQWQAQPSWNAAPAAAPGGDKYPAGVNPQTCPNYPYCDVNAGHAGAPVAAPPLPGWTERLYPAGVSPHQCPNFPYCN

SEQ ID NO: 18685 - DNA, 2716 bp, DROSOPHILA
ggactcgttgcgcaaccacttgtccttgcaccggtactccctgtccgccctccgctggcaagggggcgtggcatgggtgcacaggccgcagcagtcgcaaaagagtcctgcggagggggttagcaggatctcgcacacattgcagaagcaggcctagaatgaagggcatgtatcctatggtatctctttcgcggcaagtgaatccgctcacctgttccaacacttttattgatttccagctgtgacgtgttttgaaggtgctcacaaagtcctcggaaagcaggctgcggcagaaggcaaagaggatactgagggccagcagggatcctatcagcgcctccacgctcagctcaatagtgcctatgtccatggtccacgcagataaggcccaattacgctaaatatcctggtaatttggcatattcacaaatcgtttgtttttgccccatcgaccagtgtgaccgcttcaaagacaacaaaaaacaccttcgacctcaattaaaaacacttttcaagaataagcactaatgcgtaatttcgataggcggagtgacactagtatttagattcaggacgtttccaacactgcttgtcaactcaacctaacaaatcagctgtgagtttggcgtgtggaaaaagtttgattgggaacaaatcggacgtctttaacaaaaatctagccaacatgaaggttatctacaacaccctgttcaagcgcacctccacctacgccgtggccatcatcgcgtcggcctttttcttcgagcgcgctctcgatgtcacgtcggttgcgattttcgagggcatcaacaaaggcgtaagtataatcctgttatgtaagcaaagtttcctggccaaatctcaagatttccccgctttgcagaaactctggaaggacatcaagggcaaatacgaataaattaacatgatttgttgtaattagcaataataatcaacgtttattctaaacgaaacgataactaagtgtggtttcttttggttattttgatttgggtgcttccagtgcgtcttccgacacctcccagggcttctcatgcctcttctcatcccagggctgctcgttgggcaggcgagagggttccttgaaggacaccccattatcctgaatggtttgaagcagcttctgcagcttgctacccggtaccgcctccacgttgcaggtcatttccgtgatcccagactgcaggcagcgctgtgcgagcactctgccgagatttacaaacgcagatgtgtcgttggtcttgtacaactgctgtttaatggcccattccgaggtgctggcactcaggatggttccattctcaaagtgcttgacatcgccgctgacatagcggccgctggtgttgatttccaaagtgtgccagtaggaacgacctggtttctccagatgatagcctaccggcttgtaggcaatgcgtaatctttccaagttccgtggattccggttgatcacgtattcagtgctggcttgcggggttgttaattccttgattttgtgcagtacacgggcggaggtgagggggcgagcactgcgagacatttttgcgatggaaacccgaaaaaagcgcgcgtttaattgatatttatgtggaaattacaaaaccacgataaaatattttgagctgcctttagtgttaccagactgccagaactgagtgtgggtaaacgatttattggtgctgtaaaatgtccaaacatcagttggatgtaaatggcaaaaaacagctgtttcagattggtttatcctcaaatttctagtttctgtagattctattggccttggaactttcgccgctccccaccacaataacgcccccttcagacatgcgccaagtgaacacggcgcctcctgcccgtacgcccatgagattgctgctgaggtgaagaagtggcggttgggtgaagaagcaagcagtgcgcgcgtcccaaattgcaaagtgatttttattcggcccacaaaagccggttatgtaaagaccgtataggccaaatatctacacacatatcgtactcgttaaattaagaacttgtagaaatgtttatggtcgtgtgttccaatttaaggcgtcccgggcacgtgggcgccgcatctgcagcgcgaaatataaactggctgatcagcgagggatatacaccgccgatccgggcaatggcgcgggtaagcttaattatagcaattaaccctgaaatttttcacctaaatacacgcaataaatataaacaaaatcaggccatcgctttctccttttttcaccacgttccagaactgaccaccagttccaatcccaccaatggtggcgggaaaatttaaattagccattgctaaaaatgtataggaatcgatttaaaaggtgcttttactacttaagaaaaatgcctttttatgagcacttcattttaaatgcactaaagacacagttaattgtggaattatcattttaagctgttcaactcttggaatataagagtactttatttttaaatatttgttgatgagtttctacgtccgttagcatatacctaacaaaggtaaacaaaggcatctattatctacaaaaataatccagattgagcaactgataagaacactgttcaaactcaccaccttgcacaaagcaccaagatcccaaacccaccacgctgggcgcacaaatttaaatgcttatcatatcaaaccaaaccagcgtgatcatta

SEQ ID NO: 18686 - DNA, 716 bp, DROSOPHILA
tttggacattttacagcaccaataaatcgtttacccacactcagttctggcagtctggtaacactaaaggcagctcaaaatattttatcgtggttttgtaatttccacataaatatcaattaaacgcgcgcttttttcgggtttccatcgcaaaaatgtctcgcagtgctcgccccctcacctccgcccgtgtactgcacaaaatcaaggaattaacaaccccgcaagccagcactgaatacgtgatcaaccggaatccacggaacttggaaagattacgcattgcctacaagccggtaggctatcatctggagaaaccaggtcgttcctactggcacactttggaaatcaacaccagcggccgctatgtcagcggcgatgtcaagcactttgagaatggaaccatcctgagtgccagcacctcggaatgggccattaaacagcagttgtacaagaccaacgacacatctgcgtttgtaaatctcggcagagtgctcgcacagcgctgcctgcagtctgggatcacggaaatgacctgcaacgtggaggcggtaccgggtagcaagctgcagaagctgcttcaaaccattcaggataatggggtgtccttcaaggaaccctctcgcctgcccaacgagcagccctgggatgagaagaggcatgagaagccctgggaggtgtcggaagacgcactggaagcacccaaatcaaaataa

SEQ ID NO: 18687 - protein, 186 aa, DROSOPHILA
MSRSARPLTSARVLHKIKELTTPQASTEYVINRNPRNLERLRIAYKPVGYHLEKPGRSYWHTLEINTSGRYVSGDVKHFENGTILSASTSEWAIKQQLYKTNDTSAFVNLGRVLAQRCLQSGITEMTCNVEAVPGSKLQKLLQTIQDNGVSFKEPSRLPNEQPWDEKRHEKPWEVSEDALEAPKSK

SEQ ID NO: 18688 - DNA, 3458 bp, DROSOPHILA
cacaattgctgccctcgccattcatcatccatacaaatccatcgtcattcccctccattttagcttcttggccttgttaagtcacgagtctcggttctttcttttttatttagttttttttttttggttttttgttttttttcggggagccttcaagtatttcgattgttctgttcgcctttttgtttgtgagcaaatattacgctagaccctgagacagggtaccaactacaatccattttactttgagccgattgacaagccagccgaaaacatctgggaccgaacaaacgaaggagccaactcatttgtttaatcgctattgaaacagttggtttggttggacctgttctccactgtgtttcatagacttaactttaactccactgcgagtgaacctgttcgatcaacctgcttttcccgctttttttttttttgtgccccaccacctttaggttttcgctatttgtcaagcgtgtttcctcgatcattcagagccgacttgacttcctatctgcggcacagaaaccatttttgaatatgaaaacacattgaagatataaacaatcctatctgcggcaaagaaaccatttttgaatatgaaaacacattgaagatataaacagtcatttaattatcgaaattacttaacacgtttgttttatatatcaatctatgtcaaatttatatgtcttagaatgtattatgccagggtatatgctgttcggctaaccgattttctttatcgtttcaaataatgttattctgaatagttaatgagattgtttttaagaaaagaatggaatgatttcgagaatatatgatatgtcgcatccactggtacccatcagttgccccttcatattgactcgataaactaatgaaaatgctcgcagttttttcggcaattgtttggcttctcgcagtggcatctcccagccaaggagcaaatatactgggtgtctacagtgccctgagtccatcgcatctaatcattcatatgtccacggccaaggctctggccgaggcaggacacaatgtcaccgtggtatcgatgatgcagcccaaggtgatgcataaggacatccatctgattgtggtgccagtgacgaaagagcaggagcgtacgctggagaatcaaatggccagtatggccggaagtaaaaataacatcataaccaccatgtatctactcttaaatggcctggatgtgatggtcacttcacaggctgatctgctaaaggatccgagattccaacgcgttttcgagaccaaattcgatttgatgatattgggctcgtttttcaacgactttcaattgggagttgctggcaagctgaaggtacccgtaatagtcgactggatgataccgtcgaacaccatgatcgatgagtttgtggccaatccgtcagaggtctcctatgtgcccaatgagtcaacttttgccaccacgcccatgtcattcttcaaacgagccgagaacttggtaaagcacgtgattcttaaatacttgacgatacgctttaattacaagttcaatcgcatctataacgaaatctttacggataaagatatgccaacgctcagtgagatgaaaaaaaatatatccatggtctttgtcggttcccatttgatcagcgatggtccaatacgaccactggtaccagctattattgaagttggtggtatacaggtgaaggagcagccagatccgctgccccaggacattgaacagttcatggagaactccagccaaggagccatatttctctcttttggttcgaatataaagagttacatggtcaagccggaaatcgttggaatcatgttcaaagtgctctctggcctgaaacagaatgttatttggaaatgggaggatctagagaatacaccaggcaatgcctcaaatattttctacaaggactggctgccccaagatgatatcctggcacatccgaataccaaactctttgtcacacatgccggcaagggcagcatcaccgaatcccagtatcatggtgtcccaatggtggcactgcccattttcggtgaccatccattgaatgcggctctaatggtaaattcgggatatggcgtttcacttgatttgcagaccatcaccgaagatactttccgcgaggccatcaacgaagtcctggaaaatgacaagtacactcaagcggttcgcaaattctccgccctttacagggatcgacctttaactcccaggcaatctgttcttttctgggtggattacgttctgaggcatcatggtgctcccaatttgcagagtccagcggtgcacatgggatttgttgagctacacaacttggatatctacgccttggtgcttgcgatcctgatattcttagttttcctaacccggctaactgtgaaatttttgtttagcaagctactgggaaaagctaaagttccagcaagaaagaagaaacaatagttataaatgtatatttttcaaagtgcagctcaacttaaaaatgtgttaaaattgctgtttatagagatatagagatagataattgggtttacattttttaagtatagcttaagacaacaataaccaataaaaagttgaaacaaaagttcaatgttacaaatcacctctctctgcaaatgcaaaagaaataaaaaaagcatatatcttataatccttaaatttctagaaacgccctagagattttcaatcttttcgtgagcctgtgttgctgggcgaacgcaatttatttttaaaattagtttaaaaaaactttatgtttctgcagcccagcaaagctgttaaagccgaagtttaatttcccgttcgtggcattaaatagaaatcaaacggaaactttcccagtcaggcgtcagtccgttaaaaatttaaataaagctcgggctgacaaaagagcaggtagaaacaggtagtaaaagccagccacttccccccccccccctccacactgtcgtcatatgtactaaacatatgtatgaatactatgtgaatatgaatatgtttgtcgggtagagccgtgccgcacttattagtctgttagtctgtctgcacttaaataaatccttcagcaggctcgtcagaaactgtttaccatgaagagcgtaagtggatttgacaactgtcaactggttggtggcttgtggttagtggtgtctcctcgttggatctggctgcctttcgtggttgcctttcgcatgctaatgaccacggcatcttgaaggggcatgtttgtgtgtgtgtgttgggaggggaggggagggggggggtacatgttgcacttgccacttgacattccactccctgtctccgcttctttgcttggcttccttcgaccgggatagcccatcataatttgtatattcctcattaaaatccaataacgaatgggcatcgtggttgggtgagaagaaacaggatttggaggactgctaataaccagttc

SEQ ID NO: 18689 - DNA, 1458 bp, DROSOPHILA
atgtccacggccaaggctctggccgaggcaggacacaatgtcaccgtggtatcgatgatgcagcccaaggtgatgcataaggacatccatctgattgtggtgccagtgacgaaagagcaggagcgtacgctggagaatcaaatggccagtatggccggaagtaaaaataacatcataaccaccatgtatctactcttaaatggcctggatgtgatggtcacttcacaggctgatctgctaaaggatccgagattccaacgcgttttcgagaccaaattcgatttgatgatattgggctcgtttttcaacgactttcaattgggagttgctggcaagctgaaggtacccgtaatagtcgactggatgataccgtcgaacaccatgatcgatgagtttgtggccaatccgtcagaggtctcctatgtgcccaatgagtcaacttttgccaccacgcccatgtcattcttcaaacgagccgagaacttggtaaagcacgtgattcttaaatacttgacgatacgctttaattacaagttcaatcgcatctataacgaaatctttacggataaagatatgccaacgctcagtgagatgaaaaaaaatatatccatggtctttgtcggttcccatttgatcagcgatggtccaatacgaccactggtaccagctattattgaagttggtggtatacaggtgaaggagcagccagatccgctgccccaggacattgaacagttcatggagaactccagccaaggagccatatttctctcttttggttcgaatataaagagttacatggtcaagccggaaatcgttggaatcatgttcaaagtgctctctggcctgaaacagaatgttatttggaaatgggaggatctagagaatacaccaggcaatgcctcaaatattttctacaaggactggctgccccaagatgatatcctggcacatccgaataccaaactctttgtcacacatgccggcaagggcagcatcaccgaatcccagtatcatggtgtcccaatggtggcactgcccattttcggtgaccatccattgaatgcggctctaatggtaaattcgggatatggcgtttcacttgatttgcagaccatcaccgaagatactttccgcgaggccatcaacgaagtcctggaaaatgacaagtacactcaagcggttcgcaaattctccgccctttacagggatcgacctttaactcccaggcaatctgttcttttctgggtggattacgttctgaggcatcatggtgctcccaatttgcagagtccagcggtgcacatgggatttgttgagctacacaacttggatatctacgccttggtgcttgcgatcctgatattcttagttttcctaacccggctaactgtgaaatttttgtttagcaagctactgggaaaagctaaagttccagcaagaaagaagaaacaatag

SEQ ID NO: 18690 - protein, 485 aa, DROSOPHILA
MSTAKALAEAGHNVTVVSMMQPKVMHKDIHLIVVPVTKEQERTLENQMASMAGSKNNIITTMYLLLNGLDVMVTSQADLLKDPRFQRVFETKFDLMILGSFFNDFQLGVAGKLKVPVIVDWMIPSNTMIDEFVANPSEVSYVPNESTFATTPMSFFKRAENLVKHVILKYLTIRFNYKFNRIYNEIFTDKDMPTLSEMKKNISMVFVGSHLISDGPIRPLVPAIIEVGGIQVKEQPDPLPQDIEQFMENSSQGAIFLSFGSNIKSYMVKPEIVGIMFKVLSGLKQNVIWKWEDLENTPGNASNIFYKDWLPQDDILAHPNTKLFVTHAGKGSITESQYHGVPMVALPIFGDHPLNAALMVNSGYGVSLDLQTITEDTFREAINEVLENDKYTQAVRKFSALYRDRPLTPRQSVLFWVDYVLRHHGAPNLQSPAVHMGFVELHNLDIYALVLAILIFLVFLTRLTVKFLFSKLLGKAKVPARKKKQ

SEQ ID NO: 18691 - DNA, 3515 bp, DROSOPHILA
ctccgttggcgcgtgtgtgggtgtgttggtgcgtgttcaactggcattctcatgtgcacttaagagtatgctacgttttagagcggtgatcttgtgcattttgccatcgcgagtgttttgttgtgaaatggctcatcaaaatgtgagagtatttgtgtttttttttatatttttttttaggtgatttgtgctcaataaatgtgaaattaaataatgtacaactttaattgcatggatttattttgaaaagggtgagtcatttaaatttacactttaattttatgagtcctatatttgcaactgaaatataatgaataatttaacgtacggtaacaacaatatgcgtactaaaatccccaagcatttgtttgtttaagcaaataaagaataatttgcacaaatttccatttttggagcaaagaaaatcaaggccttcattcaatcttcacggtataaatatatgtatttgtcgctcttatatcctcgttcacatggttttcagatatacaataattatacctaagtaggttagctacaagactattcgaactatacatgatggggatagtgcaaaattctttgccactgggcgatgagggccatgcacttgggtcgccttcgtgttccttaatatacaacattttgtagcctttcggccacaatatttcataatcaatctctcctcgtttgcttttttggtattccttgcccattttgttcatgattgaaacatttctttaaatatacatttgtatgtttgtttgtgagtgttgtgtgtgtttgttgcgtggtttcatttggttttatctgcctgcggcttgaggtaagtaaatgtggcctagtggggcattggacgagtttcttctggctctgggtgcaataatgagatatgctcttgaggtgggtctatatatatgtacaatcatgatcagcgaactgggtatagtatatgtatgtatgtacaagtggtgtatgtatgtttgcatggtggggactagtttcacagcttgttaatggccgcttgctgcagatcaagggcaacctgctgcttgacctgctcctgtgaggcggccaccgttctgtgactttgatatctttgtcgacgcatcttgcgcggcgttccattggccaactgatcctgctccgtctgctcggcctcctcggcggccgtaaagaatggatgctttagtgcctcttcggcggtaattcgtttatggggattaatctcgagcaggcgatccagtaggtcataggcgctgggtggaaaacattcgtatgcgtccagtggctctgtcaagtaatcgctatcctcgcataggcagttgaagaagtattgatcacaattccggcacacttcgcagcttccgtccacagattcgtagctcttgaggagcttggcatcactaaaaacggaacgatagcgaaagcgcaggcacaactttcgcagattcagtggcctggacctctggctcagggtgatcatacggtcgagagccaaggccgtcttccgtatcgcctgatctccaaatattgttacaatctcggccagcgcgataaaatcgttgggcgctttgaaaaacggatacaccgttgacatgatcgaaaggaatatcacacccgccgcccaaacgtccacggcagtggtctgatctgggtacttgagcagaacctcgggcggccgatagccaggtgttcctgccctggaggcgtgcacctccttcttcatcagacagttgaggcaaactgagggatttgcaaagcaaacgcacttggcattattagccgctgctgccgagacatttcgattcgtattgtacttgctgccagatggcgtcgatgctgtttgatccatctgcgccagttgtggctgtcgttgtgggtgctgctgttgcgactgctgctgcggctgctgctgctgttgcgactgttgttgctgctgctgttgttgctgctgctgttgcggctgcagttgttgctgctcttgctgcactagctgtggctggacgtgattggacccatctactgactgctccggcgcatcgcttggcgcaatatcgttgaccggtttcaggggcatcttgttggactcctcgtgcaaacgcatacgcttcactgctccacccaaaccagcatccagcgcaatttgctgcacatccccctttgattcgcgctctcgtggccgtttgctattattattgttattattgttgttgtttttgttgttggctgcggcgatggcggcggcacttccggaagatcgcgcagccggaggattcacatgctgggccagaccgaaatcgacgaggagaaactctcgccgacgtcgattgtagagaaagttgctcggcttcacgtcgcgatggatgacatcgaacttgtggacatgacgcagtgccaccaggagattgcgcatatactgccggatctcgggcacatccatgcgcgtgtaaaagtcctggaatcggtcatgtgccatgaagggcatcacgaaagcggcggaggcgtcataacgcatgcaacagtggatgcccaccacgttctcctttcccctgagaagcgaattagagcgggaaaacaatagattagttatgcagttatagtttgaatacgcagcttttggctgtaattcccaaccagtgatttgagcaacaggtgtccaccaaccctgattaactttaagggtagttaatgtgattaagctagtcacacatcaaattaattgaactgaacagcaggatttatgcaagtcagctttaccatcttgtttatgttgctttgttgttccgtgtgggaaaaccacaacaacaacagagacgcccacgcacacttccgcccactccatttcagtgagagaaagagagagacagagggagagaggaatggaaagggagagtgattcttcgacgtcacgtagaaccagtgcggacctgatttctagctatttttagctgaatatttgtgacatatatggaatatacaacgtacaacctaatttgacagtttttactactgtttataatagtataagttatttacatatatatttccattacttaaaatgtctgcgtggaatgttgatttcggtgtaacttagaaacagttgatttgattagctactttctagctagtcgcgcagctcgacggtgagcgatgggcgatacggcagatgcgatttgcgaactgggcgctgggccttcgggtgcggaacatggcaagcggcatatgtgaatacgtgagggagcactcggcatggcccagtcataattatcatcggctgtgacgcaattgggtctgcggaatttgcgcaaattgcttgaatagacacaaaatcgcagcgggcagtgggtctacgaggggcaaagatgttgggcggtgggcgatgggtaatcagggggcgggcagccggcttatgtcaaacacgcaacgtcgcccacacacacacacacacacacacacacacaaaatacccactgaccgcccactctctcctctttctaattttctaatttggggta

SEQ ID NO: 18692 - DNA, 1515 bp, DROSOPHILA
atgcgttatgacgcctccgccgctttcgtgatgcccttcatggcacatgaccgattccaggacttttacacgcgcatggatgtgcccgagatccggcagtatatgcgcaatctcctggtggcactgcgtcatgtccacaagttcgatgtcatccatcgcgacgtgaagccgagcaactttctctacaatcgacgtcggcgagagtttctcctcgtcgatttcggtctggcccagcatgtgaatcctccggctgcgcgatcttccggaagtgccgccgccatcgccgcagccaacaacaaaaacaacaacaataataacaataataatagcaaacggccacgagagcgcgaatcaaagggggatgtgcagcaaattgcgctggatgctggtttgggtggagcagtgaagcgtatgcgtttgcacgaggagtccaacaagatgcccctgaaaccggtcaacgatattgcgccaagcgatgcgccggagcagtcagtagatgggtccaatcacgtccagccacagctagtgcagcaagagcagcaacaactgcagccgcaacagcagcagcaacaacagcagcagcaacaacagtcgcaacagcagcagcagccgcagcagcagtcgcaacagcagcacccacaacgacagccacaactggcgcagatggatcaaacagcatcgacgccatctggcagcaagtacaatacgaatcgaaatgtctcggcagcagcggctaataatgccaagtgcgtttgctttgcaaatccctcagtttgcctcaactgtctgatgaagaaggaggtgcacgcctccagggcaggaacacctggctatcggccgcccgaggttctgctcaagtacccagatcagaccactgccgtggacgtttgggcggcgggtgtgatattcctttcgatcatgtcaacggtgtatccgtttttcaaagcgcccaacgattttatcgcgctggccgagattgtaacaatatttggagatcaggcgatacggaagacggccttggctctcgaccgtatgatcaccctgagccagaggtccaggccactgaatctgcgaaagttgtgcctgcgctttcgctatcgttccgtttttagtgatgccaagctcctcaagagctacgaatctgtggacggaagctgcgaagtgtgccggaattgtgatcaatacttcttcaactgcctatgcgaggatagcgattacttgacagagccactggacgcatacgaatgttttccacccagcgcctatgacctactggatcgcctgctcgagattaatccccataaacgaattaccgccgaagaggcactaaagcatccattctttacggccgccgaggaggccgagcagacggagcaggatcagttggccaatggaacgccgcgcaagatgcgtcgacaaagatatcaaagtcacagaacggtggccgcctcacaggagcaggtcaagcagcaggttgcccttgatctgcagcaagcggccattaacaagctgtga

SEQ ID NO: 18693 - protein, 504 aa, DROSOPHILA
MRYDASAAFVMPFMAHDRFQDFYTRMDVPEIRQYMRNLLVALRHVHKFDVIHRDVKPSNFLYNRRRREFLLVDFGLAQHVNPPAARSSGSAAAIAAANNKNNNNNNNNNSKRPRERESKGDVQQIALDAGLGGAVKRMRLHEESNKMPLKPVNDIAPSDAPEQSVDGSNHVQPQLVQQEQQQLQPQQQQQQQQQQQQSQQQQQPQQQSQQQHPQRQPQLAQMDQTASTPSGSKYNTNRNVSAAAANNAKCVCFANPSVCLNCLMKKEVHASRAGTPGYRPPEVLLKYPDQTTAVDVWAAGVIFLSIMSTVYPFFKAPNDFIALAEIVTIFGDQAIRKTALALDRMITLSQRSRPLNLRKLCLRFRYRSVFSDAKLLKSYESVDGSCEVCRNCDQYFFNCLCEDSDYLTEPLDAYECFPPSAYDLLDRLLEINPHKRITAEEALKHPFFTAAEEAEQTEQDQLANGTPRKMRRQRYQSHRTVAASQEQVKQQVALDLQQAAINKL

SEQ ID NO: 18694 - DNA, 2627 bp, DROSOPHILA
atgggtaatcagggggcgggcagccggcttatgtcaaacacgcaacgtcgcccacacacacacacacacacacacacacacaaaatacccactgaccgcccactctctcctctttctaattttctaatttggggtaaattatacagccggacgatgagctgaccggcgacgatacctgccaacccaaaactcctccggttcgaggcggtattgaaccgatttgcccatctaatacgagtagctaatctaatcacctggccattgctctgggcaatcgataaccggcggctgggattgcaggatatgctacaacagtctgaattgaaaaccacgcatgtgtgatgtgcgcgggctgtaaacaaacgttacagctgccacacggaaagaaattttggatatatattgtatagattagctaatatggcattttgatatgcgaaaatggtttaatgtattgagcagaggtgagtctcgaactcgaactcgaacttcctatttatttataatttctttggaacttatcatatcacagcgatatcgaactcttttcttttctctctgtgcactggcagatgcgattttgcataaacaaatgcgaaatgtattcagatctaacatatttcggatataaaagtgatgtgaaatgcgtaaatgaatgcagagaaaggtggcgaatttttctcgctgtgcaccgtgggcttcaatgtaactgtaaatgggcacgtgaatggcgtgtgaaagtgcaataaacgaacgctacaacaatcatgccatctcgcttgccgttcgtgcggcgaaatataaattgcaatgacgtagatggagccgctgccggcggctgacgtcgtttaacggcgtttgacgcagacgaggggacgaagcggcgtgcgtgggtggggtgggtggttggttgtttggtttacaaccagtcgggcgatactataaggatacgggagggcaaaggacacaggacaccaagtggggaaacgaaatgaggaacctaccccattttggtcatgcactgcaactccttcattatcctatccggatgactggttggtatgtgatgcttgatggcgaacttgcgacgcagactgtccggcagatgcgattcccggcgcagtgtgcccagcagcaccgtgctaaaggttccgttgccaatccggctgtgaacatcgaacagcttgccaatgtccgggattcgtgtgaggagatcattgatggcttctgcagcaaaatacaaccaattaaattcatctgtatgcactaacaagttggatcagcaactgaacttaccttcgcttttgttgcgtgcctgtttggttgtacgcggcgtggcgggcagacccatgactgcagctccattgaattccactgtctgctcctcggtggcgcccgcagtggcgaatgctctgcccgaatgcctgcccgcgcttccagttgccggagtgccggtggcatattgctgaacggtctggcgcggcagcctttgggtttgccttggcgccgcacgccaggatccgccaccattggcgtacaccacattggtgctgggcactcccgttttggggcgacgatagtgactgcctggtgtggccaactcctggcacataactcgatcggccattgttcctcaggagcacaatcttcttgggcatcggcgtattgatggtgcttgtggtggttttatggcggtttttacagaaaaaaaaagtgcctaaaaagagcaaattttgacacggaattttttttattaaaaaatttctgttctcggccaggccaaagtgtaaagcaaagtgtttccgaacggttgaacagttttgacatttgccgtatggacgagcggcagcagtaactgagatgacaactcctctactcacttggatagtttttgtttccaatccggagtcctgctgcgccgcccttttaatcccggaactctggctgtggcgcagcgtccgttggttgtatgtggataccctggatggagcacatgaacaactctggtcactggtcgtattgtctgaatcgtgtgttctggtcggcgttccgcgggagctgaggtgctatcaaaccatcgatggcgctactgataatatcgatggttcagttccagccggttcgatgccatcgatggttttttcgagattatggatcagtgtgctcgccgtccgccggggatgtaataccaaaattgcttgtgtgctgcctccaactggtcaccctggtttggcgggaaaatcgcttttccggcggaagtagaagtttataacaaaaatcatatcaattaataatggatcatgatttactagtcatctgcccattcttggattcaaatatcacgtatttctaatttgacattagtaagctctaaaacaaaacaaccctttgtcgtagtaatatatacatttaataattaaatgtaacattttgtgcaccaaagctggcacttgatatactgaaaataccgtgaaatagtatttttcgcagtgtgctccgtgctcgccacgcgttaatcgttttttagtacattcaccacgggcgccggcgtcattgaattgctcgaaatttctgcgaacctacaaaattaatcaactgttattcagacaaaacaaaatgtcattgga

SEQ ID NO: 18695 - DNA, 558 bp, DROSOPHILA
atggccgatcgagttatgtgccaggagttggccacaccaggcagtcactatcgtcgccccaaaacgggagtgcccagcaccaatgtggtgtacgccaatggtggcggatcctggcgtgcggcgccaaggcaaacccaaaggctgccgcgccagaccgttcagcaatatgccaccggcactccggcaactggaagcgcgggcaggcattcgggcagagcattcgccactgcgggcgccaccgaggagcagacagtggaattcaatggagctgcagtcatgggtctgcccgccacgccgcgtacaaccaaacaggcacgcaacaaaagcgaagaagccatcaatgatctcctcacacgaatcccggacattggcaagctgttcgatgttcacagccggattggcaacggaacctttagcacggtgctgctgggcacactgcgccgggaatcgcatctgccggacagtctgcgtcgcaagttcgccatcaagcatcacataccaaccagtcatccggataggataatgaaggagttgcagtgcatgaccaaaatggggtag

SEQ ID NO: 18696 - protein, 185 aa, DROSOPHILA
MADRVMCQELATPGSHYRRPKTGVPSTNVVYANGGGSWRAAPRQTQRLPRQTVQQYATGTPATGSAGRHSGRAFATAGATEEQTVEFNGAAVMGLPATPRTTKQARNKSEEAINDLLTRIPDIGKLFDVHSRIGNGTFSTVLLGTLRRESHLPDSLRRKFAIKHHIPTSHPDRIMKELQCMTKMG

SEQ ID NO: 18697 - DNA, 3345 bp, DROSOPHILA
cattcatgggccgaaaaatatgcaaaatgtgcgagatgtcgaacttttgtaatttaattatgcgacgtcgtcgcactgcagcagttcgtacatttttattgaagcatgtattattttttgttttttttttttttttttggcttcaatttgctggccaaatgcaataaaaatgcaattaaattagccgcaaggcagcggggcataaaaaaaaaattaaaaagagaaacatcaacaagcgcaaattgaataaaggcaaacgtgaaaagcagccgcctctctggaaaatccgtcggaaaagcaaagtcagcaataattgaaaattaaatttttaagggcggaggggcggagtggttggtgcaggggggctgtgcgaggaacgccagcaatttatgcaaatggaaaacccgaaaaaggtttggcgaatcaatcagagcgcatcccgtgacacccagcgaagtgtgttaattgctttcgataacccgtctcaatgccatacgtaatcatatctggcggacaattgatgaattcctgacggaaacttgccacccccgtcccaaactgcttgccccattcgaaatgcaaatggcttcaagttcgggatacgaaaactttcgtggcaaataaacaaaagttgcctctcgcctgctccagctagaccgaaaacttttggccagctcctcgactttagttccctttttaggtttggcagctcgggcataaaattgaaatgcaaatttaagcagaggtaaccatggccgtaaaactaacgacgacagatggccactcacatcacatgcgaacacttcaaggcaacctcaacagtttcggttgataatttgatggaaaaactatttgaataaccgcaggcagggcattcctgcccacaatcccccaattcccccacaatcgccttcctttgcgatttgcatggtgtccatggtggcattgcagccgcaaagtgaacaagccacagacatcaaagggatttcgcggtttcgattcactcactgccatcgctgtgggccacgccctcccgcagaaggaagtatcgcaggccctccatggtgtactgctgcgctgcctggaggggatccaccacgttgtgcttgctctttgacatcttctgcccatcgacggtccaatgcgagtgaacgtacagctgtccaggaggttccaagccggcagccaggaggaaagctgtccagtaaatgccatggaacttgaggatgtccttccctatcacttgctgcgccggtggccagtgggcagaaaactgaaattttaaattaatattaaatgtttaaaaataataaaaactgaataagcggcttgaaacgcaccttttcatctggatatcccacagagctgagatagttgactaaagcatctaaccagacgtagacagtctgcgagtcatcatcgggaacgggaatggcccagtgtacgcggttggaaggacgtgataccgatacatccggcagtggttcgctgagcgtatccagcagaatcttttcgaacttggccggacgtacgcgcgcctccgttttcacccaatggcgcacatcgtcctggaattgtgacagtcgaaacatatagttcgtttcctcggtccactcgacgggatgtccagattccagggagtatcgggtaccagtggcctcgtccaatctcagctgggagtcggtgaggaaggtttcgtcagacacgcaataccaaccactgtaggcggccgaatatatgtggccgcgtgtgtgaagtgtgcgctgaggattaagatttaaaaataattctataaattaataataattcttggccagcattgatagcagcagccccattcttacccagaaattggccactgcccgcttgtggcgatcctccgtggtgcgaataaagtcatcctgctggatgctggcactgcggaagacctctcgatatcgctgcgatatatcatcacagtatttggcaacgggcaccccgtgaagagatgccgcctgctggatctttgtgccgtgctcatccgttcccgtgcagagtcgtacatcctgctctggataccttagcctctggtagcgacagtgggcatcggctatgaccgctgagtacaggtgtccaatgtgaggagctatttgttaaaaattatttctttttattatccgtaatattgactgatttggtctaaaatgcttacctgcatttacatagaaaattggagttgtcacatagtgcgaactgttgtagcgagttcccaaatatctgaggcacttaattcttctaataagcatcactttaaaagctattttaatatacaaataagtaaaaaaaaaaaacgtctaaacaatttgccggttgattttataacattgaacagctgtgccaccagtgctgcccatcactcggctaacagtgcacgtaacagtctcatttgacatagatgcacacttaacagcgtagacgcaaaatttaacggcttaaaattttaaattaaattcaaaagaataaatcaaatatttccatgcaaattaaacttatttaaatatatttatttaatactaacaaaattatcgtgaaacattttaatttttagttataaaaccattatcttttaataggaaacttattaaaccgaaatcgaaacgtaacaaaatatagaaaagatcagttgatccccgaattcggtgctagattttggctgcctgcgccggaaaactttccggccatcttgcgcggaccccagcgcacctgctggcggtgggtcattcgacgagacctctgtgccttctgcttggcctccactgcagcacaggccgctttgtaggccgcctgcttggtcttctcgaagtccgtcttggcctcggtcatctggcgggttagattctccacccggtgcttggcagcctccaggagctgcgtcttctcggccagctcctgctgcgctccactggccacgttctcgatattggccagattggacgtggcggctatcacaaggttcttcagctgattgagttgcgattgggcctcgtgggcagccgatgcggcggcattggcattcgcttgggtgttttgtagggacgaggtcacctcagtgacaaccgcatccgcctcggtcatctcctgctgcagctgttcaacaatctgctgctttccggccagtgccgcctccgccgcacgagcggattgagctgccttggcggccagttcgtttttgacctgggatgcagccgcctcggcagctgccatctgcgaatcgctggctgccttggcctcctgggcggctttttgggcaatgttggaggccttctgcttgggatctccgcgaccaaagacgccggttccgctgct

SEQ ID NO: 18698 - DNA, 1131 bp, DROSOPHILA
caaattgtttagacgttttttttttttacttatttgtatattaaaatagcttttaaagtgatgcttattagaagaattaagtgcctcagatatttgggaactcgctacaacagttcgcactatgtgacaactccaattttctatgtaaatgcagctcctcacattggacacctgtactcagcggtcatagccgatgcccactgtcgctaccagaggctaaggtatccagagcaggatgtacgactctgcacgggaacggatgagcacggcacaaagatccagcaggcggcatctcttcacggggtgcccgttgccaaatactgtgatgatatatcgcagcgatatcgagaggtcttccgcagtgccagcatccagcaggatgactttattcgcaccacggaggatcgccacaagcgggcagtggccaatttctggcgcacacttcacacacgcggccacatatattcggccgcctacagtggttggtattgcgtgtctgacgaaaccttcctcaccgactcccagctgagattggacgaggccactggtacccgatactccctggaatctggacatcccgtcgagtggaccgaggaaacgaactatatgtttcgactgtcacaattccaggacgatgtgcgccattgggtgaaaacggaggcgcgcgtacgtccggccaagttcgaaaagattctgctggatacgctcagcgaaccactgccggatgtatcggtatcacgtccttccaaccgcgtacactgggccattcccgttcccgatgatgactcgcagactgtctacgtctggttagatgctttagtcaactatctcagctctgtgggatatccagatgaaaagttttctgcccactggccaccggcgcagcaagtgatagggaaggacatcctcaagttccatggcatttactggacagctttcctcctggctgccggcttggaacctcctggacagctgtacgttcactcgcattggaccgtcgatgggcagaagatgtcaaagagcaagcacaacgtggtggatcccctccaggcagcgcagcagtacaccatggagggcctgcgatacttccttctgcgggagggcgtggcccacagcgatggcagtgagtga

SEQ ID NO: 18699 - protein, 356 aa, DROSOPHILA
MLIRRIKCLRYLGTRYNSSHYVTTPIFYVNAAPHIGHLYSAVIADAHCRYQRLRYPEQDVRLCTGTDEHGTKIQQAASLHGVPVAKYCDDISQRYREVFRSASIQQDDFIRTTEDRHKRAVANFWRTLHTRGHIYSAAYSGWYCVSDETFLTDSQLRLDEATGTRYSLESGHPVEWTEETNYMFRLSQFQDDVRHWVKTEARVRPAKFEKILLDTLSEPLPDVSVSRPSNRVHWAIPVPDDDSQTVYVWLDALVNYLSSVGYPDEKFSAHWPPAQQVIGKDILKFHGIYWTAFLLAAGLEPPGQLYVHSHWTVDGQKMSKSKHNVVDPLQAAQQYTMEGLRYFLLREGVAHSDGSE

SEQ ID NO: 18700 - DNA, 4055 bp, DROSOPHILA
gtaaaatatcatagttaagagttagatctacgggggtagcgaattattgattttccaattgaacttgaaaaatcaataccaactgacccccgctgagacacatcgctgagcctttgaaccggcaccagatgttttcccttagcataattgatactatttgcaaagcaattacctaacctcgtgttctccacttgcttccccacagattaaaatgcccgaactgaccgaaatcaagagcgaggctgcgccctccacctccgctgaggcgaaacccgaggacgtccgcgttgaggatgatggcagtgatagcgactccgatggtggcatgcctggtctggaggaggctgtagcggccaccacacagctgggtggaggtgccaccggtctgcccatcgacctcgtctcaaaggccaagcaatcgcgcggcgagaaaaaggccaggaagatcatgctgaagctgggacttaagcagatccagggcgtcaaccgggtgacgatcaggaagtcgaagaacatcctgttcgtgatcaacaacccagatgtgtacaagaacccccacagcgacacctacatcgtgttcggtgaggccaagatcgaggatctgtcgcaacaggcccaggtggctgccgccgagaagttcaaggccccggaggctgctggcgctgcagacagcgtgggcgccaccacatcggtggcccccattgccgaggaagacgaggaggatgtcgatgacaccggcgtggatgagaaggatatcgagctggtcatcacgcaggccaacacgacgagggccaaggcgatcaaggctctgaagaacaacaacaatgacatcgtcaacgccatcatggagcttactatgctttagagcgggcttcagcgttagctgcactcctgattttgttgtttacccgcctttcgataatactgacccaaatgttgtgcatgcccctcaaggggcagcatgttacaccagtcgaacatttaattatatttcaaaagattgcgtcttaataaaaatggatttatttcaaatcaaatacgattgcgtgtatttttcgactagtttcggttttccactaggtggtgtgggtgtctttacttgccttgctaaccgaattcgattaagtatacattgaggttccaggttaagtactttgagattagggactggcacataagggattctattctgtattagctattaatgttcaggttgcagccagcttgaggacgcgggcctgactacgcgaggagaggcgaatatccgctggactctgcatccagggttcgccatccgcctgcattggcacggtctccttgacttgtagctaaaaaaaagattgttggttaacaaatattcggttccatcactgcagggcttacccttatttgcttggcttggccaattcgcactggtttgcttatattgcactgcagttgggcaatgtggaaagaggaaacaatgccgaacacctccatcataccatcggagatggagtttacaatgcgcacttcaccattggcgttgcttagctcgcagagcttgcagccagctccccatgagtcgatatttaggaacaccagcgcctgcagctcaggcagttgcactggcttgttgtccagatacaaggtcagcttttcctcgatgtgttcgcagccaggttgcatcacctgttgcgttccgaaggtaaagtacagcagctgacgagatggatacattagttaacgttaagtaagcacactagattgtagcctaccttattgaatattcgactgctgagcagatagaatcgagattcgcgcgtcttgtggaagttgtaagtgatgtacgcatccacacctacactgaaatagttgtacacatgaatcgtcttcgtgggatgcctctgaataggcagtcgatagtgcagtttctctatttgcaggtcaaagcggtcgagattcacggaacgtgctcgccgtatgctcctaaggatcttcaccgggtcgagaacagagggcggctctgctccccagcccagaactcgcgacaaatcgttgccggtgcccagcggcatgatggccaccgagggctggggcttgatattcagcgtatagattgtattgagcacccaaccgatggtgccatcgccgcccgccaccagtatgcgacacgggcgaggactggctttggcggcccactgcagggcgtcctgcggacccctcgagcccagttccatcacctgcagcggatgcaggtaaccgcggagcagggacaacacattggcacccgtactgctgcccgacttggtgttggcgatcacaataagcggctcccagttctcaatgtctggcggcgtaatgctggccaagtggagccgcatcgagtctctggttcgggcggccacaaagctgtatggcgggaagatcatgtccttgaactcgcccaagtcgcaggcttccatggagtcagcgcgagtgtagcaatcgttatgatagcaccgctgacaccatgcacatcgccatccgtataatcctggatcggtgctgacatggtgatccacctcctcgttgcagtcggcacaatgcactcccataggcagattgccatgcacccacaagtgccgcacggaggactcgttgcgcaaccacttgtccttgcaccggtactccctgtccgccctccgctggcaagggggcgtggcatgggtgcacaggccgcagcagtcgcaaaagagtcctgcggagggggttagcaggatctcgcacacattgcagaagcaggcctagaatgaagggcatgtatcctatggtatctctttcgcggcaagtgaatccgctcacctgttccaacacttttattgatttccagctgtgacgtgttttgaaggtgctcacaaagtcctcggaaagcaggctgcggcagaaggcaaagaggatactgagggccagcagggatcctatcagcgcctccacgctcagctcaatagtgcctatgtccatggtccacgcagataaggcccaattacgctaaatatcctggtaatttggcatattcacaaatcgtttgtttttgccccatcgaccagtgtgaccgcttcaaagacaacaaaaaacaccttcgacctcaattaaaaacacttttcaagaataagcactaatgcgtaatttcgataggcggagtgacactagtatttagattcaggacgtttccaacactgcttgtcaactcaacctaacaaatcagctgtgagtttggcgtgtggaaaaagtttgattgggaacaaatcggacgtctttaacaaaaatctagccaacatgaaggttatctacaacaccctgttcaagcgcacctccacctacgccgtggccatcatcgcgtcggcctttttcttcgagcgcgctctcgatgtcacgtcggttgcgattttcgagggcatcaacaaaggcgtaagtataatcctgttatgtaagcaaagtttcctggccaaatctcaagatttccccgctttgcagaaactctggaaggacatcaagggcaaatacgaataaattaacatgatttgttgtaattagcaataataatcaacgtttattctaaacgaaacgataactaagtgtggtttcttttggttattttgatttgggtgcttccagtgcgtcttccgacacctcccagggcttctcatgcctcttctcatcccagggctgctcgttgggcaggcgagagggttccttgaaggacaccccattatcctgaatggtttgaagcagcttctgcagcttgctacccggtaccgcctccacgttgcaggtcatttccgtgatcccagactgcaggcagcgctgtgcgagcactctgccgagatttacaaacgcagatgtgtcgttggtcttgtacaactgctgtttaatggcccattccgaggtgctggcactcaggatggttccattctcaaagtgcttgacatcgccgctgacatagcggccgctggtgttgatttccaaagtgtgccagtaggaacgacctggtttctccagatgatagcctaccggcttgtaggcaatgcgtaatc

SEQ ID NO: 18701 - DNA, 1886 bp, DROSOPHILA
caaaaacaaacgatttgtgaatatgccaaattaccaggatatttagcgtaattgggccttatctgcgtggaccatggacataggcactattgagctgagcgtggaggcgctgataggatccctgctggccctcagtatcctctttgccttctgccgcagcctgctttccgaggactttgtgagcaccttcaaaacacgtcacagctggaaatcaataaaagtgttggaacaggcctgcttctgcaatgtgtgcgagatcctgctaaccccctccgcaggactcttttgcgactgctgcggcctgtgcacccatgccacgcccccttgccagcggagggcggacagggagtaccggtgcaaggacaagtggttgcgcaacgagtcctccgtgcggcacttgtgggtgcatggcaatctgcctatgggagtgcattgtgccgactgcaacgaggaggtggatcaccatgtcagcaccgatccaggattatacggatggcgatgtgcatggtgtcagcggtgctatcataacgattgctacactcgcgctgactccatggaagcctgcgacttgggcgagttcaaggacatgatcttcccgccatacagctttgtggccgcccgaaccagagactcgatgcggctccacttggccagcattacgccgccagacattgagaactgggagccgcttattgtgatcgccaacaccaagtcgggcagcagtacgggtgccaatgtgttgtccctgctccgcggttacctgcatccgctgcaggtgatggaactgggctcgaggggtccgcaggacgccctgcagtgggccgccaaagccagtcctcgcccgtgtcgcatactggtggcgggcggcgatggcaccatcggttgggtgctcaatacaatctatacgctgaatatcaagccccagccctcggtggccatcatgccgctgggcaccggcaacgatttgtcgcgagttctgggctggggagcagagccgccctctgttctcgacccggtgaagatccttaggagcatacggcgagcacgttccgtgaatctcgaccgctttgacctgcaaatagagaaactgcactatcgactgcctattcagaggcatcccacgaagacgattcatgtgtacaactatttcagtgtaggtgtggatgcgtacatcacttacaacttccacaagacgcgcgaatctcgattctatctgctcagcagtcgaatattcaataagctgctgtactttaccttcggaacgcaacaggtgatgcaacctggctgcgaacacatcgaggaaaagctgaccttgtatctggacaacaagccagtgcaactgcctgagctgcaggcgctggtgttcctaaatatcgactcatggggagctggctgcaagctctgcgagctaagcaacgccaatggtgaagtgcgcattgtaaactccatctccgatggtatgatggaggtgttcggcattgtttcctctttccacattgcccaactgcagtgcaatataagcaaaccagtgcgaattggccaagccaagcaaataaggctacaagtcaaggagaccgtgccaatgcaggcggatggcgaaccctggatgcagagtccagcggatattcgcctctcctcgcgtagtcaggcccgcgtcctcaagctggctgcaacctgaacattaatagctaatacagaatagaatcccttatgtgccagtccctaatctcaaagtacttaacctggaacctcaatgtatacttaatcgaattcggttagcaaggcaagtaaagacacccacaccacctagtggaaaaccgaaactagtcgaaaaatacacgcaatcgtatttgatttgaaataaatccatttttattaagacgcaa

SEQ ID NO: 18702 - protein, 534 aa, DROSOPHILA
MDIGTIELSVEALIGSLLALSILFAFCRSLLSEDFVSTFKTRHSWKSIKVLEQACFCNVCEILLTPSAGLFCDCCGLCTHATPPCQRRADREYRCKDKWLRNESSVRHLWVHGNLPMGVHCADCNEEVDHHVSTDPGLYGWRCAWCQRCYHNDCYTRADSMEACDLGEFKDMIFPPYSFVAARTRDSMRLHLASITPPDIENWEPLIVIANTKSGSSTGANVLSLLRGYLHPLQVMELGSRGPQDALQWAAKASPRPCRILVAGGDGTIGWVLNTIYTLNIKPQPSVAIMPLGTGNDLSRVLGWGAEPPSVLDPVKILRSIRRARSVNLDRFDLQIEKLHYRLPIQRHPTKTIHVYNYFSVGVDAYITYNFHKTRESRFYLLSSRIFNKLLYFTFGTQQVMQPGCEHIEEKLTLYLDNKPVQLPELQALVFLNIDSWGAGCKLCELSNANGEVRIVNSISDGMMEVFGIVSSFHIAQLQCNISKPVRIGQAKQIRLQVKETVPMQADGEPWMQSPADIRLSSRSQARVLKLAAT

SEQ ID NO: 18703 - DNA, 4605 bp, DROSOPHILA
aaacgaaattcgctctgcatttccgcaatggctgtgaatatatcatgaacggcgcgtggtataacgcccacatggtcatctaacactccgttgaaggcggtgcccatagtgtaggtctttccggaacccgtttgtccatatgccaagattgttacgttatagccatttaacagctttttcactttggcctgtacacacgtctcgaatagatccttttgcgagtcgtcaatgtcgaagacatagttgtacgtatacgactcattccggttgactgtaacctgtggcgctccatccgccgatcgttcgacggcaatccggcagccgcgatccaactcggactgcaccaaggggcgcacgcgcaaggccactgccacacagctgggatcctcgctggacatctgggggtagggggagggaaggacaatcataacattccatcacctttaccgccatctcgaccaacaccaccaaccacttaccttctctggggcacagcaagtccgactttggttaactgatcaactggttagcacttacaaaaacttagaattttggttggtctagattttggagcaacgcggcttctccacgcgcagcccggcactctcaatgaattcgatttttggatcaaggaactaaactaatgaaacgcgacgctaagaagcaaatgcatttctgccagtatttttaaaaatggcgttgttatcgattcgttgcagatgtcgattagtggcgcgatcgacggaggtgccggtgtagaaagatttcgatttttttataatttggctcttgaatagcacatttgcaaaaatgtggttggacgatttgtgcacgccgatttgacaaaatgaatcattgacagtgtatctacatacttatacataaaaataaaagctacctagatctacaactattttagctactgccagtgataagagcccaattcttgtcaactagccaattcgccgatagccgatagcagacagccgcacatatctatcgcttttttgaacaatcgttggtagcaacagggaattgcagaaaccagttgtcttgggtttcgcaagaattggaaaaggaggatctggtcaaagagcaggacatggaggaagaggcgccgcggttcaatgtgctggaggaggcgttcaacggcaatgggaacgggtgcgccaacgtggaggccacccaatcggccatattaaaagtgctgacgcgcgttaatcgcttccagatgcgcgtccgcaagcacatcgaagacaactacacggagtttttgcccaacaacacgtcgccggacatatttctggaggagtcggggtccttgaatcgcgagattcacgacatgctcgagaacttgggttccgagggactggacgccttggacgaggcgaatgtcaagatggcgggtaacggcaggcagctgcgagagatccttttgggtctgggtgtcagcgagcatgtgctaaggatcgacgagctgttccagtgcgtggaggaggccaaggccaccaaggattacttggtgttactggaccttgtcggtcgtttgagggctttcatctatggcgatgattccgttgacggggacgcgcaggtggccacgccagaggttcgacgcatctttaaggctctcgagtgctacgagaccatcaaggtgaaataccatgtacaggcatatatgctgcagcagagcctccaggagcgcttcgatcgcctggtgcagctgcagtgcaaatcctttcccacatcgcgttgcgtcaccttgcaggtgagccgggatcaaacgcagctgcaggatattgtgcaggctctcttccaggagccctacaatccggcgcgcctctgcgaattcctgctggacaattgcatagaaccggtgatcatgcgcccagtgatggccgattacagcgaagaagccgatggtggcacctacgttcgattgtcgctttcctacgccaccaaggagcccagctcagcgcagcttcgcccgaactacaagcaggtcttggagaacctcaggctgctgctgcacacgctggccgggatcaactgcagtgtgtccagggaccaacatgtttttggcattattggcgatcatgtgaaggataaaatgctgaaattactggtggacgagtgcctgataccagctgtgcccgaaagcacggaggagtatcagacatccacgctgtgtgaggatgtcgcccagctggagcagctgcttgtagactcattcatcatcaatcccgagcaagatcgagccctagggcagtttgtagagaagtacgagacctactaccgcaatcggatgtatcgtcgagttctggaaacggcgcgggagatcatccagcgcgatctgcaggacatggtgctggtggcgcccaacaaccactcagccgaagtggcaaacgatcccttcctcttcccacgctgcatgatctcgaaaagtgctcaggtaagtcgttcgctaaacgaaacgattgattacgcactaatggattcattttcgccggcaggactttgtcaaactaatggaccgcattcttcgccagcccacggataaactgggcgaccaagaggccgatcccatagccggcgtcatttccatcatgctgcacacctacatcaatgaggtgcccaaggtgcaccgcaagctgctcgagagcattccacagcaggccgtcctgttccacaacaattgtatgttcttcacacactgggtagcgcagcatgcgaacaagggcatcgaaagcttggcggcgctggccaagacactgcaggccaccggtcagcagcatttccgcgtgcaggtcgactaccaatcctccatcctgatgggcatcatgcaggagttcgagttcgagagcacgcacacgctgggctctggtccactgaagctggtgcgtcagtgccttcgccagctggagctgctgaagaacgtgtgggccaatgtgctcccggagaccgtgtacaatgcaaccttctgcgagctaatcaacacatttgtcgccgagctaatccgtcgagtgttcacgctgcgcgacatttccgcacagatggcctgtgagctgagcgatctcattgacgtggtgctccagcgggcgcccacgcttttccgcgaaccaaacgaggtggtccaggtgctctcttggcttaagctgcagcaactgaaggccatgctgaacgcgtcgctcatggagatcacagagctgtggggcgacggcgtcggcccgctgaccgccagctacaagtcggatgagataaagcacctaatcagggcgttgttccaggatacggattggcgggccaaggccattacgcagattgtatagggcgcgtgcgccttttttgcgagcgaggaatgttgaacggcggatagacatcacatttgaggtggtaaacggagtctaaatttgatgatcaccatcaatgtgtccttactttaattccttgaattgtttaccacaaatgccaaaagtaatagaatttgataatctttaattctccgaatggtttctgttgtacatagaaaagtaattatccacaaaaatccattccattcttcccgcaacgcaacacaatatttaacttaagacttatttaaatgaataaaaacaactaaatcccattagtgcgcctcttgtcgcgcttgtagaacgagcatgtatagctgctcagtaagcagtctgtgatctcggccgtgggtgacggttaggatgcgttgggcctcctccagatggtgcagtgcctccttggaatggccctcgtagagctgaatcttgcccagcttcatgtgaagcaggcccaatagcggattccagggtccgtggtattttcgaaagcctggcagcaaacgttgcccgtaatccagggcgtcgctccacttgcccacttcgatggctgcttcgaaggccgcatcgagcgtcttgacgtaccacacattcaggggatggaacacgccagtctgcttgtccagacacaccttgcacacatcgagatctgtgatcgagagagtgaaaatgtgcttattatggagctaattccatttcgtcgcatctactcacaggccacgtccttcatgttctccagattgtgccgggtcagagtcatcgcctcgttgaaggcatttctcaacttgggactgatgccggcatcgcatcgcgggcaattattgcggtccacactgattcccgcaccgcagttgcgattgggacacagggcagccagcatctccttcgattccttggcatccgtgcacttgctgcacacgcataggaagtagtagtgctccttgaggtccagacgcctctgctccggcgtattgagcaggtcgatgtagctgatgaagattttcgaccagtccaggcattccatgtcctcgatcgcgtggacgtgcagctcgttgccctcgaaggtggcgaccgcatttggctggcagctatggtccgtaatcgagacgcccagatatatggccgtggcaattgagttcatctcggcgtccaagatattgaagccattggtgatcagctgcaaagagcagagaagaaagagcatgagctcccgcgtaactgtgcgccggggaatgtgaaccgaagcccttcctagata

SEQ ID NO: 18704 - DNA, 2544 bp, DROSOPHILA
cgcttttttgaacaatcgttggtagcaacagggaattgcagaaaccagttgtcttgggtttcgcaagaattggaaaaggaggatctggtcaaagagcaggacatggaggaagaggcgccgcggttcaatgtgctggaggaggcgttcaacggcaatgggaacgggtgcgccaacgtggaggccacccaatcggccatattaaaagtgctgacgcgcgttaatcgcttccagatgcgcgtccgcaagcacatcgaagacaactacacggagtttttgcccaacaacacgtcgccggacatatttctggaggagtcggggtccttgaatcgcgagattcacgacatgctcgagaacttgggttccgagggactggacgccttggacgaggcgaatgtcaagatggcgggtaacggcaggcagctgcgagagatccttttgggtctgggtgtcagcgagcatgtgctaaggatcgacgagctgttccagtgcgtggaggaggccaaggccaccaaggattacttggtgttactggaccttgtcggtcgtttgagggctttcatctatggcgatgattccgttgacggggacgcgcaggtggccacgccagaggttcgacgcatctttaaggctctcgagtgctacgagaccatcaaggtgaaataccatgtacaggcatatatgctgcagcagagcctccaggagcgcttcgatcgcctggtgcagctgcagtgcaaatcctttcccacatcgcgttgcgtcaccttgcaggtgagccgggatcaaacgcagctgcaggatattgtgcaggctctcttccaggagccctacaatccggcgcgcctctgcgaattcctgctggacaattgcatagaaccggtgatcatgcgcccagtgatggccgattacagcgaagaagccgatggtggcacctacgttcgattgtcgctttcctacgccaccaaggagcccagctcagcgcagcttcgcccgaactacaagcaggtcttggagaacctcaggctgctgctgcacacgctggccgggatcaactgcagtgtgtccagggaccaacatgtttttggcattattggcgatcatgtgaaggataaaatgctgaaattactggtggacgagtgcctgataccagctgtgcccgaaagcacggaggagtatcagacatccacgctgtgtgaggatgtcgcccagctggagcagctgcttgtagactcattcatcatcaatcccgagcaagatcgagccctagggcagtttgtagagaagtacgagacctactaccgcaatcggatgtatcgtcgagttctggaaacggcgcgggagatcatccagcgcgatctgcaggacatggtgctggtggcgcccaacaaccactcagccgaagtggcaaacgatcccttcctcttcccacgctgcatgatctcgaaaagtgctcaggactttgtcaaactaatggaccgcattcttcgccagcccacggataaactgggcgaccaagaggccgatcccatagccggcgtcatttccatcatgctgcacacctacatcaatgaggtgcccaaggtgcaccgcaagctgctcgagagcattccacagcaggccgtcctgttccacaacaattgtatgttcttcacacactgggtagcgcagcatgcgaacaagggcatcgaaagcttggcggcgctggccaagacactgcaggccaccggtcagcagcatttccgcgtgcaggtcgactaccaatcctccatcctgatgggcatcatgcaggagttcgagttcgagagcacgcacacgctgggctctggtccactgaagctggtgcgtcagtgccttcgccagctggagctgctgaagaacgtgtgggccaatgtgctcccggagaccgtgtacaatgcaaccttctgcgagctaatcaacacatttgtcgccgagctaatccgtcgagtgttcacgctgcgcgacatttccgcacagatggcctgtgagctgagcgatctcattgacgtggtgctccagcgggcgcccacgcttttccgcgaaccaaacgaggtggtccaggtgctctcttggcttaagctgcagcaactgaaggccatgctgaacgcgtcgctcatggagatcacagagctgtggggcgacggcgtcggcccgctgaccgccagctacaagtcggatgagataaagcacctaatcagggcgttgttccaggatacggattggcgggccaaggccattacgcagattgtatagggcgcgtgcgccttttttgcgagcgaggaatgttgaacggcggatagacatcacatttgaggtggtaaacggagtctaaatttgatgatcaccatcaatgtgtccttactttaattccttgaattgtttaccacaaatgccaaaagtaatagaatttgataatctttaattctccgaatggtttctgttgtacatagaaaagtaattatccacaaaaatccattccattcttcccgcaacgcaacacaatatttaacttaagacttatttaaatga

SEQ ID NO: 18705 - protein, 721 aa, DROSOPHILA
MEEEAPRFNVLEEAFNGNGNGCANVEATQSAILKVLTRVNRFQMRVRKHIEDNYTEFLPNNTSPDIFLEESGSLNREIHDMLENLGSEGLDALDEANVKMAGNGRQLREILLGLGVSEHVLRIDELFQCVEEAKATKDYLVLLDLVGRLRAFIYGDDSVDGDAQVATPEVRRIFKALECYETIKVKYHVQAYMLQQSLQERFDRLVQLQCKSFPTSRCVTLQVSRDQTQLQDIVQALFQEPYNPARLCEFLLDNCIEPVIMRPVMADYSEEADGGTYVRLSLSYATKEPSSAQLRPNYKQVLENLRLLLHTLAGINCSVSRDQHVFGIIGDHVKDKMLKLLVDECLIPAVPESTEEYQTSTLCEDVAQLEQLLVDSFIINPEQDRALGQFVEKYETYYRNRMYRRVLETAREIIQRDLQDMVLVAPNNHSAEVANDPFLFPRCMISKSAQDFVKLMDRILRQPTDKLGDQEADPIAGVISIMLHTYINEVPKVHRKLLESIPQQAVLFHNNCMFFTHWVAQHANKGIESLAALAKTLQATGQQHFRVQVDYQSSILMGIMQEFEFESTHTLGSGPLKLVRQCLRQLELLKNVWANVLPETVYNATFCELINTFVAELIRRVFTLRDISAQMACELSDLIDVVLQRAPTLFREPNEVVQVLSWLKLQQLKAMLNASLMEITELWGDGVGPLTASYKSDEIKHLIRALFQDTDWRAKAITQIV

SEQ ID NO: 18706 - DNA, 3602 bp, DROSOPHILA
ctggaggagttgcgtggtggcaaagggacggcaaagggacgagacaaggataaaaggcatcctggcaggtcggctgctctctgcggcggacacgtgaaaccatcatcaatctgagagcactggcaacgacagttttaacgacttcttgcggattacttcaaacaaaataaccactttgtagtaggaattttatgttggcccggttggtgttgatggctttggcttctgcaaaggagcgaagatattccgctgcatttggccaaagttttgctgcgtgccgcaaagtttatccatccccgcccggtatccaagtatccgagaatcccaaataccatgaccaactatccgcagggcaaattgcaggacctcgactcctgcaaaagcaacagccgcaggagacgggcatataaatatttattgatactgcagccacgtggcataatttgcctataccataaccaagtgcagtaattttgcttggccaaaatcccaacttcttccacatctctcggtgcattttctcggttttttaagggcgaagttacttggaaactattaaatatgtgcttgtgtgttgtcaaaacaattttaggttccctaattcaatttcccacaggagagtcttgtaaaaatgactgctaaagcaaaatcaattcaattattactttcctttatgctagtttatgttttaaacgaagagtacaaggacagtgaaatatggttatttggtttaatagcatccaaagtaaatacataaattaattacacaaaaagcgaaatactccagaagtacatagatgcatttttacaaccatgatgtataagaaatcaatcattcgaagaaaatttcactttaattcaaggttaagtaacaatacaaattatagaacacttttttatatacggcaacttctttctttattaaacgtacactcagctaatctgcactgtttataaataaaatcattttacatcaaaattgaatgttcacattataattataaaatgatttatttatttttcacagcatctgcgcccaagttggtacataccaagctctagtcaaaaatgccctcctcggcagccttgttgaccagagccttaagaccagcggtgacctcgagacccacctcggtgatctggttggagggcaggaagaatccgaaggtgcccttgtcacgcagttccacggtgcaggtgaatgggattttctttacgccataggcccaatccttggcagctcccgaaacgacatctatacgatgaaagtcattaagtcttactagatactcccaactatttcgataaacctacagttaagcagaccactagctccataggtgaaggtggaaccatagacatcagcggcagcatcggagaatgcagcggcaatgcgcttcatctgctcgtagttgggcgggaactcggtgttggagtgtccgtagggcaggaggacatactgtccgtaggcatggtaggccatgtacgatcggatgtagccatcctcgaaggagctcacaaagttctgcagcgagatgatctccacctcggtgttgggctcctcaccaccgaaccagtgatcgcagggctcatcgatgttccagccggcaccttcaagtaattgattattaataatcagcggattaattagtaattattagaccatacctccccagtggtagtcaaagttgcggttcatgtcaatgccgtagcaatctccactttcgttgcggtatccgttgggacgacggttcttgcgccacaaacgctccacctcgtgggtgtaaacgaagccatccgggttcaccatgggcaccacaatccaatcgtactcttcgctcagtcgctgcatttccggatcctcggagttgatcaactggttcaacaggaaggtgacggtggccgacgagatccactccatggcatggatgttgccctccaggaagatggccttgttgcccgaacgcttcgacaacctaatgctcttgatgtcgcgaccctcgtaggactgtccaatcaccttgcactccaggaaatcgtgggcagcacactcctgatcgatccaatcgtaaatggtgtccagagtgtggtaggtctcccattccatctgggaatcgtcgccaacagaggattcatctatcaatctgcgaggattcaagtgtagatttttgtaatgttataactcatctgagaatctagtactcacttctgcagatcgtcgacaatcacttcgtaaacaatttcgaggaatttaagggtcttctcgagggctctgtggaacaagggaccaacgatcacattgtatttgtttccaacagcacccagttcgttgaggaagtgcacctttaaattggatcaagtcaagacatacatatatgattttcagaaatggaatggaatttgtatgtacttacagagatgtgttcgtgaatcttcttaagctcctccatctgcaagttcgtctcaatggtcagctgatagatacggaagtggtcgtaccgggcggccatgcgaccaggtgcggacttggccgccaccatggccacaagggttatcagaaggattggtagtttcatttcggaggtttggtgtcttgaacgttacagcgttcactgtgaggagtcccttcacagtcgtgctttttattagctccaggagtggccactcaaacggaacgttatctaatggcgataggggatcagtcatctggcgtgtgtctcctttgatctaatcgcccatccaacctaccacaaagtagctctggactttgtctttcgaaccagacgtgtctaaagatggttgatacacaagaaaatttaattaaagtaattataaaaaagatttaagatatttcaacttggccaaataaacttatcccgaaacatgacctaattttttatgttgtattgttttcgaaagaccagagtatatgcaaataacctaattaaaatttaactaatattatcaatttcttaagttcatgtaaaaacttatatcgaatatccaagttacctttacaaatactagtataaatgacaataaactggtatcaaatttttctcggtgaacttcctctaacaaagtcagcggagtcaaatttgtaagtgaaatcatgcaccgagtgtggaggcactcgccttatcaggcatgttcaattaattaaatactcctccaggcgtctgcacgtgaaggagcacttcgagaagcgtttgtagaatgcactggcaaactgaagatcgtcatcttcaagtgacagactgggtggggaagaaaagccgtcaaacattcgattgtgaaaccattcattcgtttaattttactatttaagcagtgcagttattgctagtcactgcagaaattaatcatgccactgagcctaatctgtgatgttcctttccttccctttgagtaagccacttaaaatgttgcggtgttatcaatttgtttttaatgtttttcttttatgtaaaattataactgcattatcaaaaactaaaatattacgttagtagaagattgcaagcaaaggtgacccaaacagtgaactacacctttgaaaaaatatttaacacttgctttgaataattacgaaaaagaactag

SEQ ID NO: 18707 - DNA, 1353 bp, DROSOPHILA
aacgttcaagacaccaaacctccgaaatgaaactaccaatccttctgataacccttgtggccatggtggcggccaagtccgcacctggtcgcatggccgcccggtacgaccacttccgtatctatcagctgaccattgagacgaacttgcagatggaggagcttaagaagattcacgaacacatctctgtgcacttcctcaacgaactgggtgctgttggaaacaaatacaatgtgatcgttggtcccttgttccacagagccctcgagaagacccttaaattcctcgaaattgtttacgaagtgattgtcgacgatctgcagaaattgatagatgaatcctctgttggcgacgattcccagatggaatgggagacctaccacactctggacaccatttacgattggatcgatcaggagtgtgctgcccacgatttcctggagtgcaaggtgattggacagtcctacgagggtcgcgacatcaagagcattaggttgtcgaagcgttcgggcaacaaggccatcttcctggagggcaacatccatgccatggagtggatctcgtcggccaccgtcaccttcctgttgaaccagttgatcaactccgaggatccggaaatgcagcgactgagcgaagagtacgattggattgtggtgcccatggtgaacccggatggcttcgtttacacccacgaggtggagcgtttgtggcgcaagaaccgtcgtcccaacggataccgcaacgaaagtggagattgctacggcattgacatgaaccgcaactttgactaccactggggaggtgccggctggaacatcgatgagccctgcgatcactggttcggtggtgaggagcccaacaccgaggtggagatcatctcgctgcagaactttgtgagctccttcgaggatggctacatccgatcgtacatggcctaccatgcctacggacagtatgtcctcctgccctacggacactccaacaccgagttcccgcccaactacgagcagatgaagcgcattgccgctgcattctccgatgctgccgctgatgtctatggttccaccttcacctatggagctagtggtctgcttaactatgtcgtttcgggagctgccaaggattgggcctatggcgtaaagaaaatcccattcacctgcaccgtggaactgcgtgacaagggcaccttcggattcttcctgccctccaaccagatcaccgaggtgggtctcgaggtcaccgctggtcttaaggctctggtcaacaaggctgccgaggagggcatttttgactagagcttggtatgtaccaacttgggcgcagatgctgtgaaaaataaataaatcattttat

SEQ ID NO: 18708 - protein, 422 aa, DROSOPHILA
MKLPILLITLVAMVAAKSAPGRMAARYDHFRIYQLTIETNLQMEELKKIHEHISVHFLNELGAVGNKYNVIVGPLFHRALEKTLKFLEIVYEVIVDDLQKLIDESSVGDDSQMEWETYHTLDTIYDWIDQECAAHDFLECKVIGQSYEGRDIKSIRLSKRSGNKAIFLEGNIHAMEWISSATVTFLLNQLINSEDPEMQRLSEEYDWIVVPMVNPDGFVYTHEVERLWRKNRRPNGYRNESGDCYGIDMNRNFDYHWGGAGWNIDEPCDHWFGGEEPNTEVEIISLQNFVSSFEDGYIRSYMAYHAYGQYVLLPYGHSNTEFPPNYEQMKRIAAAFSDAAADVYGSTFTYGASGLLNYVVSGAAKDWAYGVKKIPFTCTVELRDKGTFGFFLPSNQITEVGLEVTAGLKALVNKAAEEGIFD

SEQ ID NO: 18709 - DNA, 2726 bp, DROSOPHILA
acgattggccggagccatatcagttaagtggcgattcggaggttcgatttgcacatacactttggaaaaccaatgtgccggcgatatgtatgctttaattaaaccaccacacaaagtccgaaactaatttgacattatctatgcagcgtggacacacaaaggaagatagcgagatagtcatatagccagattgtccagattggacagggattcctcaggtaagtccgacaccacccaccgcaagcactcccatatatcgacgcgatgcattcgatgcataatcgctcaaagaaatcaatgggtattttatttaacaaaacaaaacccttggaaaagtcacctatctacgttgtcaacgtctgagtgacagctttttaatatttaaagtggcttaaatctaatttataaataagcatgagcattacagtaaaagaagtatcgagtatattaaaaaactaattataccaaagagagagccttttatcttcaaacctgtctcatggccctaggttaaggtgatcatatctgttgagatattgtttttgtcacacttccatttttatcaatattcaatagtgatagaaagtacactcgcactggttttcgtttaggggtgcagacatttggttaacagtaactaaacaattatctaactattctgtactcaataaaatataaatttgtattataattgaattactattaatttactctgactaaaaattgtataaattgtacaaatatacaaatataggtatgttatagagcaacttgttatattccacttaatactttttgcaaatcgatggaaattcgcaagactaataaaaatataaaaaatatcatatatacgatataccagatcgactcggctattgatcctaatcaagactatatgaaaacgcttccttttactttacgagtaacggttataaaaatttagttacgaatagtaataaaaaggctttctctcctctaacaaaattaaataactagcaaaaactgtgataacacggatttttattgaatgctcgaatcaattgcgggcactaaacccctaagaagtcagcttggagcagctgatgatgttctggggaaaggcggtgtagtaggtggtcagggtgttgacggcatcggagacacaggcgacggcattgggaccggtttgcgggatcttcttggccagcttgatggcattgtccacttgcttctttagggaccacaccttgcgcagagtcttaacaaagcagctgccagagaccttcgtctcctcgtcgtccgtttgggggcaagtgttggacctcagattgatgaggtcgttgcaagtgctgaggatcttattgttggcgttgatcaatttggtcacatccttgctggcggtgacgccgcacacgaccacgtccgtgttaaattgggtcgcactgtccttgatgcccgccacccacttgattatgcaattgagtcccttgatgcttcgcagagcgatctttagggatttgtaggtcgtactcagcacgccaaagtcctccacctccaagctaccatcggtcacatcgtccagttctgacgaagagtccagggcgctgggaacaggagccaccaatgcatttacctggaatttaaatatttgctaccattgcgcaaataatttgtatttttcattgcaaaacttacgcaaaacaggcccaaagccaaaataagaatggtatacttcatgctgtcgttgtttataagcaactatgaaaaccgtttccgattcggcccttttatatcgcttggttttttaaccctttagtggtcaggtaggtcttgtacaaacagaaatataatagatatctaggttcataactctattattagagctaaatgttaggattgcacggatattatattatattggtagtatacgtactgatgatatttatatatcctagttttttgcataccttttttgtgttaagaaaagcggttaagactatattgaacttgagccagtcacattggtgctctgataacgcattaagccaattgatcatttggacaccgaatttatctataaaatacaaaaaacccaattgataacgctataacaacaaatcgaattacagttcgattttaaatcatacttatgggctgacttacctgcatacaaagctttactttcacatattaaaatgtatttgcctacttttgggcttaagtttataacttatcaaaattatggtaaagataaaataattgaaaatatttaaatttaaatctgttttgacaagtctaccaactcaagccaaattgtttatactcttctgcctcagggcgatttgcagattaaatgcacggtggcctttaatcacaccattttcacaagtttcaattacaatcgccggtcattcgattcgtatttcacatacggattcccatgaatgacatagtttgcttcaccgcaagtcttacgtcgtcatcatcgctggacaaaagtcagttgacttcattgaagtgccctacgatttgatttgctagccacgtgagaagcgccatatctgataagctggccgattagatggaaggttcgaaatacgaaaatcgtctcatagaggggaccgtatcgataaggatttatacacgcttagcattaacttattcgcctttcatatctacaatacgtctgattgtttccaggaaacgataatttcattggcgaacataagaggtgcacggtatagcat

SEQ ID NO: 18710 - DNA, 664 bp, DROSOPHILA
caacgacagcatgaagtataccattcttattttggctttgggcctgttttgcgtaaatgcattggtggctcctgttcccagcgccctggactcttcgtcagaactggacgatgtgaccgatggtagcttggaggtggaggactttggcgtgctgagtacgacctacaaatccctaaagatcgctctgcgaagcatcaagggactcaattgcataatcaagtgggtggcgggcatcaaggacagtgcgacccaatttaacacggacgtggtcgtgtgcggcgtcaccgccagcaaggatgtgaccaaattgatcaacgccaacaataagatcctcagcacttgcaacgacctcatcaatctgaggtccaacacttgcccccaaacggacgacgaggagacgaaggtctctggcagctgctttgttaagactctgcgcaaggtgtggtccctaaagaagcaagtggacaatgccatcaagctggccaagaagatcccgcaaaccggtcccaatgccgtcgcctgtgtctccgatgccgtcaacaccctgaccacctactacaccgcctttccccagaacatcatcagctgctccaagctgacttcttaggggtttagtgcccgcaattgattcgagcattcaataaaaatccgtgttatcacagtt

SEQ ID NO: 18711 - protein, 198 aa, DROSOPHILA
MKYTILILALGLFCVNALVAPVPSALDSSSELDDVTDGSLEVEDFGVLSTTYKSLKIALRSIKGLNCIIKWVAGIKDSATQFNTDVVVCGVTASKDVTKLINANNKILSTCNDLINLRSNTCPQTDDEETKVSGSCFVKTLRKVWSLKKQVDNAIKLAKKIPQTGPNAVACVSDAVNTLTTYYTAFPQNIISCSKLTS

SEQ ID NO: 18712 - DNA, 3033 bp, DROSOPHILA
agatgacgggctagactcaaaagatattttagcaaagaaatcagtggtattgtattcaatagataccgaagttcctgtccgaatgccgcttgtgaaaactatctacaaacctggtcacctggacagtgagattgatatggaaagaatatgtccgcaaaaagggttatcgacgcagttgttagttttaataacctcatcccttcggcattcggcagccagaatgtccatacggcagacttggatgcactacggcagcagaagggacgtgggcatggcatttgtcctgggaaaaggcaaaaacaaatcggtgaagaaggccattgatcaggaggattttatgtaccaggatctgataagaggacacttcatagactcgtacaacaatctcactctgaagaccatttctctgctggaatgggctgatcttcactgtccgaaggctaagtacgttctcaagacggacgatgacatgttcatcaacgtgccgaagttattgaccctcattagcacgcttaaagccaatagaacgatctacggacgacgggccgaaaattggaaacccattcgaaacaggtggtctaaatatcacatatccaacgctcagtatggaaagcctacctttccctacttcaccaccggacccgcctacttgctcactggtgacattgttcacgctctgtatgtccaatccctgaatactgcattcttaaagctggaagatgtcttcaccacgggcattgtggctgaaagtctgaacatccggcgggtaaatgtgcgcgagatggctaacacccggacgaaattcgagacgtgccacatccgcgacaaaattaccatccatatggtaaggaataacgagcagtttaccttgtggaatatgttattagacgacaccataaagtgtgataaccaggtataaagaaaatgaaaattatttaacaattttttacaaacaaatagttatatacgctcaacaaaataaaaaaggaaaatcaagaatttagagcgcactggttggctggtacacatagaactcttcatccgcagacttgctgacccgcagctttccctccttctccagcttgcttaggtggtggttcacgttataggcggcggcgggccagaggttttctggtgtctccttgtagaccaccttcacgacgtccatagcctgcaagttttcgttgggccgctgaacgaagaactgcaggatttgctgttctcgctggttgcgatggttaatgtagtactcaatcttgccaattggttcctcaatgacattgccatggcctggaaagatacgctgcggcttgatgtctagtatcttctccaggcttttcatgtactcaaataggtcctcgaagacggcggtgccctcgccaaggatgcaatcgccgctgaagagtgtgccctcgttcatggccagcaccacatgatcagtggtgtgaccgggtgtgtgaaccacccgcacattcgccccctccgtggtgaactcttggttgtgtgctagcggatggagtttgatatccgtcggtatctcggggcacacatctggagcatctgtacgcccaaacttgaatacgcggcaatccttttcggccaatttagtacccacaatgctctttacaccgccgacatggtcgtggtgccagtgggtcagcaggatggtgtcgatggaggccttttcctgctgtagcacatctcccaggtgagcgatgtactgcggcacgtcttcgtcaccagtgtcgatcaagattctcctactgccactgccgaggaggtacgtattggtgccctggagcgtcatggcactgggattacaacccagtatccgaattacggaggaggtgagtctggtaacagccggaatcagcgccatctcttcgttcactaaatctgagaaagcgataagtattccgattactatgcacaatgaagtttgcgttatagttacataaattaaggagggaaatgaaacacttaaggaaaataatattagggtccaattttttcggggttttaatgaactttggtcctatcaagaaaggcgctattatattgctgcaaattaaacagctgttggtctacagtgctgttaaccgtcatagggtgaccataacatatgcattttagcacagttatcgacttatcgaaagtaaaaacataaatttttaacttatcgatgttgctttacatcactaatgttgagctaatcgcgaacaaaatcggtttggttttcggaagtgggagtaatggtgttcccacaaaaaaagaggaaaaaattagaatatttgcgtccgctgtaacgcagccaattgtgcaaagccctaaaagtgttaaaaagccgcgtttcatcagcaggctgcaatcgaaaaacctccaaaaaaatcgagggcaacgcgaaattaaatcaaaaactgcttcgcagcaacaacaacaaatcgcttcgtttgccaaggtgttaatgcttatttatttataaaacatgccccgcatgactaatgaaacgggctggcgttattaaaatcgattaatgccgaaatacgcgcaaaactataaccagaaagaaaaaattccccaagccacacgatttccgtggtggcgcctggggcccagcaacagcaacaacaacacaaattaggataacagaagagtaaccacaacaacaacaacgatagcaattcatcatcgctaattgtcaacaaaaggcatatttattaacgttaaataagcactaaaaataagcaggcaagcaagtaattatgcttgaccctggtccaacaatagcaccatctcagattccagcgaacgaggaagggagacgcagctaaaccgcactgggaggtaagtttataatgagtgagtctgactgcccggagattccaagatttcggatggacaacgagactcggcgacgcaacgatgacgatgcgtcgttgcctagggtttttgttttgttgtttttttttttctgttattttattaacacacatttacgtctgcttaagcaaccgacgagcgcacatttccaaa

SEQ ID NO: 18713 - DNA, 975 bp, DROSOPHILA
ccaaagttcattaaaaccccgaaaaaattggaccctaatattattttccttaagtgtttcatttccctccttaatttatatttagtgaacgaagagatggcgctgattccggctgttaccagactcacctcctccgtaattcggatactgggttgtaatcccagtgccatgacgctccagggcaccaatacgtacctcctcggcagtggcagtaggagaatcttgatcgacactggtgacgaagacgtgccgcagtacatcgctcacctgggagatgtgctacagcaggaaaaggcctccatcgacaccatcctgctgacccactggcaccacgaccatgtcggcggtgtaaagagcattgtgggtactaaattggccgaaaaggattgccgcgtattcaagtttgggcgtacagatgctccagatgtgtgccccgagataccgacggatatcaaactccatccgctagcacacaaccaagagttcaccacggagggggcgaatgtgcgggtggttcacacacccggtcacaccactgatcatgtggtgctggccatgaacgagggcacactcttcagcggcgattgcatccttggcgagggcaccgccgtcttcgaggacctatttgagtacatgaaaagcctggagaagatactagacatcaagccgcagcgtatctttccaggccatggcaatgtcattgaggaaccaattggcaagattgagtactacattaaccatcgcaaccagcgagaacagcaaatcctgcagttcttcgttcagcggcccaacgaaaacttgcaggctatggacgtcgtgaaggtggtctacaaggagacaccagaaaacctctggcccgccgccgcctataacgtgaaccaccacctaagcaagctggagaaggagggaaagctgcgggtcagcaagtctgcggatgaagagttctatgtgtaccagccaaccagtgcgctctaa

SEQ ID NO: 18714 - protein, 292 aa, DROSOPHILA
MALIPAVTRLTSSVIRILGCNPSAMTLQGTNTYLLGSGSRRILIDTGDEDVPQYIAHLGDVLQQEKASIDTILLTHWHHDHVGGVKSIVGTKLAEKDCRVFKFGRTDAPDVCPEIPTDIKLHPLAHNQEFTTEGANVRVVHTPGHTTDHVVLAMNEGTLFSGDCILGEGTAVFEDLFEYMKSLEKILDIKPQRIFPGHGNVIEEPIGKIEYYINHRNQREQQILQFFVQRPNENLQAMDVVKVVYKETPENLWPAAAYNVNHHLSKLEKEGKLRVSKSADEEFYVYQPTSAL

SEQ ID NO: 18715 - DNA, 2935 bp, DROSOPHILA
acttggcttgaatttatttagtactggaattaatttaattgattggttaagcattttttattgttatttgtttttatatacgcggctcaaacaatattacttttaataatataaatacacgaatacatacaacacatctatgaatgaaaaagcgaacgaatgaaacaataaatacatatatataatttaaaacaaaagagagaatgctttagtcgagttccccgataattatataaccgtgtctcagctagtgtgaatgcgagcgcgaaattttattatttttctgggatatcgataggaattggaaaataaaataagaaaaattgatcaaaagtgtgggcgtggcagttttaggcggcttgtgggcggtagagtgggcgtggcatcgtgggccccatgttttcctttgccgttggcggtgtggtaagtttttcttaattttgtaaatcaatttttatacctaaaatttccagccaccgcgctaaccaactcggtgtggctaaggaattttggtcggaacgtatcgacgtattgtatacttgacatggtcggagaccaatacattttcaacgaatctagtatacctttttactctacgagtaacgtgtttactcccttcatattctatttgttgcttttgttggagtccagacccattgataccgctggcgcccatcatttgaatcatcgagtacagaatatccaggaagtctgtctattggcaatagaattaagatttttgaacatataacatccttttttatgggtatagaacataaggttgaaggtggttaaagtcaaataagtcagttagtaataatgagcacatcgatttccaaagctctgtatgtgtcacattcgtttaaaagtttgaaacagcaaaaaaaagccatgtttgtcggtccgtcggtatctcgtgatctgagacactatacaggctagaaaggtgtataagatatgttgtcacaccccgaactcccaaatcaggaagaaagcatctgctttgctcataatttcatggttttattaccaacttatgtcatgctggctatgcaggtattgatgttgggcacaaaggcgttgcagccgtcgaccaccttcttggtggcatcgacgtagcaggaagaggtgttgaagggcagggctgcgccctgcttgatcaatgtgttcatgcggcggacaagggacatggtggcgtagaaggccttcagggtgcaacgcatgaagctcttggtggaggagacgacgctcctggaggtggaggcgcacagctcggacttcatgttgatgatcttgttgctggtgatgatcatttgcttgacattgttcagcatggcctggatatccttgggaatatcgccggtgcaggtgctcaggtcgtctacgtagttggtgcaggtgagcagcacattggccacctcctcgacgatgcacttggtgccgttgatgcccttgtatccggcccacagaatcttgcggcacgatccaatgaagccgaactgctcgacgcccatgaactcatcctccattgccatcaactcggcggcgtagagatccttaagctcggcatcggtgtagggctcgaagtcctcgaaagcacctacggcactggcctaaaacaagttaggaatacgattcgattttggaataactgtcaaaatatttgacttcaagtagcacacgttttaaaagcacttcggaaaaaaaattgaacaaaatatatttgctttaagcgacgattctgttcattaaatctttgtttgctgcacttttcggatttttttcaaactctaataacgatggcacttgactgtatttgctagtagttcttcataaggttgtctgacttacgttcgctgtggccagaaggaagctggcagaggccacgaccaagaggcagacgttgagtactttcatgttactggtggatggtttcactggcgaatgtttgctgaccgatccgtggggtttgtttatatagacgattggccggagccatatcagttaagtggcgattcggaggttcgatttgcacatacactttggaaaaccaatgtgccggcgatatgtatgctttaattaaaccaccacacaaagtccgaaactaatttgacattatctatgcagcgtggacacacaaaggaagatagcgagatagtcatatagccagattgtccagattggacagggattcctcaggtaagtccgacaccacccaccgcaagcactcccatatatcgacgcgatgcattcgatgcataatcgctcaaagaaatcaatgggtattttatttaacaaaacaaaacccttggaaaagtcacctatctacgttgtcaacgtctgagtgacagctttttaatatttaaagtggcttaaatctaatttataaataagcatgagcattacagtaaaagaagtatcgagtatattaaaaaactaattataccaaagagagagccttttatcttcaaacctgtctcatggccctaggttaaggtgatcatatctgttgagatattgtttttgtcacacttccatttttatcaatattcaatagtgatagaaagtacactcgcactggttttcgtttaggggtgcagacatttggttaacagtaactaaacaattatctaactattctgtactcaataaaatataaatttgtattataattgaattactattaatttactctgactaaaaattgtataaattgtacaaatatacaaatataggtatgttatagagcaacttgttatattccacttaatactttttgcaaatcgatggaaattcgcaagactaataaaaatataaaaaatatcatatatacgatataccagatcgactcggctattgatcctaatcaagactatatgaaaacgcttccttttactttacgagtaacggttataaaaatttagttacgaatagt

SEQ ID NO: 18716 - DNA, 697 bp, DROSOPHILA
aaaccatccaccagtaacatgaaagtactcaacgtctgcctcttggtcgtggcctctgccagcttccttctggccacagcgaacgccagtgccgtaggtgctttcgaggacttcgagccctacaccgatgccgagcttaaggatctctacgccgccgagttgatggcaatggaggatgagttcatgggcgtcgagcagttcggcttcattggatcgtgccgcaagattctgtgggccggatacaagggcatcaacggcaccaagtgcatcgtcgaggaggtggccaatgtgctgctcacctgcaccaactacgtagacgacctgagcacctgcaccggcgatattcccaaggatatccaggccatgctgaacaatgtcaagcaaatgatcatcaccagcaacaagatcatcaacatgaagtccgagctgtgcgcctccacctccaggagcgtcgtctcctccaccaagagcttcatgcgttgcaccctgaaggccttctacgccaccatgtcccttgtccgccgcatgaacacattgatcaagcagggcgcagccctgcccttcaacacctcttcctgctacgtcgatgccaccaagaaggtggtcgacggctgcaacgcctttgtgcccaacatcaatacctgcatagccagcatgacataagttggtaataaaaccatgaaattatgagcaaagc

SEQ ID NO: 18717 - protein, 214 aa, DROSOPHILA
MKVLNVCLLVVASASFLLATANASAVGAFEDFEPYTDAELKDLYAAELMAMEDEFMGVEQFGFIGSCRKILWAGYKGINGTKCIVEEVANVLLTCTNYVDDLSTCTGDIPKDIQAMLNNVKQMIITSNKIINMKSELCASTSRSVVSSTKSFMRCTLKAFYATMSLVRRMNTLIKQGAALPFNTSSCYVDATKKVVDGCNAFVPNINTCIASMT

SEQ ID NO: 18718 - DNA, 4218 bp, DROSOPHILA
cagatgggatcgaacgataagaaatcttatcgaccaggcggccatggaacgcgactcaagtggttcgttcgctgccacctggagcatggagcatgagtctgtccggtgctttgagctctgttctgcctccgttggggttctcttgagtcgcggaatagggtcaagactgttgttgacttgttcgagcgcatgcaaagtggagacagagccgatggcgatgtcgtgacgattctggatgctgtgcgtgtgttctcctttttctggcaaattcattagcccacggaaacttcccaaatgcttttcagttcgtcactcccattaccatgcaaaacagccaagcccttcgctcgtgttttccgaaataaaatagcacattcacacagttcaaaactaagcatcgactttactatatttttgaaaaatattgtgcaaaaaaaaaaatgaaacaaaacgttaattacgtttaagtgttcttttgtaaacgtttcttaaagtacataagacgctatctttatttttgtagtgaactccaactagctcactctctacacaaatatttgcattattcctcgccaatggtaagaaaagcaacaaaactgagtctttggccatactcgactttgaaataccattctatattggataagaaaatatttacgatttaattatacacttaaatgttttgaacgaatttttattgccattattattgtcgttttattattgcggaaataatgatctaatcgctggacagaagtgcgccctctctccttctatatcttatagcgccgggcatcggagcacataacaaatcagctgaatcagttatttacctttatttccgttgcgttctcattgcagttccatcgcattcgttgtcggaatcgcaagcgtgagggatcgttatcataatactcacaaattgaagacgagaagcggagtccagactgaaactgagacctagactgactgagatttgagagattttgcaagtgccaccatggcggctatggccaatcttcacaacacgcgcatgctacgcttctttttagtcctaatcgtggtgatcctaaccattttcatctacgcctcgtactcaacgactagcaccctcacagcgaaccatgtgcaccctgcggcatcaccgccacagcagctgattggcagtcatcctgggcgacagcccatggaccaagtgccgccagtcaatagcacggataaggagtacaattcgccacctggtgaaagttcgtctaagcagcaaagcgtatccagcagacactcgcaacaattaccgccgcaacaggcagagatacacaagaggcatccgcagcaccgcctgcccaccatcgacgaggatgctctgctcgacggtggctccgcgggcgccagtccccaggttggtggccctgaccaaacgcccaatgttatggcggatgagctgctggaggagcagcagtatggtcagagtgttgatggcatcacaggtgagagtgggtgcgcttaagacttagacgctaattaagctaataatgtttattccacaggcaacatcaacagtagcaccaacaacaacagctctgccgacacgttggctgttaaacaatcgattcccgcccagtcaccacaacaacaactgccccagtcacagtcgcaggtgcagccaggcctttccgatgccgacctcctcatacccacttccaatttgcaaaagtttattgagaacgccgataggatactgaagaacatcacttcgaacagtagcacgggtaattattatactattacttagggggcgctagacctttgagacctattaatccaggtttcaaattgttaaaccagatcgataaacagtttagttgctccttcaaattgatcctctttctgtttcatcttgcgtaataatttgccttagttttgttttgcttagacaaagacccgctggcggcgcacccatttgtataactccacgacaatggagaatgaaatgtgcagtccgcttatttgaccaggtttcgtgtttcattatgaaagagctgtaaacatgacatattgtttcatactattggattactgtcgaacagatgtctatggggacggactagaattcgcttgagtgtttgtttgcatttcaattaatggtgtggtttatctttctaaataaaggcaatccatcggatatggcacaactcaacgcagtggacggtaaactggaagtctcgggcgttgagtccgaaaagcaggaaccggaatccaaggtgatacaggaaattaaggaggccaagaaagaggcggcagtccctctgccaaaatccgcaaaaccaccagtgccacctgtgaaaacgacgaagagcaaggtgccaagtgctcctgtagatccctccaagggagtggccaccgagacactctacgagccaggccacgtggatgaggagatcgatgcggagcgcatatgtccgaaaggcggagagtttattaagctcctggttcttattagctcagcgatgtctcacgatgcagcccgcatgtccatccggcagacttggatgcattacgggacgagaagggacgtgggcatggcatttgtcctaggacgtggcaccaatgaaaccataaacaaagcgcttacccaggagaacttcatctatggagatctgatacggggaaacttcatagactcgtacaacaacctcacgctcaagacaatatcgacgctggaatgggcagatgtgcattgcccgaaggcaaagtacattctcaagacggacgacgacatgttcatcaatgtgcccaagctgctgaccttcctggacaagcacaaggacaagcgtaccatatacggtcgtttggccaagaagtggaaaccgattcgcaataagaaatccaaatactatgtgtccgtcgatcagttcgcggcgggagtattcccgtccttcaccactggacccgcctacgtactcaccggagacattgtgcacgaactctacgtgcgatctctgaagaccgtttatctgaagctggaggacgtgttcaccacgggcatagtagccaagagccttaatgttaagcgggtgcaggcgaacgagttcgttaaccgacgcatctcatttaacccgtgcaacatccgcaacgcaatcagcgtgcacatgatcaagtcgaacgaacaattcgatttgtggaaaaagctgctggatcagaccaccaagtgtaaatagtattttaagtttagggtgtagtttttccggtatgaagaacacagtgtggtctttcgagaaaaaaggggcgaacatatatgtaatatggtaggagtagagaatgattagcaaaggcagctatataggattataaaattagactagtctctaagtcctagaaatatcacaaattctgttgtcgatctctgcatccgcctatatgcatgcgatccaacaacgattcgagtacattttaaaacatctgtagtttaattttagcattctgaatgccattatttaaatgataattactgagcgataactgtggttatatattaacactaaatacattaatgtatattgaaagaatcacatagtgccttttcatttcgaagcgcttcccaaataatacctctttctggaagtctaatggttttggatatttgaagccttcggtattattcaaaaaataaataattctttttcatcgttccatattgttgatttctgaatgttggtatttttccaggccttagaccgcaacaaaaaataccgcaacggagcagttatcgactattcgataagctgaaacagtaattcgatttatgaaaacccgccaaacttgaaaacaatggtagttatttattttaaaatttgttagacatacacttcgtttaacataaatgttacaaagttagttgttacacaggcgatattacaaaaataacaaataggtctcatgggtgccaatccgatcaatacataggtaattttgtaaagctcaagaacttgctacggttttgtcactcaaacgataaagacttcttattttgataataccttttaccatgttggagttgcacatatggaaaattctttgcatgattcggctaacaaataacatatctaaataaattggtactaaatttatatatagttatggtgtatacggtacgtgggatcgttggatccaacagagctctcgtgtggttttgtggactcacatcggcaacagcgagtg

SEQ ID NO: 18719 - DNA, 1725 bp, DROSOPHILA
atggcggctatggccaatcttcacaacacgcgcatgctacgcttctttttagtcctaatcgtggtgatcctaaccattttcatctacgcctcgtactcaacgactagcaccctcacagcgaaccatgtgcaccctgcggcatcaccgccacagcagctgattggcagtcatcctgggcgacagcccatggaccaagtgccgccagtcaatagcacggataaggagtacaattcgccacctggtgaaagttcgtctaagcagcaaagcgtatccagcagacactcgcaacaattaccgccgcaacaggcagagatacacaagaggcatccgcagcaccgcctgcccaccatcgacgaggatgctctgctcgacggtggctccgcgggcgccagtccccaggttggtggccctgaccaaacgcccaatgttatggcggatgagctgctggaggagcagcagtatggtcagagtgttgatggcatcacaggcaacatcaacagtagcaccaacaacaacagctctgccgacacgttggctgttaaacaatcgattcccgcccagtcaccacaacaacaactgccccagtcacagtcgcaggtgcagccaggcctttccgatgccgacctcctcatacccacttccaatttgcaaaagtttattgagaacgccgataggatactgaagaacatcacttcgaacagtagcacggtggacggtaaactggaagtctcgggcgttgagtccgaaaagcaggaaccggaatccaaggtgatacaggaaattaaggaggccaagaaagaggcggcagtccctctgccaaaatccgcaaaaccaccagtgccacctgtgaaaacgacgaagagcaaggtgccaagtgctcctgtagatccctccaagggagtggccaccgagacactctacgagccaggccacgtggatgaggagatcgatgcggagcgcatatgtccgaaaggcggagagtttattaagctcctggttcttattagctcagcgatgtctcacgatgcagcccgcatgtccatccggcagacttggatgcattacgggacgagaagggacgtgggcatggcatttgtcctaggacgtggcaccaatgaaaccataaacaaagcgcttacccaggagaacttcatctatggagatctgatacggggaaacttcatagactcgtacaacaacctcacgctcaagacaatatcgacgctggaatgggcagatgtgcattgcccgaaggcaaagtacattctcaagacggacgacgacatgttcatcaatgtgcccaagctgctgaccttcctggacaagcacaaggacaagcgtaccatatacggtcgtttggccaagaagtggaaaccgattcgcaataagaaatccaaatactatgtgtccgtcgatcagttcgcggcgggagtattcccgtccttcaccactggacccgcctacgtactcaccggagacattgtgcacgaactctacgtgcgatctctgaagaccgtttatctgaagctggaggacgtgttcaccacgggcatagtagccaagagccttaatgttaagcgggtgcaggcgaacgagttcgttaaccgacgcatctcatttaacccgtgcaacatccgcaacgcaatcagcgtgcacatgatcaagtcgaacgaacaattcgatttgtggaaaaagctgctggatcagaccaccaagtgtaaatag

SEQ ID NO: 18720 - protein, 574 aa, DROSOPHILA
MAAMANLHNTRMLRFFLVLIVVILTIFIYASYSTTSTLTANHVHPAASPPQQLIGSHPGRQPMDQVPPVNSTDKEYNSPPGESSSKQQSVSSRHSQQLPPQQAEIHKRHPQHRLPTIDEDALLDGGSAGASPQVGGPDQTPNVMADELLEEQQYGQSVDGITGNINSSTNNNSSADTLAVKQSIPAQSPQQQLPQSQSQVQPGLSDADLLIPTSNLQKFIENADRILKNITSNSSTVDGKLEVSGVESEKQEPESKVIQEIKEAKKEAAVPLPKSAKPPVPPVKTTKSKVPSAPVDPSKGVATETLYEPGHVDEEIDAERICPKGGEFIKLLVLISSAMSHDAARMSIRQTWMHYGTRRDVGMAFVLGRGTNETINKALTQENFIYGDLIRGNFIDSYNNLTLKTISTLEWADVHCPKAKYILKTDDDMFINVPKLLTFLDKHKDKRTIYGRLAKKWKPIRNKKSKYYVSVDQFAAGVFPSFTTGPAYVLTGDIVHELYVRSLKTVYLKLEDVFTTGIVAKSLNVKRVQANEFVNRRISFNPCNIRNAISVHMIKSNEQFDLWKKLLDQTTKCK

SEQ ID NO: 18721 - DNA, 7422 bp, DROSOPHILA
actgccagtgtgtgcgttgtatgtgcattacatgacataaagttttgccctcataaagtcgcaagttcagtgtttgttttaagccagtgcatccatcgattttggccaacgactttggcacgagctcatggctctgcggctgactttgccaaaaaagtgtcagggttacaccagaaatagacacatgccaatacgctggtcataaataaagaaaaatagtcgatgctctgaggaccatctattccagcttaaagtttaaagcactcgcaagcgaggctaattgggataactgaatcgtttgtaacattaatgcatttatatagttgttcggccatgcgtctaaattaaatgtattatatgggttttgtttccttcctttttgtttcgaattttattattttatttggggacattagccgatgatagagttgcggtttgccaaagcatgaaaatactgtggggcggcaaaaaaaaaacaaaaaacggggaatatgcaattgcaaatggcgagttaagcaaatgtgcaaaatacaattttcgcattggaccgcattttaattttgttttataatttcgcaaataataatttacataaaagaatgtccgagtgtgggagtggttgtggcatatgcaaagtgtttgtttgagtgcgttttccattaatttatttatgtacaattatttacaagcaattaacttgcgcatagcttttgtttagttggttttcgcaattcagttatgcgtttgggttttagttaacgtttgcattgtgaccttttgcatttcgcacagatcaaatgccgaatggaaatgaataaactaccattttcctctttcagtccttctgggaatagtgtcagttgcatgtttggggacacagcaggcttcgcttctgcgaaaaccataggtgctttaattaatttttatcattttggtgttgcttcaaacaaaaattccccctgaattccacccgggatgagtaagaaaacgtgtgtgatttaatttttgtcaatattttgtaatgtttttgcattttattttctcagatatatttctctgcttggttttatgtaattgtaataattaatttaataatacattttttcattaagtaaatttaattgaattaatttagctccatcatctctatacagtacgatacataaatacattaagtgctctaaatgggtttgctcctgcgatttttctatatacatataagtttatcaagtattcatttagttattgtttcgtgtagcttaggatgaatgaatcgacaaacacgatcaactggatgcgaacgaatgtgtgtacatatttcattaggtttactttaagttgtagttaacaatagtttagtttagtttagttttaggtttacgttctttacgcctggctagaactactacatacgtctacgcattacagtaaggggcatactctcgtctgccgatttaattatagttaattaatatatcacattgaatttgaaagtgtttctgcaacatttctagtaattgtttctttacgtttatggtaattatattagaataatgtattcctatatgctcgtatatgaatgtgttgtgggcgtgtcttgtgcgtgttccttatttggcagtgctacacaactacgaaacttcaacaaccacaacatccaaaggcgaaatgctccgacaaaaaaaatacgtataaatatattgtgtttcaagaaatgcctacgaaaagtctttttgttttggatgtgagtgtgttggtgtgtgcgtcctgttcctgcttcctcttcccgagtccttttacgccagtgagcgatcagcttcaagatggccgctcctgcggagaagaaccctgcgaggctgagtgagatggatatggccatagggggagtttttagaccaggaaagcttggccgttcttattggccgcttcactgccagctgcctgttgctgctgctgttgctgttgctgctgcgccgctgctgcggatgtggaggcctgggccgttgactgagtgctggtgctggcctggctcaaaccactgccgctgcgcaggtgcaccggcgcggaaggagcgggaatcgcctgctgcggcatcgcccggaactgcggttgcagcaagcgctgttgctgctgctgttgttgttgctgatgcagacgcaactgctgctgctggtgctgatgcattaggcccgtgggaatcatcgacagcgcctcatgctgatcatacgcactgtactccgactcgatgctgtggtagatgtgctctgagggcggacgcatcggcatgggcatagagtccacgatcctagcggctcctcctggtctcgttgggcgtggtgatggcgtggccgtggtggctgagctatagttcgcctccatttcctcggtgcagtagtaggctggcggtggtggcgcctggcggaagatcatgcccggcgacactggctgcttgaagcgctcatgatggtccaatgtgtagttgtttccacggggcgacagctcaattgggatggcgtagcgcagcttctcccagaagtatctgtcgcaggtcagcagtcggttggagggtaccgatttcaagtacggcgacaactcggcaacgtcctcggcctcggcggaaacacttgtctcctcgatgatcaccagcttctgggccaagcccctcagggactcgtggaaagcattacggaactcaatgcgattccattcggtggccaagagattgcgggtcagcaccaggatgatcttcctcgacgcccttgctccctccaccagctgaaggtgggatgcctggggaggcagatctcgctgctgaatgcagagccggaagggtggtcgaccatgctccagttcggcggcgatgttgcggcacacaaactcgtagtccttctccgagtgcaggatgatggcgtcgtacagtttgccggcatcctcgaagcggggctcgcacaccctgactccgtagtgggcgaagagccacatgcgcacgctctcgcggaagacgaagacaatgatgagcaccacgaccaggaagatcagcactagcacagcggccaacaagggcagcctatagcctccggccaaatcctgcgaggagctgatattgctggcactggcatccagaaggtcggaacaatcgggtccgttggccaggttgccaatcagttccagctcgcgcttgatgcccgcatccaagcagtagatatcgtgggcatcccgcaccaccatggcgttatcggagacaaactgcgccaattccctcaactgctggcagcggcatgaccaggcatttctgcccagcgtcagtccctggaggctgtgacgatattgcaaatggggcagggaactcaggcggttgttgtccagacgcagcacctccagggacaccagtggctcaaaggtggcattcgagatgtgggtcagcatgttgttgtgcagatacagctcccgcaaaagtcccagggagcggaactcggtgccttccagggcggttagtttgttgttctccaagtggagcactcgaagattgaccaactgggccagacttccgttctgcagcgtcatcagattggaggcgttcaggtagagagcccgcagattgcgacgaccggttaggtggccaacctccagctcgggcatgttgttgccatccaagtagagatcgctcacatcctgagggatacggttgggcagggcggccagatcctggcgaccgcagtccacgatgttggtggcccaggtggcgtcgtggaagcagctgcagtttccagggcagatcacttcacactcgcactgttcgtactcgcagcagtggcacgtgggcgggcagtggctctcatacttgcacacaaagtcggaggcggagagactggccagcggacgcagtggagcactgcggctgtgcggcatcaggcactcgatgtttcccagatccacaacatgaggatgctggcgggtggtcagattgttaatcctctgcagccactccatggagcaatcgcactcaaagggattgccgcccaggtaaaactcgggaactggtttctccgctgaaactggggctacgcgtagagcattaagcgagattttggacagcacattggcatacagatccacgcgtgccagacgcgtcttgtccacaaaggtgttggcctggatctgtccaatgatgttgttgttgatgaacagcagctcgatggaattcggcaccgacatggcgccaatctccgtgatgcggttgtgagaggcatccagcgtggtcacacgaatctcctcttgcagtttgtagtagttgcccagggcttcgatgtagtttccatggatatccagccatttcaagttcgatgggatgaaggcgtaatcgaaccaaacaaggtgattctcggagagattcagccacagcaaggaggcgagagtggcaaagattccattgatgtcggtgaggaagttcttgtccaatcggatcgcctcgatctcggtgtttttgtcgaaggctccacgctcgatgctctggatgcggttcttggccaggttgagaacactcaaacggggcagatcctgaaacatgcctacggtgatgttgccgatgcgattgtcgatcaatcgcagacccgtcagctgattgagattgcggaaggtgttgttcttgaattccgagatctgattctctccgagatcgagagtcttgagcatgctcaaatcttgcacagcctcgggcacttcagtcagctgattggagctgagatccagttccttcagatcggaacagttgcggaaggcttgcgactccacaatgctaacaagattgttgtttagcgtgagtttcgtcagcacatacaatccgttgaagatgcggttgtccagtgtgtgcaggcgattctcggcgagattgagggtgtgcagattgtacaggggcaggaatgcgccctcctcaatgtggccaatggagttgtttcgcatgtccagaatctgcaggaagtacagctccttgaaggttttggatccaatgcgggtgagggcattgttcgacagattcagcacaatcaggcggatcagaccggcgaaggtgctgttgtcaacatggtggctggtcagctgattgccactcagatcgagaactaacagctgctccagacggtgcaacagacctttgggcaattcgtacagatcattgccctgcagatgcagttccctcaactccttgttgccggcaaaggcttctgagggcagggaaacgaggtggttgtacgagatattcagcactcgcagcgaactcagaccggccagggcattgggagccagggtgctgatgttgttgtgttgcaggctgagggtctgcaggcgcctcaatcgggacgctccccaggcatccggcaaagaacgcagctcgttgaacgagacatccaatgtctgcagctctgagcctccgctaactgctccattggcattgctcagggctgagccggcacagagtttctcggagaagcctaggaactcggcggaacgtatccggttctgggtgagattgagcagttgcaggctgggcatggagcaccagacgccctcgggcaactgacggatattgttgtcgcccaagtgcagctcggacagctccttcagtccctggaacgactggccgtgcaactccagggtctttcccggaccccagaccgcgttgtgtgactccagggtgagtcgcttgagcgacatcagaccctcaaatgcatttggaggcactcgctgcagtttgcaggcatcgattcgcagctccgagagcttctgcagttgccggaagagtcccggtgccagttcactggcatgcaggagctcctggctgcactgcagatccaggcggccggccgcctccgccacctggaggtcaagtggcgttccggtgccggactccagagcgcggacactgcaccggatgtccatggtggtgaggccgtactgccagttgcactgctgctgcgcatgcgcatcagccacaagaagcaacaggcaggcagcgactgcgatgatggtgatgatggaagatgtggctggcattttggtgatttgctagttggctagttaactttaaatgaatttgtttaatttgtagctttttagctgtaggttgtgggttgcgttggtggtgcacaactcaatcactttctggttttcatttttcgatcgcctttttcgcagcccgagtgctctgtaatcctggtgtgagctggctttgcgttttgcgatttttcactttcgtttcgtttctttgtgatttctctcaactcaactcataagttggtaacttgcgtattttataataataattttaacttggcacttggcgcgactcagggtgttcgacttcgtttcgttcggcgagagctcgttttctcaaaacatgtttaccgcctcgcgtttcgattcaaactgattgctggagttggccatctcgactccgttggctcgttgaaaatgtgaaaccgacgacggcgctgccgagctggcagagctcacacacacacagccggcgccgcggcagacagacaacacggtacgcgtgcatgtgcatgtgcatgtgcaatgcactctcacgagcgagcacacacacatgccacgctgtcgctgcgctgctttcgctctctgctctgctgctgatacacgcacacacacaagcactgcatttcctgcctgctgcatatgtcgctcacacacacgcttgggagagcggagctctctctctctctccccgaaagtaggggaaatgttgcacacacacatgggcatggaatgggggaaacagaaatcattaaccctacgctgcgctctctcagatttccgtccacacaattagcactaggaaatggaataattccgtggggttaggatgggttatcagctatcactgatagttcgacttgcctcaagtgggaattatttcaaaattaactgagggcattaaaaagctatctgatcatttgtaagtgcactgtattaaatcgatgcttttacaaatataaacaaatatatagcagtggttcggcttattaacacttatttcaatttaaagatcacaaaattgaatttaaataaagttttgtcttcttattttgtataaataactttagaaattgtgtatttccaaccgcctagattctatatagggttaatagaacctgcaacaggctgctgctgctgctagttggcaacatttcgcccctgcccacccccttaacgatgaaaattctccggctcagttcgctttgtcgcctcgtgttgcactcgcgatatgtgttgcatgtatatggtgtagtatgttgcctcagtttcagcatgttgcatgctgcttgcctcttaacagctgctgatgttgctgctgttgttgcagttgcaattgcttttactgttgctgctagtgcttttggtgctttg

SEQ ID NO: 18722 - DNA, 5422 bp, DROSOPHILA
agtttgaatcgaaacgcgaggcggtaaacatgttttgagaaaacgagctctcgccgaacgaaacgaagtcgaacaccctgagtcgcgccaagtgccaagttaaaattattattataaaatacgcaagttaccaacttatgagttgagttgagagaaatcacaaagaaacgaaacgaaagtgaaaaatcgcaaaacgcaaagccagctcacaccaggattacagagcactcgggctgcgaaaaaggcgatcgaaaaatgaaaaccagaaagtgattgagttgtgcaccaccaacgcaacccacaacctacagctaaaaagctacaaattaaacaaattcatttaaagttaactagccaactagcaaatcaccaaaatgccagccacatcttccatcatcaccatcatcgcagtcgctgcctgcctgttgcttcttgtggctgatgcgcatgcgcagcagcagtgcaactggcagtacggcctcaccaccatggacatccggtgcagtgtccgcgctctggagtccggcaccggaacgccacttgacctccaggtggcggaggcggccggccgcctggatctgcagtgcagccaggagctcctgcatgccagtgaactggcaccgggactcttccggcaactgcagaagctctcggagctgcgaatcgatgcctgcaaactgcagcgagtgcctccaaatgcatttgagggtctgatgtcgctcaagcgactcaccctggagtcacacaacgcggtctggggtccgggaaagaccctggagttgcacggccagtcgttccagggactgaaggagctgtccgagctgcacttgggcgacaacaatatccgtcagttgcccgagggcgtctggtgctccatgcccagcctgcaactgctcaatctcacccagaaccggatacgttccgccgagttcctaggcttctccgagaaactctgtgccggctcagccctgagcaatgccaatggagcagttagcggaggctcagagctgcagacattggatgtctcgttcaacgagctgcgttctttgccggatgcctggggagcgtcccgattgaggcgcctgcagaccctcagcctgcaacacaacaacatcagcaccctggctcccaatgccctggccggtctgagttcgctgcgagtgctgaatatctcgtacaaccacctcgtttccctgccctcagaagcctttgccggcaacaaggagttgagggaactgcatctgcagggcaatgatctgtacgaattgcccaaaggtctgttgcaccgtctggagcagctgttagttctcgatctgagtggcaatcagctgaccagccaccatgttgacaacagcaccttcgccggtctgatccgcctgattgtgctgaatctgtcgaacaatgccctcacccgcattggatccaaaaccttcaaggagctgtacttcctgcagattctggacatgcgaaacaactccattggccacattgaggagggcgcattcctgcccctgtacaatctgcacaccctcaatctcgccgagaatcgcctgcacacactggacaaccgcatcttcaacggattgtatgtgctgacgaaactcacgctaaacaacaatcttgttagcattgtggagtcgcaagccttccgcaactgttccgatctgaaggaactggatctcagctccaatcagctgactgaagtgcccgaggctgtgcaagatttgagcatgctcaagactctcgatctcggagagaatcagatctcggaattcaagaacaacaccttccgcaatctcaatcagctgacgggtctgcgattgatcgacaatcgcatcggcaacatcaccgtaggcatgtttcaggatctgccccgtttgagtgttctcaacctggccaagaaccgcatccagagcatcgagcgtggagccttcgacaaaaacaccgagatcgaggcgatccgattggacaagaacttcctcaccgacatcaatggaatctttgccactctcgcctccttgctgtggctgaatctctccgagaatcaccttgtttggttcgattacgccttcatcccatcgaacttgaaatggctggatatccatggaaactacatcgaagccctgggcaactactacaaactgcaagaggagattcgtgtgaccacgctggatgcctctcacaaccgcatcacggagattggcgccatgtcggtgccgaattccatcgagctgctgttcatcaacaacaacatcattggacagatccaggccaacacctttgtggacaagacgcgtctggcacgcgtggatctgtatgccaatgtgctgtccaaaatctcgcttaatgctctacgcgtagccccagtttcagcggagaaaccagttcccgagttttacctgggcggcaatccctttgagtgcgattgctccatggagtggctgcagaggattaacaatctgaccacccgccagcatcctcatgttgtggatctgggaaacatcgagtgcctgatgccgcacagccgcagtgctccactgcgtccgctggccagtctctccgcctccgactttgtgtgcaagtatgagagccactgcccgcccacgtgccactgctgcgagtacgaacagtgcgagtgtgaagtgatctgccctggaaactgcagctgcttccacgacgccacctgggccaccaacatcgtggactgcggtcgccaggatctggccgccctgcccaaccgtatccctcaggatgtgagcgatctctacttggatggcaacaacatgcccgagctggaggttggccacctaaccggtcgtcgcaatctgcgggctctctacctgaacgcctccaatctgatgacgctgcagaacggaagtctggcccagttggtcaatcttcgagtgctccacttggagaacaacaaactaaccgccctggaaggcaccgagttccgctccctgggacttttgcgggagctgtatctgcacaacaacatgctgacccacatctcgaatgccacctttgagccactggtgtccctggaggtgctgcgtctggacaacaaccgcctgagttccctgccccatttgcaatatcgtcacagcctccagggactgacgctgggcagaaatgcctggtcatgccgctgccagcagttgagggaattggcgcagtttgtctccgataacgccatggtggtgcgggatgcccacgatatctactgcttggatgcgggcatcaagcgcgagctggaactgattggcaacctggccaacggacccgattgttccgaccttctggatgccagtgccagcaatatcagctcctcgcaggatttggccggaggctataggctgcccttgttggccgctgtgctagtgctgatcttcctggtcgtggtgctcatcattgtcttcgtcttccgcgagagcgtgcgcatgtggctcttcgcccactacggagtcagggtgtgcgagccccgcttcgaggatgccggcaaactgtacgacgccatcatcctgcactcggagaaggactacgagtttgtgtgccgcaacatcgccgccgaactggagcatggtcgaccacccttccggctctgcattcagcagcgagatctgcctccccaggcatcccaccttcagctggtggagggagcaagggcgtcgaggaagatcatcctggtgctgacccgcaatctcttggccaccgaatggaatcgcattgagttccgtaatgctttccacgagtccctgaggggcttggcccagaagctggtgatcatcgaggagacaagtgtttccgccgaggccgaggacgttgccgagttgtcgccgtacttgaaatcggtaccctccaaccgactgctgacctgcgacagatacttctgggagaagctgcgctacgccatcccaattgagctgtcgccccgtggaaacaactacacattggaccatcatgagcgcttcaagcagccagtgtcgccgggcatgatcttccgccaggcgccaccaccgccagcctactactgcaccgaggaaatggaggcgaactatagctcagccaccacggccacgccatcaccacgcccaacgagaccaggaggagccgctaggatcgtggactctatgcccatgccgatgcgtccgccctcagagcacatctaccacagcatcgagtcggagtacagtgcgtatgatcagcatgaggcgctgtcgatgattcccacgggcctaatgcatcagcaccagcagcagcagttgcgtctgcatcagcaacaacaacagcagcagcaacagcgcttgctgcaaccgcagttccgggcgatgccgcagcaggcgattcccgctccttccgcgccggtgcacctgcgcagcggcagtggtttgagccaggccagcaccagcactcagtcaacggcccaggcctccacatccgcagcagcggcgcagcagcaacagcaacagcagcagcaacaggcagctggcagtgaagcggccaataagaacggccaagctttcctggtctaaaaactccccctatggccatatccatctcactcagcctcgcagggttcttctccgcaggagcggccatcttgaagctgatcgctcactggcgtaaaaggactcgggaagaggaagcaggaacaggacgcacacaccaacacactcacatccaaaacaaaaagacttttcgtaggcatttcttgaaacacaatatatttatacgtattttttttgtcggagcatttcgcctttggatgttgtggttgttgaagtttcgtagttgtgtagcactgccaaataaggaacacgcacaagacacgcccacaacacattcatatacgagcatataggaatacattattctaatataattaccataaacgtaaagaaacaattactagaaatgttgcagaaacactttcaaattcaatgtgatatattaattaactataattaaatcggcagacgagagtatgccccttactgtaatgcgtagacgtatgtagtagttctagccaggcgtaaagaacgtaaacctaaaactaaactaaactaaactattgttaactacaacttaaagtaaacctaatgaaatatgtacacacattcgttcgcatccagttgatcgtgtttgtcgattcattcatcctaagctacacgaaacaataactaaatgaatacttgataaacttatatgtatatagaaaaatcgcaggagcaaacccatttagagcacttaatgtatttatgtatcgtactgtatagagatgatggagctaaattaattcaattaaatttacttaatgaaaaaatgtattattaaattaattattacaattacataaaaccaagcagagaaatatatctgagaaaataaaatgcaaaaacattacaaaatattgacaaaaatt

SEQ ID NO: 18723 - protein, 1385 aa, DROSOPHILA
MPATSSIITIIAVAACLLLLVADAHAQQQCNWQYGLTTMDIRCSVRALESGTGTPLDLQVAEAAGRLDLQCSQELLHASELAPGLFRQLQKLSELRIDACKLQRVPPNAFEGLMSLKRLTLESHNAVWGPGKTLELHGQSFQGLKELSELHLGDNNIRQLPEGVWCSMPSLQLLNLTQNRIRSAEFLGFSEKLCAGSALSNANGAVSGGSELQTLDVSFNELRSLPDAWGASRLRRLQTLSLQHNNISTLAPNALAGLSSLRVLNISYNHLVSLPSEAFAGNKELRELHLQGNDLYELPKGLLHRLEQLLVLDLSGNQLTSHHVDNSTFAGLIRLIVLNLSNNALTRIGSKTFKELYFLQILDMRNNSIGHIEEGAFLPLYNLHTLNLAENRLHTLDNRIFNGLYVLTKLTLNNNLVSIVESQAFRNCSDLKELDLSSNQLTEVPEAVQDLSMLKTLDLGENQISEFKNNTFRNLNQLTGLRLIDNRIGNITVGMFQDLPRLSVLNLAKNRIQSIERGAFDKNTEIEAIRLDKNFLTDINGIFATLASLLWLNLSENHLVWFDYAFIPSNLKWLDIHGNYIEALGNYYKLQEEIRVTTLDASHNRITEIGAMSVPNSIELLFINNNIIGQIQANTFVDKTRLARVDLYANVLSKISLNALRVAPVSAEKPVPEFYLGGNPFECDCSMEWLQRINNLTTRQHPHVVDLGNIECLMPHSRSAPLRPLASLSASDFVCKYESHCPPTCHCCEYEQCECEVICPGNCSCFHDATWATNIVDCGRQDLAALPNRIPQDVSDLYLDGNNMPELEVGHLTGRRNLRALYLNASNLMTLQNGSLAQLVNLRVLHLENNKLTALEGTEFRSLGLLRELYLHNNMLTHISNATFEPLVSLEVLRLDNNRLSSLPHLQYRHSLQGLTLGRNAWSCRCQQLRELAQFVSDNAMVVRDAHDIYCLDAGIKRELELIGNLANGPDCSDLLDASASNISSSQDLAGGYRLPLLAAVLVLIFLVVVLIIVFVFRESVRMWLFAHYGVRVCEPRFEDAGKLYDAIILHSEKDYEFVCRNIAAELEHGRPPFRLCIQQRDLPPQASHLQLVEGARASRKIILVLTRNLLATEWNRIEFRNAFHESLRGLAQKLVIIEETSVSAEAEDVAELSPYLKSVPSNRLLTCDRYFWEKLRYAIPIELSPRGNNYTLDHHERFKQPVSPGMIFRQAPPPPAYYCTEEMEANYSSATTATPSPRPTRPGGAARIVDSMPMPMRPPSEHIYHSIESEYSAYDQHEALSMIPTGLMHQHQQQQLRLHQQQQQQQQQRLLQPQFRAMPQQAIPAPSAPVHLRSGSGLSQASTSTQSTAQASTSAAAAQQQQQQQQQQAAGSEAANKNGQAFLV

SEQ ID NO: 18724 - DNA, 3330 bp, DROSOPHILA
ctgctgccagctgtgcagagcttggaaatggcctcctcgcacgcctgattgggaattggaaacgttagagagttaatttgcaggtggaaatgtcataaaaacaatttcatatgcgctggctatcaatttcataattgcgtagagcaagcacaggtggaaccagagcaaaccaccccccgcccaccgacgtccttccaccaccacccaactgggttgttgggtgacacacactcgtgtgtcggcggataagtgccgcaattagacaaccacggccgtgaatcacacgtcagcaggactcacctccttgatctgaggatacttcttcttggtctccagcgagagggtcttgaaatccgcctgcagggcctccacaaacttgtgcacgtcctggccaccgcacccgcccccgcccacaaacgacatggtcactggttgtactcgctcctggtcacttgacactcactgcaccggatgcgtgcgacatttaagtactgcgaccgatacacgcatatgctacgcaaccactttggactcgagaaaatgcaataataatgcagcgcacaatgaaagccgtgaaaaaattgtgattcgttttgacagctgacgtacacagtgcagagttgctagtgattggcaacgcgagctggccatgttaactaacataagcagaaccatcatcaacagtggcctgaaaagcgcccttaacagagcaggagtttcggtgaaattttgtgggtcgccggaaacggaaaataaagataatggcaaggaagaagtatctttaccaggatgaggccctaatcccaaaagccatatacgttaaattccataaatacaacatccaaaaaggataagataagactaaaaaataatctgtcaagtatgcttttcatgttttgcctatttaagcgaactttataaacatgacttttgggtgcttggttcaaatccaccttgtagagcggtcacattcccggaaaactagaactaacttatagccatggctggccgactgctgcgctgcatcctgatactaatccttgtcagctttactgtcttcacgtacgtttccaaagtaggggtaatggaaaaagtcgactattttacgacagcgaaacctgatgtaatgtcaaaaaatcctgcaatacagttagtgggcgaagcgatacggctaagatcctttagggagcctattaaagatttcgacgatggattcgccgttcaaatttcaggaaacagcagtgaaggcaacaaggatatctatacaactattgatggcaatataaatgttgcagattctattgcggcaattagaagcagaagaattgatgaggaaaagctccatggtgagaactatttaattattcattagtcgactcatattgatgttgttactttgcttttcttcaacagatgacgggctagactcaaaagatattttagcaaagaaatcagtggtattgtattcaatagataccgaagttcctgtccgaatgccgcttgtgaaaactatctacaaacctggtcacctggacagtgagattgatatggaaagaatatgtccgcaaaaagggttatcgacgcagttgttagttttaataacctcatcccttcggcattcggcagccagaatgtccatacggcagacttggatgcactacggcagcagaagggacgtgggcatggcatttgtcctgggaaaaggcaaaaacaaatcggtgaagaaggccattgatcaggaggattttatgtaccaggatctgataagaggacacttcatagactcgtacaacaatctcactctgaagaccatttctctgctggaatgggctgatcttcactgtccgaaggctaagtacgttctcaagacggacgatgacatgttcatcaacgtgccgaagttattgaccctcattagcacgcttaaagccaatagaacgatctacggacgacgggccgaaaattggaaacccattcgaaacaggtggtctaaatatcacatatccaacgctcagtatggaaagcctacctttccctacttcaccaccggacccgcctacttgctcactggtgacattgttcacgctctgtatgtccaatccctgaatactgcattcttaaagctggaagatgtcttcaccacgggcattgtggctgaaagtctgaacatccggcgggtaaatgtgcgcgagatggctaacacccggacgaaattcgagacgtgccacatccgcgacaaaattaccatccatatggtaaggaataacgagcagtttaccttgtggaatatgttattagacgacaccataaagtgtgataaccaggtataaagaaaatgaaaattatttaacaattttttacaaacaaatagttatatacgctcaacaaaataaaaaaggaaaatcaagaatttagagcgcactggttggctggtacacatagaactcttcatccgcagacttgctgacccgcagctttccctccttctccagcttgcttaggtggtggttcacgttataggcggcggcgggccagaggttttctggtgtctccttgtagaccaccttcacgacgtccatagcctgcaagttttcgttgggccgctgaacgaagaactgcaggatttgctgttctcgctggttgcgatggttaatgtagtactcaatcttgccaattggttcctcaatgacattgccatggcctggaaagatacgctgcggcttgatgtctagtatcttctccaggcttttcatgtactcaaataggtcctcgaagacggcggtgccctcgccaaggatgcaatcgccgctgaagagtgtgccctcgttcatggccagcaccacatgatcagtggtgtgaccgggtgtgtgaaccacccgcacattcgccccctccgtggtgaactcttggttgtgtgctagcggatggagtttgatatccgtcggtatctcggggcacacatctggagcatctgtacgcccaaacttgaatacgcggcaatccttttcggccaatttagtacccacaatgctctttacaccgccgacatggtcgtggtgccagtgggtcagcaggatggtgtcgatggaggccttttcctgctgtagcacatctcccaggtgagcgatgtactgcggcacgtcttcgtcaccagtgtcgatcaagattctcctactgccactgccgaggaggtacgtattggtgccctggagcgtcatggcactgggattacaacccagtatccgaattacggaggaggtgagtctggtaacagccggaatcagcgccatctcttcgttcactaaatctgagaaagcgataagtattccg

SEQ ID NO: 18725 - DNA, 1094 bp, DROSOPHILA
atggctggccgactgctgcgctgcatcctgatactaatccttgtcagctttactgtcttcacgtacgtttccaaagtaggggtaatggaaaaagtcgactattttacgacagcgaaacctgatgtaatgtcaaaaaatcctgcaatacagttagtgggcgaagcgatacggctaagatcctttagggagcctattaaagatttcgacgatggattcgccgttcaaatttcaggaaacagcagtgaaggcaacaaggatatctatacaactattgatggcaatataaatgttgcagattctattgcggcaattagaagcagaagaattgatgaggaaaagctccatgatgacgggctagactcaaaagatattttagcaaagaaatcagtggtattgtattcaatagataccgaagttcctgtccgaatgccgcttgtgaaaactatctacaaacctggtcacctggacagtgagattgatatggaaagaatatgtccgcaaaaagggttatcgacgcagttgatctgataagaggacacttcatagactcgtacaacaatctcactctgaagaccatttctctgctggaatgggctgatcttcactgtccgaaggctaagtacgttctcaagacggacgatgacatgttcatcaacgtgccgaagttattgaccctcattagcacgcttaaagccaatagaacgatctacggacgacgggccgaaaattggaaacccattcgaaacaggtggtctaaatatcacatatccaacgctcagtatggaaagcctacctttccctacttcaccaccggacccgcctacttgctcactggtgacattgttcacgctctgtatgtccaatccctgaatactgcattcttaaagctggaagatgtcttcaccacgggcattgtggctgaaagtctgaacatccggcgggtaaatgtgcgcgagatggctaacacccggacgaaattcgagacgtgccacatccgcgacaaaattaccatccatatggtaaggaataacgagcagtttaccttgtggaatatgttattagacgacaccataaagtgtgataaccaggtataa

SEQ ID NO: 18726 - protein, 175 aa, DROSOPHILA
MAGRLLRCILILILVSFTVFTYVSKVGVMEKVDYFTTAKPDVMSKNPAIQLVGEAIRLRSFREPIKDFDDGFAVQISGNSSEGNKDIYTTIDGNINVADSIAAIRSRRIDEEKLHDDGLDSKDILAKKSVVLYSIDTEVPVRMPLVKTIYKPGHLDSEIDMERICPQKGLSTQLI

SEQ ID NO: 18727 - DNA, 2864 bp, DROSOPHILA
ttggggaataaaatggcagcatgggtcaacaaacttgcgctgcatctttgtctctagaatctatattctgaatctcaaccttcttgcttttatagatcatgatcaagaatatatatatgtactttatctagtcggaaacgcttccttctgcctgttacatacttttcgacgaatctagtatacccttttactctacgagtatatgaaatgcaaacatcgaattcggcttgattttcgaacactcgcgaagaaaatttcaggcgggaaatttcgatcagtatactgaagggaaaatgattgtgtgcaaaacacatacacaattgtagccttcgttactttttttaaagattattcataaagaccaatggcataaaaccaagaaatcaaatatatcccatattatatatatatatttttaaaatataacgacactgttaatagttgaacaaattagtagatttctctaaccgcgtatgtagcatacataaaagctttgttggaataagagttaaacacttagctacttatttcagtaaaatcttttgaagacatttcaatattgaaactaagcaagcttcatactctccataaattggaccaccagcagctaaaacagagctatttgacccacttcctctactggattccttggttgccagcagctggtcctcttattcgatgtacaatcattccatccagcagtaactgggtttctaccacatttttctagtcgtattgggaaaattccaccaaattcaaaaaattttagttcttgaaaaaaaaaaaatggttttatttagcctggtggggctgctcttcaacagatttgcgctgactctcggaaagttaacactccacgaaaatgctatttgggcaggatacattcctcctgtgcccatccgtttaacaagcttctggcctggaatcggttctccaggtccactttatcgtgctctaccaagttgctaaactatttaggactaactgacaaaaaattggtttatttcgccttagcagcaggtttctgtggctcctcctcgctgtcgtcgtcctccgcttcggagtcgaactcagagtcttcgtcgtcctcgtcggaatcgaagtccgaatcatcctcgtcctcgtcaccatcgccggcgagattcaactgcttgatcttgtccagcagctcatcgcgcgtgtgcgccacccgtttggccttctcctggctctctagctcctgctcgtccagctgctcctcgcttgggtccttctcttgcttcttacccttccgcatgtagcgcaagaaggcgcgacgcttgcgctccgagaacgacttgaccagccggtccatctctgactgcagttgctgctcctcgcgcggcgtcggctgcggctcctcgatagccacctcagtggcgcttttcaggcacttggcgcaggcattcgccttgatggcgcagtccctgcagaccacatggtaggccttcttcaccgaccgctccttgcagtgggcgcagaccttggcctgcgtcagcggcttgtacttcttgtacttgatcttccactcgatctgctccttgcaccgctggcacaccgtggacacgtgcatcgcattcaggcgcagctgctgcggcgtcttgtcgtgcagatcgtttttgaaaacatgacgatttttgtgcttctgcgcacgtgtgcgacttacattgccgcgctggctgctcatctttggctcctctggctggtttgcgctgcagatacatggggcattagctaaacattcggttagttgaccgtttttcttaatttacctgcttaacttggactatttcgatcacagactgttgcttgccacttattttgcgtgcaatttttattttattttgtacagtgtggccgtttcttgttgctgcgaaaacattgtaagctctggcatgtttccagacacagtggctctcaaaggtctaagcggtgactcaaaccaacaatataactaaaactgtaacggatattcagctttgaatttacaagttttaatttagatttctaattcttataaggggtacattagaaacttatgtgttgttttaatctttgcacttaaaataaaagacatctatagaatatgcagttatcgtacataaatatatacacttattttgagggatattgattcttattattaactttaaaacgcattttgatttgcagaaccccatgtggccatgcgtgacctcaagcagcgcctcttcgatctgctgcgctccggcggcaacaacaacagcagcagcagcaacaacagcggcagcaacggctgcaacagcaacacgaacaacagcagcaattcgcatcagaacaagtcgaacaatcagcaaacatacgcgccgcccgcccacaaaccgaagaaactgcacgagtacacggccgccgattgcaatgcggcattcctgcggaaataccacgacctcagcattagcagggatcgggaaatggacagggatcgggagcgagatcgagagcgggagagggctggacccggtcaggtgcagtcgcccaatgtgatctacttcaacgagaacctgtcgatggccagcaaatacaatgtgcgaccctttccgctcgcccgctatccctcgtgtccgttgagcagcttcggcctctcgccgggatccggacgcccggagggcagtgccggcagcagtttgggggaggaagaggacacggagagcgagccctatcacttctgttccgacgaggatcatagcagtcacacgcaaaccatcaagttgcgacgccatcaacatggacaccacggccatcatggcctcgatctgatggagccgtccgtcaacgaggacgccgacctggaggacgaccaggccgaa

SEQ ID NO: 18728 - DNA, 804 bp, DROSOPHILA
aaaataaaataaaaattgcacgcaaaataagtggcaagcaacagtctgtgatcgaaatagtccaagttaagcagcgcaaaccagccagaggagccaaagatgagcagccagcgcggcaatgtaagtcgcacacgtgcgcagaagcacaaaaatcgtcatgttttcaaaaacgatctgcacgacaagacgccgcagcagctgcgcctgaatgcgatgcacgtgtccacggtgtgccagcggtgcaaggagcagatcgagtggaagatcaagtacaagaagtacaagccgctgacgcaggccaaggtctgcgcccactgcaaggagcggtcggtgaagaaggcctaccatgtggtctgcagggactgcgccatcaaggcgaatgcctgcgccaagtgcctgaaaagcgccactgaggtggctatcgaggagccgcagccgacgccgcgcgaggagcagcaactgcagtcagagatggaccggctggtcaagtcgttctcggagcgcaagcgtcgcgccttcttgcgctacatgcggaagggtaagaagcaagagaaggacccaagcgaggagcagctggacgagcaggagctagagagccaggagaaggccaaacgggtggcgcacacgcgcgatgagctgctggacaagatcaagcagttgaatctcgccggcgatggtgacgaggacgaggatgattcggacttcgattccgacgaggacgacgaagactctgagttcgactccgaagcggaggacgacgacagcgaggaggagccacagaaacctgctgctaaggcgaaataa

SEQ ID NO: 18729 - protein, 234 aa, DROSOPHILA
MSSQRGNVSRTRAQKHKNRHVFKNDLHDKTPQQLRLNAMHVSTVCQRCKEQIEWKIKYKKYKPLTQAKVCAHCKERSVKKAYHVVCRDCAIKANACAKCLKSATEVAIEEPQPTPREEQQLQSEMDRLVKSFSERKRRAFLRYMRKGKKQEKDPSEEQLDEQELESQEKAKRVAHTRDELLDKIKQLNLAGDGDEDEDDSDFDSDEDDEDSEFDSEAEDDDSEEEPQKPAAKAK

SEQ ID NO: 18730 - DNA, 8661 bp, DROSOPHILA
ttcgttgcataatatttaaaacgaaggtagtattaaactcgattgcctaattctaatattaaaaccaaaagaaaacaaaaaactataaaaacattaacattaacagtaataataataatgaaaacaagaacaacaaaaaatgttattatacttattataccgattaaaatgaaaacaaaaacagaaaaccgacaaaaaaatgaaacaaaacaaattaaaataaaaattttatttagattaaaaccttgcactttcgctgatctaaacgcacaagcggaatcgaaaaggtaggtacatttccaaattggtaatacgaatttgctaccaattttaacattactgctagttacataagaatttccgctgaacaagaggactttcagtgagataaatatttattatgtagtcgcatacagtttattttgccaaacataacaagagtaatcagtaaccccatttcgcaaatacgaaccagttgccaagtcgaaagaattccatgtcgaggcagctcaaggtggcttctcactgcggatgtgataaggatggggcaacagaaaatgtgtgtgctcaggtagccggcgaggtaaactcgttgtcgaggcagccgtccatccaactggatgttggtgataagggctatctgacgtcataaattaactacgcttaacaggtggtaataataatttttgctttatttaaaaacgtcactacaaagttggttggttgcatcatggttaatggttaatatttgattcagataacacgcaagtctgtactttaaaatgcgctacacaaatagatcatagttagatttgtatagatatatgccatagcctatatagttctttgtctttgcgtctcgaaaaaggtactaaaggaatctgctgactgcgtttcgttcctgtgccaagcggttcgtaggttcgtttcatcatggttattcggctgtagggcaacgccggatagacctattgtatacttcatagctcaactacaaaatacttttacaaatataaatatatatatatatatgtttaggtatgtatgtaagtacatagatgcttagtcgttacatctatgcgagggagggctaagattaacattcataaattatgcacaaaataaatatatattcaaacggttcgcgcttaaacaactaagaaaaacatcgcacagctgtcaccagtctggatgtggacttggtctctgtctgtgtctaggcatactttcactcttgtccattcgattgtattacattgtcgtttgaggtggccgctgagcaggatcgtggcgcctgcagcaagtccgtgtactggagcagtgcttctcgtagtgatcttgacacttccggcgacgttgttgtggtgcagtccaccaggtatggatacaggccaatcaactgatcccaagccggcttgttgactgtgagaaacgaaacatgtaagctaacattggacacaatcgtatgtaagtcgtgtatattttaccctttgatgctggcgcttttttcatggataccacaagtgttgcaatggcttttagcacaaacgatatctctgatagccggaacctgacaacaaagtaatttacatgagtcatatgagtattccaggattatttttaatctaatcgtaccttggaagcggacactttccgctttgtctctcatcgtcgttaaaccgtttgagcacctcttggaatcgatgcaacagggcggtgactgctagtctgccggcaaagtccttgccacctgctcccgcggccccagcagtcaacacattggcgttgagacgattgttgttggtgttggcatggtcctctagcagcgagaactgcagaagggtctcgaaacacgttttggcaaaaatctcacgcagcttccagtcggattcgtagcaaatgttcgtgtctgaggcggagtgtatagatcccttgttcagcagcactacgatctgcatgataaactggtgtggcatttcgtgcgagtgaggcaacacctcgtccctcagcagctcaataacctgacaatcgatcgtttcatccagcacgatctcctcgagaccgcgatcctcgatggtgcacacactcgccggaaacaggaacttgtccagggtatcggccaaatcgtcccacaagcttgcgaaatgttgcggcttagctcgcgccaccttgagaccagtatgcagcacgctaatcagactggaaatggccagcttccatgtgctggaggaaaggcatttgtacttcatcgccagcggcgtgcgcagagccttgacgatgtcatgcagaatctgctcctgcacaaccgaatcctcggtggccgtggtctggtaaagcttcacgcaaatactgattgacttctcaccgaaaggtatgtagttcatgctgaccacctcaacggaggcattgttggcatagtgtcccgaggacttcgcatacttgtgctccacactctgctgaaatgtgggcggtgcgcaagcgaatttactaaagatcagcaactgccggaaaatggcagggataagctggctgatgtgggaatcgggttttgtcgcctcctattcaaagattattaattatatattataatggattgtcttgtaaatgcttgccttctgtattagttccatgcaatcgagaatgccatcgtgtagcggcgtcagcagggtgtccgacacagtggacatgatgtagggaaccgcatcggtctggacgggaatgcacacagcgttcgtcagtaccgtacagaatttgtcaaagtctgcggcagtaaatctgaaaacaattcaaatataaattaatcgttttgaaaaaaatagctaaacgatattaaacatagcaaatgtataaattgatcaatttaaaatatattatatttttggggaatctatgacaatgcgttcttcctaagtaggtgtgtctactaacttgacttgaatgtgctgaaaaatggcgggaaagatttggatcagggcggtgaggaaggcctgactgggaatgtaaaagtcctcctgagtttcggcgccattgctattttgctgctgcaacttcgctgacgtcgatgtggacattttggtgctctccatgccaatgctaagccaaatgttccaagcaatctgctcaaaagtaggaaagacaaaagttcatttagtataaataaacaaaagacaaccactttggttgacagctatcttaatctctaaactactcacagtccaaatttcctcgtcctgctcctgtgccgtctgaggatccttcaatgccctctctgttcgctctgctgtgttgtggtacatgatctcctgtagagacttcagagcagcaagtgaaacttcaccatttttgctcaacgcagcattctggatgaactctagaattagtgaccaggctcgctcaaaatcacccagcatctgaagcagctcccgttttgtattgaacaccctgcagacgcccgatagagtcagcacctgcgtttctgcccactgcttttgggcggtgttgcgcgagtgatggataagaatgttgccactggcgtccaccttctcgttgctggccgagctgctcagagcacgcacgttgtccagcagcgggaagagaacctgccagaccagcgcctgccacgtgggcggattaagcaggctgccgtgggcggagatggtggagaagagcgtctggccggccgatttacgcaccgccggacgcagatccacacacagctcgcccagcttggcgtacaagcacatccacaacttatcgaactgcggcatcttcactgtgcctgggaagtcgggcagaatggacacatcctgcagctgagtggacattagcttgtcttggttttgattaaagaagtctgaaatattccactgcaatcaaagtacaaaattaaagtaactcaataataataatactatgtatgcaacagtttatctaatatgtataacatagcttaccatgagaccgatagccgtcaaagaaatgttcaattcctgggtctgggagccgaacttagcagcagtgctgatgcacagcggcagacaccgccatggcattacggtcaggaaatctgtgataaccaactgcaggcattggaatgctgtgcgaattaacggctcgccatggtgctcgtttacagcaccaatgatctcaataatggctggccagccaaacgagaggatttcccctgcagtgtttaggatctgaaggacgcaatccagctgtcgctgacgtacatctgcgtgcaggacagtagacaactcagagagtggactcagcagcattgtttgtagttcctaaacgtgaaaggggtaaatttgcattttgttgtggtactatttctttgaaacacttttcagtgacgttctacaataattgttaaagaaatacagaggggtaatcttaccatgttctccttgaggggcgttttgtgcttgaactgtagggcagacttcaccaggtaggtaatggcttccacgccccactcccgcattcgaatatgtcgatgttggcacacctccagcaggtgatttgtaagtggtcgccacaatacctttatgcggggcatgtttactaggccagtctctagcagtttggctaccgcaaaaagcgatggttcccgattggcataagcaagttccatggcctcgtgggagagcttgcacaatgcatcgattaaatgatgcagcgctacatcgtccagatattgactggactcgaacagctggctaagcatttgtgacaggaccggaagatcagccatcactgccgtttgaattcccacattagcctctacagctggctttggcatggcctgaagactgcctccggtagaaggtttcagccccaagatccacactagatgctgcagcgtctgcagcacaatatgccaggaggtacccaaaatcccaccattgttgtgcgctaggaaaagaatagctcgcatacactgtagattcttgttagtcagcatcacgggcgcttgcatcacgctgtggggcagcgatgccgatggcagtggtgtacccaccgctacgatctggggtcggaagtctcctgcatcgccactacagctattgatgaactggctgcttagatcttgactaccactgcgcgtgtgacctgtaacggataggtttggataaataaatacacaataaataataaatacaattaagaacttacatctcaagtcaccatccgactgtgtggtattggcaaatatggacatggcatagtggggcggaaaggaggcgcggcacatggccattataaaggcgtctcggggctgcagttgctccagcattccgcacagagctgcataattttgcatagccttgaggatgttctccgtggtggcctcgtcaatcgacgtctcaaccaacggaataaaagcgctgagcagggcagaccagctggaattcaccagttggaggcacagtggcttgtgctcctcctcagtgatcactgccgtattgtggctgggatgaagctccggggttcgctgaatgacacctccaatcgatcgagtcatatccagtagaatagcatgcccaaccgagatgccataactgtcgggaatattcgatgcatctatcttatccaacatttccaagctgaaaaataaaattataaataagattttatacaaaaaagctgatatttcaacttactaaacggcctttgagacgcctggcgcatatgtggctaccaagggaaggtaagcacctcgaaacatgaagccacattgattgcttcccgacatggctgtcagtgaattggcgactccattctgctggccattcagcatggccgatgcattgatcagggaatatcgaatgtagctgcccatggcagcaatcatgtcatgcacaatattggttgcatgattttttaagtcgtacgacttgcagaagaatgcaatcagtgaagagcgcgtcaccagcttatggataacctcgagggccagggctcgctgccaagctggcttatccggatccaagaacttgataatcagcgacagaaagatctcacactctgttaccagtatagtgtggtatttttgtataagtatagccacgaggcgcagcaaacgcatgctaattgggaaatagggtttctcggccggcacaggagcgtttccattgcttggtgcaggcagctggcgatgcttgacgtttggcgagaagagctttatgaccaaggcacagactcgttccttaagtagcagtcgaaagtcgttactctattgaaaaaaaaaggatttaattaatatataaataaaactgatcttttggaactctgaaatttcagacttgcttttgcttattttctgatctaaactcctatagaaacagcacaattgtttaaatcgaaagacttgaaagtcgattcgtcgtctaggccgatttgtaaacatacctcgtgaaacacggcactgaagttggtcagcacggcctcaagtaactccagaccaaaggtgcgcgtcatttcggtcatgcccaacagccagtagggctgatccgcgtttaccaactgcacaagatcctgaaatagcaggaatgcatccgaagcaaaggtctgcacatcctgatttccgccctctccctcagctggcgaaccactggactgttgctgctggaggctggaaaccgagtctttctccaggtacactcgctcaaacaccagggacaccagctgccggatggtggcaccggccgtattcacaattgtgggatttttggcgtagtgcaggcgaaagcacagaactaaggccttggccaatgtgtcgccgtgcaccaccgtattggtggtcagcaaaagagttactgtttgcagcactttgacttcctcgatgttgttctccattagggtccacagtgcgttggtgatgtatagggcgcccttctggtccaccacctgctgggtgatgagccgctgcatcatgcctaagcaaaactggaaaaaagataggaaagcaattagatatatttactatataaatggctgctcttaccttgatgatcttgaggtccttggtctcgcatccctgcaccagcggatagagtatctggttgacggtgtagtacaccgagttttgctggctgctgccagctgtgcagagcttggaaatggcctcctcgcacgcctgattgggaattggaaacgttagagagttaatttgcaggtggaaatgtcataaaaacaatttcatatgcgctggctatcaatttcataattgcgtagagcaagcacaggtggaaccagagcaaaccaccccccgcccaccgacgtccttccaccaccacccaactgggttgttgggtgacacacactcgtgtgtcggcggataagtgccgcaattagacaaccacggccgtgaatcacacgtcagcaggactcacctccttgatctgaggatacttcttcttggtctccagcgagagggtcttgaaatccgcctgcagggcctccacaaacttgtgcacgtcctggccaccgcacccgcccccgcccacaaacgacatggtcactggttgtactcgctcctggtcacttgacactcactgcaccggatgcgtgcgacatttaagtactgcgaccgatacacgcatatgctacgcaaccactttggactcgagaaaatgcaataataatgcagcgcacaatgaaagccgtgaaaaaattgtgattcgttttgacagctgacgtacacagtgcagagttgctagtgattggcaacgcgagctggccatgttaactaacataagcagaaccatcatcaacagtggcctgaaaagcgcccttaacagagcaggagtttcggtgaaattttgtgggtcgccggaaacggaaaataaagataatggcaaggaagaagtatctttaccaggatgaggccctaatcccaaaagccatatacgttaaattccataaatacaacatccaaaaaggataagataagactaaaaaataatctgtcaagtatgcttttcatgttttgcctatttaagcgaactttataaacatgacttttgggtgcttggttcaaatccaccttgtagagcggtcacattcccggaaaactagaactaacttatagccatggctggccgactgctgcgctgcatcctgatactaatccttgtcagctttactgtcttcacgtacgtttccaaagtaggggtaatggaaaaagtcgactattttacgacagcgaaacctgatgtaatgtcaaaaaatcctgcaatacagttagtgggcgaagcgatacggctaagatcctttagggagcctattaaagatttcgacgatggattcgccgttcaaatttcaggaaacagcagtgaaggcaacaaggatatctatacaactattgatggcaatataaatgttgcagattctattgcggcaattagaagcagaagaattgatgaggaaaagctccatggtgagaactatttaattattcattagtcgactcatattgatgttgttactttgcttttcttcaacagatgacgggctagactcaaaagatattttagcaaagaaatcagtggtattgtattcaatagataccgaagttcctgtccgaatgccgcttgtgaaaactatctacaaacctggtcacctggacagtgagattgatatggaaagaatatg

SEQ ID NO: 18731 - DNA, 5376 bp, DROSOPHILA
tgcgctgcattattattgcattttctcgagtccaaagtggttgcgtagcatatgcgtgtatcggtcgcagtacttaaatgtcgcacgcatccggtgcagtgagtgtcaagtgaccaggagcgagtacaaccagtgaccatgtcgtttgtgggcgggggcgggtgcggtggccaggacgtgcacaagtttgtggaggccctgcaggcggatttcaagaccctctcgctggagaccaagaagaagtatcctcagatcaaggaggcgtgcgaggaggccatttccaagctctgcacagctggcagcagccagcaaaactcggtgtactacaccgtcaaccagatactctatccgctggtgcagggatgcgagaccaaggacctcaagatcatcaagttttgcttaggcatgatgcagcggctcatcacccagcaggtggtggaccagaagggcgccctatacatcaccaacgcactgtggaccctaatggagaacaacatcgaggaagtcaaagtgctgcaaacagtaactcttttgctgaccaccaatacggtggtgcacggcgacacattggccaaggccttagttctgtgctttcgcctgcactacgccaaaaatcccacaattgtgaatacggccggtgccaccatccggcagctggtgtccctggtgtttgagcgagtgtacctggagaaagactcggtttccagcctccagcagcaacagtccagtggttcgccagctgagggagagggcggaaatcaggatgtgcagacctttgcttcggatgcattcctgctatttcaggatcttgtgcagttggtaaacgcggatcagccctactggctgttgggcatgaccgaaatgacgcgcacctttggtctggagttacttgaggccgtgctgaccaacttcagtgccgtgtttcacgagagtaacgactttcgactgctacttaaggaacgagtctgtgccttggtcataaagctcttctcgccaaacgtcaagcatcgccagctgcctgcaccaagcaatggaaacgctcctgtgccggccgagaaaccctatttcccaattagcatgcgtttgctgcgcctcgtggctatacttatacaaaaataccacactatactggtaacagagtgtgagatctttctgtcgctgattatcaagttcttggatccggataagccagcttggcagcgagccctggccctcgaggttatccataagctggtgacgcgctcttcactgattgcattcttctgcaagtcgtacgacttaaaaaatcatgcaaccaatattgtgcatgacatgattgctgccatgggcagctacattcgatattccctgatcaatgcatcggccatgctgaatggccagcagaatggagtcgccaattcactgacagccatgtcgggaagcaatcaatgtggcttcatgtttcgaggtgcttaccttcccttggtagccacatatgcgccaggcgtctcaaaggccgtttattatggcatctcggttgggcatgctattctactggatatgactcgatcgattggaggtgtcattcagcgaaccccggagcttcatcccagccacaatacggcagtgatcactgaggaggagcacaagccactgtgcctccaactggtgaattccagctggtctgccctgctcagcgcttttattccgttggttgagacgtcgattgacgaggccaccacggagaacatcctcaaggctatgcaaaattatgcagctctgtgcggaatgctggagcaactgcagccccgagacgcctttataatggccatgtgccgcgcctcctttccgccccactatgccatgtccatatttgccaataccacacagtcggatggtgacttgagatgtcacacgcgcagtggtagtcaagatctaagcagccagttcatcaatagctgtagtggcgatgcaggagacttccgaccccagatcgtagcggtgggtacaccactgccatcggcatcgctgccccacagcgtgatgcaagcgcccgtgatgctgactaacaagaatctacagtgtatgcgagctattcttttcctagcgcacaacaatggtgggattttgggtacctcctggcatattgtgctgcagacgctgcagcatctagtgtggatcttggggctgaaaccttctaccggaggcagtcttcaggccatgccaaagccagctgtagaggctaatgtgggaattcaaacggcagtgatggctgatcttccggtcctgtcacaaatgcttagccagctgttcgagtccagtcaatatctggacgatgtagcgctgcatcatttaatcgatgcattgtgcaagctctcccacgaggccatggaacttgcttatgccaatcgggaaccatcgctttttgcggtagccaaactgctagagactggcctagtaaacatgccccgcataaaggtattgtggcgaccacttacaaatcacctgctggaggtgtgccaacatcgacatattcgaatgcgggagtggggcgtggaagccattacctacctggtgaagtctgccctacagttcaagcacaaaacgcccctcaaggagaacatggaactacaaacaatgctgctgagtccactctctgagttgtctactgtcctgcacgcagatgtacgtcagcgacagctggattgcgtccttcagatcctaaacactgcaggggaaatcctctcgtttggctggccagccattattgagatcattggtgctgtaaacgagcaccatggcgagccgttaattcgcacagcattccaatgcctgcagttggttatcacagatttcctgaccgtaatgccatggcggtgtctgccgctgtgcatcagcactgctgctaagttcggctcccagacccaggaattgaacatttctttgacggctatcggtctcatgtggaatatttcagacttctttaatcaaaaccaagacaagctaatgtccactcagctgcaggatgtgtccattctgcccgacttcccaggcacagtgaagatgccgcagttcgataagttgtggatgtgcttgtacgccaagctgggcgagctgtgtgtggatctgcgtccggcggtgcgtaaatcggccggccagacgctcttctccaccatctccgcccacggcagcctgcttaatccgcccacgtggcaggcgctggtctggcaggttctcttcccgctgctggacaacgtgcgtgctctgagcagctcggccagcaacgagaaggtggacgccagtggcaacattcttatccatcactcgcgcaacaccgcccaaaagcagtgggcagaaacgcaggtgctgactctatcgggcgtctgcagggtgttcaatacaaaacgggagctgcttcagatgctgggtgattttgagcgagcctggtcactaattctagagttcatccagaatgctgcgttgagcaaaaatggtgaagtttcacttgctgctctgaagtctctacaggagatcatgtaccacaacacagcagagcgaacagagagggcattgaaggatcctcagacggcacaggagcaggacgaggaaatttggactattgcttggaacatttggcttagcattggcatggagagcaccaaaatgtccacatcgacgtcagcgaagttgcagcagcaaaatagcaatggcgccgaaactcaggaggacttttacattcccagtcaggccttcctcaccgccctgatccaaatctttcccgccatttttcagcacattcaagtcaaatttactgccgcagactttgacaaattctgtacggtactgacgaacgctgtgtgcattcccgtccagaccgatgcggttccctacatcatgtccactgtgtcggacaccctgctgacgccgctacacgatggcattctcgattgcatggaactaatacagaaggaggcgacaaaacccgattcccacatcagccagcttatccctgccattttccggcagttgctgatctttagtaaattcgcttgcgcaccgcccacatttcagcagagtgtggagcacaagtatgcgaagtcctcgggacactatgccaacaatgcctccgttgaggtggtcagcatgaactacatacctttcggtgagaagtcaatcagtatttgcgtgaagctttaccagaccacggccaccgaggattcggttgtgcaggagcagattctgcatgacatcgtcaaggctctgcgcacgccgctggcgatgaagtacaaatgcctttcctccagcacatggaagctggccatttccagtctgattagcgtgctgcatactggtctcaaggtggcgcgagctaagccgcaacatttcgcaagcttgtgggacgatttggccgataccctggacaagttcctgtttccggcgagtgtgtgcaccatcgaggatcgcggtctcgaggagatcgtgctggatgaaacgatcgattgtcaggttattgagctgctgagggacgaggtgttgcctcactcgcacgaaatgccacaccagtttatcatgcagatcgtagtgctgctgaacaagggatctatacactccgcctcagacacgaacatttgctacgaatccgactggaagctgcgtgagatttttgccaaaacgtgtttcgagacccttctgcagttctcgctgctagaggaccatgccaacaccaacaacaatcgtctcaacgccaatgtgttgactgctggggccgcgggagcaggtggcaaggactttgccggcagactagcagtcaccgccctgttgcatcgattccaagaggtgctcaaacggtttaacgacgatgagagacaaagcggaaagtgtccgcttccaaggttccggctatcagagatatcgtttgtgctaaaagccattgcaacacttgtggtatccatgaaaaaagcgccagcatcaaaggtcaacaagccggcttgggatcagttgattggcctgtatccatacctggtggactgcaccacaacaacgtcgccggaagtgtcaagatcactacgagaagcactgctccagtacacggacttgctgcaggcgccacgatcctgctcagcggccacctcaaacgacaatgtaatacaatcgaatggacaagagtgaaagtatgcctagacacagacagagaccaagtccacatccagactggtgacagctgtgcgatgtttttcttagttgtttaagcgcgaaccgtttgaatatatatttattttgtgcataatttatgaatgttaatcttagccctccctcgcatagatgtaacgactaagcatctatgtacttacatacatacctaaacatatatatatatatatttatatttgtaaaagt

SEQ ID NO: 18732 - protein, 1669 aa, DROSOPHILA
MSFVGGGGCGGQDVHKFVEALQADFKTLSLETKKKYPQIKEACEEAISKLCTAGSSQQNSVYYTVNQILYPLVQGCETKDLKIIKFCLGMMQRLITQQVVDQKGALYITNALWTLMENNIEEVKVLQTVTLLLTTNTVVHGDTLAKALVLCFRLHYAKNPTIVNTAGATIRQLVSLVFERVYLEKDSVSSLQQQQSSGSPAEGEGGNQDVQTFASDAFLLFQDLVQLVNADQPYWLLGMTEMTRTFGLELLEAVLTNFSAVFHESNDFRLLLKERVCALVIKLFSPNVKHRQLPAPSNGNAPVPAEKPYFPISMRLLRLVAILIQKYHTILVTECEIFLSLIIKFLDPDKPAWQRALALEVIHKLVTRSSLIAFFCKSYDLKNHATNIVHDMIAAMGSYIRYSLINASAMLNGQQNGVANSLTAMSGSNQCGFMFRGAYLPLVATYAPGVSKAVYYGISVGHAILLDMTRSIGGVIQRTPELHPSHNTAVITEEEHKPLCLQLVNSSWSALLSAFIPLVETSIDEATTENILKAMQNYAALCGMLEQLQPRDAFIMAMCRASFPPHYAMSIFANTTQSDGDLRCHTRSGSQDLSSQFINSCSGDAGDFRPQIVAVGTPLPSASLPHSVMQAPVMLTNKNLQCMRAILFLAHNNGGILGTSWHIVLQTLQHLVWILGLKPSTGGSLQAMPKPAVEANVGIQTAVMADLPVLSQMLSQLFESSQYLDDVALHHLIDALCKLSHEAMELAYANREPSLFAVAKLLETGLVNMPRIKVLWRPLTNHLLEVCQHRHIRMREWGVEAITYLVKSALQFKHKTPLKENMELQTMLLSPLSELSTVLHADVRQRQLDCVLQILNTAGEILSFGWPAIIEIIGAVNEHHGEPLIRTAFQCLQLVITDFLTVMPWRCLPLCISTAAKFGSQTQELNISLTAIGLMWNISDFFNQNQDKLMSTQLQDVSILPDFPGTVKMPQFDKLWMCLYAKLGELCVDLRPAVRKSAGQTLFSTISAHGSLLNPPTWQALVWQVLFPLLDNVRALSSSASNEKVDASGNILIHHSRNTAQKQWAETQVLTLSGVCRVFNTKRELLQMLGDFERAWSLILEFIQNAALSKNGEVSLAALKSLQEIMYHNTAERTERALKDPQTAQEQDEEIWTIAWNIWLSIGMESTKMSTSTSAKLQQQNSNGAETQEDFYIPSQAFLTALIQIFPAIFQHIQVKFTAADFDKFCTVLTNAVCIPVQTDAVPYIMSTVSDTLLTPLHDGILDCMELIQKEATKPDSHISQLIPAIFRQLLIFSKFACAPPTFQQSVEHKYAKSSGHYANNASVEVVSMNYIPFGEKSISICVKLYQTTATEDSVVQEQILHDIVKALRTPLAMKYKCLSSSTWKLAISSLISVLHTGLKVARAKPQHFASLWDDLADTLDKFLFPASVCTIEDRGLEEIVLDETIDCQVIELLRDEVLPHSHEMPHQFIMQIVVLLNKGSIHSASDTNICYESDWKLREIFAKTCFETLLQFSLLEDHANTNNNRLNANVLTAGAAGAGGKDFAGRLAVTALLHRFQEVLKRFNDDERQSGKCPLPRFRLSEISFVLKAIATLVVSMKKAPASKVNKPAWDQLIGLYPYLVDCTTTTSPEVSRSLREALLQYTDLLQAPRSCSAATSNDNVIQSNGQE

SEQ ID NO: 18733 - DNA, 5157 bp, DROSOPHILA
cgacaagctcgacttcaagtttattgactgcgtcgtctgtgcaattaactctgtgttttttttttttctccgtttgcccgctcttgtttgcgcctcaatggccagtgggaggcaggtgaggcaggtggggcaggtggagcataaacgtcagctccatgactgccgtggcccaatgcaccgcagggaaaagccacgcccaccaactgggctcgctggcactgacactgacaccgacaccgacttcgactccgagttacgatctccctagcatcttgtggcacttgtggcccacatattttcacccggcaattagggagtgcctgcaattgcagtctcaaaagtcatatttttggcttacatttttaattccctgtgtttccaatgtggctacagtgcgactgagcgcttaagatagttacattaatggataaataatacatatattatttgtcttctcagtttctattgatttcttgaagatacaagacgccaaaaacttatgatttatttgacctcttcgatatgaaacacaaaaattaaattttccgttggctgagtatatagcgactatactttacaaaaatgagcataaatcaccaatatagaaacattcaaaaatggaaatcaaagcagggaccataagttcttgcccgacacatttcagggaataatgcgcagagatctcgttaaatattcgaataagtattctaagtattctcggatttaacagctaaagaaagcggcttttgcgccttcttgtatcacaacatgtaaggaatatagttaagatatcgtgtgtgctaccttagatataccttaatatgtaagaagtgcagtggatttagtgttatagaataacgatattttggaaattggtaattcgtttgcctctttgtgtgaaattagctctagctctaattagctataggtctatacgggtcgcaaatactgtgagcagttctttagtatatgctttgaaattattttttaagcgtagaattcagaagtcgttatcacagttgtctctgtccagaaggcttttgccctcggccaggcaagtcgagggcacatccgcctccaacaaccgccgaactgtttccggccctataaaatcgctcattagactaagcttccgcgtcgctaccaacttggcgaattcacgatccgttagcattcgcactttatggagctggagtccaaattcagctgggcatttcaaacggatccaggagtccaagcacagcagcatttcggacccatgcgcctcggttatgaaccgttttccgcctgccagagccaccatcaagccgctcaccaaggtggtatgctctagcgaggaaatttggtcagcagtgcgggtcttctcaacgaacaggatccactcgctggccaaatccttttgcttctttttgccccgaaggcaagagcttctcgaaacctgaactaatggatctccttcagccaccagctggttcttgttctcgcgatccatgtacgccaacttgggatacagtcctgcagtcagggccaggcggatcatattcgtatcattgttgaaggacgaggccaaacgagcactggcctcgctaaagcggaagatacggtacacggtgtcgcgtagagtactcgccgccgagacgaacatctccattgcgttacggcaaataaaattgcgctcgcaaaaatcgccgatgtccttgcgctttaagttggtgaactcctcgtagagtttaatgaccgccagcgaatcactcattccgtcgccagcgaaaagaactctggatatctgctgccctgatttcttgccgcgctctatgtttagaacaaagggatccctcaccgagtggtaggccgcaattatgatcatgctgtccaggcagcgcaagtaaatggagtacaccaggcatttgccgatttgaacgcctaagggcagttcggcaacgatatgtcccagcggcgtgacctcgtcccgttcgtcgagcacgcccaatagcttcagtctagaacaggactgcattacggcatcctttggtggggtatccaaagccagagctagaaaattttctattttcttgtctggagctgccaacttggtcagcagacatatctcgtccaaggtacgcctcatgatctctgggatggtgtacagattcattctggccatgcggtcgttgtcatacagacgatagcaattgccatggcacacgcgtccagctcttcccgcacgctgtttggcgtccgcctgcgagatccacgtgagggttaactgcgatgcatctatggtcgagtcataggtcttcatcttggcgaggcccgtgtcgatgacatagagtagatccggaatggtgatcgaagtttgtcctatgttggtactaagaataatctttaaacgcacgccaggataagtgcggaagaccttgcgttgctcgctgttgtccacctggctatgaagcagtatgatagtaatctgttcccgcggcagagacgattccaagcgggccagtagcgaggtcatatcgctatagcctggcaggtacacaatcaccgctccagcgtcaccttggcgcagtaataattccaatagcgaaacgatcaagtcattgtcgatatccggatgtacgattgtgttacctccataataggcggctagtagttcgctaggagtttctttgcctgtcggcttgcccaaaaacttctccattctcgggtgcatgtacccagttttactaagaatgtcctctagatgatagatcgacacctcgaagctgcgcccctccacatccattacagtgcccccaccaaaatagttggacaatgcttcaagatccatggtggccgacataagcacgaggcgaaggtgcggattcttttgcagctccagcttggtggccagcagcaggaagtctgtgtccaaatcacgctcgtgggcttcatcaatgattaagtgggtggtgtttttaaaaaaagacttcttatccatggcgagagcccttaaaaggcaaccactggtggtcagcattagaaccgtgttgctgctgcattgtcctggcagagattgaatattatagttatagtcataattactttacggccaactgctactcactattcatgcgaatattatagcccactgtggtgccaggcgcctcaccgcgctccttggaaatgcgctccgagacactgatagctgctatgcggcgaggctgacttaccacgatcctgactggagcacgatgctctgcggcccactcaaggatgtactggggaagttgggtggacttgccagagccggtggctcctttaatgatcaaaacctgtaaggtggattctcaggtattagtagcaattcagtgtttgacgtaatataaatagaaaatggtacaggtacttaatatcaaaaggaagcatttggtcacctgatcgcgctgcagaacgttgaggatgctctcccgctgcttgtagatgggcaggctccggcgctcgtgctgaatgttcctgttccggttgctctgcggcggcggaataagcctctgcccgaccaggccgaagttggaaggaagccgtatatccttatattgctgtttgttgcactttaagtctccaacggagttcatcaatctgcgttccacattgccggccatttgtcccagaacgtctaggagcggcggacaaatgtccagctttgtgttgcaaagaatgtattgctgttggccatccgactgtgggcgacttataaaaaggacgcggttctcctctggacccttgctcaccgtcttaagcccgcgatgctgggccaatcggtgaacgtggctgcgctgggcttttgtaagtccggggagctgtttctctggctcgcagctctgcaggaagtcgtcgaccagttggcggagcatcttttcgtcctcggacttcagcttgtcgcccgcgtcggctttcgcgttcttgcccggtcgagtcttctgtttgccagttcccttcggcccaccggtcactcggccattgaccaccaacactaccgcctgttccggcataggttgtgccttctttctgccctggcgacggccacgtttcactgcttcttcactgtccgccattcgactgtgttcaatctctgtgcgcttttcaaaactctattcgcctttcaatcagctgtatttctacaatacctcgataacaatgaattgtagaagttatcggaccctattgcgcgtcgatatcaggcggctttgctgcctatcgggccggatggcagtgtgcccaaatgataaacttttataacttttactgttcttgatatgatttatttatctttaatgttttttactataacggtgattcgtactctgaattttacattacctaagcatacttatatttatatttagcttttgaaaccaaattgtgaatttctgcctgctacatacacacatattcatgtgcatatttacatatgaatgtatatttgcttttttatttatattaagctacatataaggtcaaagacaatgatttttacagtgtaagagaggtaatacatatgtagatttttattttatggaattggttgaagttttgttaaattagcagtggcattacttgttcagattgtacgaagagcaactgttttacgtagcgaaaggggaggacagttaattatgatgtggagttgcttagtgatgatttagtataatgatgcgcgttcacggcgaatcttcatgtgttgcagagcccatccttaatggcagccacatacgcagacgcagacacagccttcctggaacacaacaatcgaggccactaatacaggcacagctggcctgcgcaactcctggcagaaaaggtggaacttagcgggcattgtcccttcatcagcctgggccacgctacaatcccagaggaagccactccgaattacctaggtatcaggagtctcaactgcaagccgcaccaattgagaaaagccagactaccgactaaaattattctactggcatataggcagagggtccaagttgcggacatccacaaatcttcttatatataatccgatcgtcaggccgatctggggaacggccagtaagtccaatatcgaaataataccggagcccacgtgctgcacgacaaatccaccatcaacgaggtcctaggcttcgcttg

SEQ ID NO: 18734 - DNA, 2994 bp, DROSOPHILA
aaatacagctgattgaaaggcgaatagagttttgaaaagcgcacagagattgaacacagtcgaatggcggacagtgaagaagcagtgaaacgtggccgtcgccagggcagaaagaaggcacaacctatgccggaacaggcggtagtgttggtggtcaatggccgagtgaccggtgggccgaagggaactggcaaacagaagactcgaccgggcaagaacgcgaaagccgacgcgggcgacaagctgaagtccgaggacgaaaagatgctccgccaactggtcgacgacttcctgcagagctgcgagccagagaaacagctccccggacttacaaaagcccagcgcagccacgttcaccgattggcccagcatcgcgggcttaagacggtgagcaagggtccagaggagaaccgcgtcctttttataagtcgcccacagtcggatggccaacagcaatacattctttgcaacacaaagctggacatttgtccgccgctcctagacgttctgggacaaatggccggcaatgtggaacgcagattgatgaactccgttggagacttaaagtgcaacaaacagcaatataaggatatacggcttccttccaacttcggcctggtcgggcagaggcttattccgccgccgcagagcaaccggaacaggaacattcagcacgagcgccggagcctgcccatctacaagcagcgggagagcatcctcaacgttctgcagcgcgatcaggttttgatcattaaaggagccaccggctctggcaagtccacccaacttccccagtacatccttgagtgggccgcagagcatcgtgctccagtcaggatcgtggtaagtcagcctcgccgcatagcagctatcagtgtctcggagcgcatttccaaggagcgcggtgaggcgcctggcaccacagtgggctataatattcgcatgaatagacaatgcagcagcaacacggttctaatgctgaccaccagtggttgccttttaagggctctcgccatggataagaagtctttttttaaaaacaccacccacttaatcattgatgaagcccacgagcgtgatttggacacagacttcctgctgctggccaccaagctggagctgcaaaagaatccgcaccttcgcctcgtgcttatgtcggccaccatggatcttgaagcattgtccaactattttggtgggggcactgtaatggatgtggaggggcgcagcttcgaggtgtcgatctatcatctagaggacattcttagtaaaactgggtacatgcacccgagaatggagaagtttttgggcaagccgacaggcaaagaaactcctagcgaactactagccgcctattatggaggtaacacaatcgtacatccggatatcgacaatgacttgatcgtttcgctattggaattattactgcgccaaggtgacgctggagcggtgattgtgtacctgccaggctatagcgatatgacctcgctactggcccgcttggaatcgtctctgccgcgggaacagattactatcatactgcttcatagccaggtggacaacagcgagcaacgcaaggtcttccgcacttatcctggcgtgcgtttaaagattattcttagtaccaacataggacaaacttcgatcaccattccggatctactctatgtcatcgacacgggcctcgccaagatgaagacctatgactcgaccatagatgcatcgcagttaaccctcacgtggatctcgcaggcggacgccaaacagcgtgcgggaagagctggacgcgtgtgccatggcaattgctatcgtctgtatgacaacgaccgcatggccagaatgaatctgtacaccatcccagagatcatgaggcgtaccttggacgagatatgtctgctgaccaagttggcagctccagacaagaaaatagaaaattttctagctctggctttggataccccaccaaaggatgccgtaatgcagtcctgttctagactgaagctattgggcgtgctcgacgaacgggacgaggtcacgccgctgggacatatcgttgccgaactgcccttaggcgttcaaatcggcaaatgcctggtgtactccatttacttgcgctgcctggacagcatgatcataattgcggcctaccactcggtgagggatccctttgttctaaacatagagcgcggcaagaaatcagggcagcagatatccagagttcttttcgctggcgacggaatgagtgattcgctggcggtcattaaactctacgaggagttcaccaacttaaagcgcaaggacatcggcgatttttgcgagcgcaattttatttgccgtaacgcaatggagatgttcgtctcggcggcgagtactctacgcgacaccgtgtaccgtatcttccgctttagcgaggccagtgctcgtttggcctcgtccttcaacaatgatacgaatatgatccgcctggccctgactgcaggactgtatcccaagttggcgtacatggatcgcgagaacaagaaccagctggtggctgaaggagatccattagttcaggtttcgagaagctcttgccttcggggcaaaaagaagcaaaaggatttggccagcgagtggatcctgttcgttgagaagacccgcactgctgaccaaatttcctcgctagagcataccaccttggtgagcggcttgatggtggctctggcaggcggaaaacggttcataaccgaggcgcatgggtccgaaatgctgctgtgcttggactcctggatccgtttgaaatgcccagctgaatttggactccagctccataaagtgcgaatgctaacggatcgtgaattcgccaagttggtagcgacgcggaagcttagtctaatgagcgattttatagggccggaaacagttcggcggttgttggaggcggatgtgccctcgacttgcctggccgagggcaaaagccttctggacagagacaactgtgataacgacttctga

SEQ ID NO: 18735 - protein, 976 aa, DROSOPHILA
MADSEEAVKRGRRQGRKKAQPMPEQAVVLVVNGRVTGGPKGTGKQKTRPGKNAKADAGDKLKSEDEKMLRQLVDDFLQSCEPEKQLPGLTKAQRSHVHRLAQHRGLKTVSKGPEENRVLFISRPQSDGQQQYILCNTKLDICPPLLDVLGQMAGNVERRLMNSVGDLKCNKQQYKDIRLPSNFGLVGQRLIPPPQSNRNRNIQHERRSLPIYKQRESILNVLQRDQVLIIKGATGSGKSTQLPQYILEWAAEHRAPVRIVVSQPRRIAAISVSERISKERGEAPGTTVGYNIRMNRQCSSNTVLMLTTSGCLLRALAMDKKSFFKNTTHLIIDEAHERDLDTDFLLLATKLELQKNPHLRLVLMSATMDLEALSNYFGGGTVMDVEGRSFEVSIYHLEDILSKTGYMHPRMEKFLGKPTGKETPSELLAAYYGGNTIVHPDIDNDLIVSLLELLLRQGDAGAVIVYLPGYSDMTSLLARLESSLPREQITIILLHSQVDNSEQRKVFRTYPGVRLKIILSTNIGQTSITIPDLLYVIDTGLAKMKTYDSTIDASQLTLTWISQADAKQRAGRAGRVCHGNCYRLYDNDRMARMNLYTIPEIMRRTLDEICLLTKLAAPDKKIENFLALALDTPPKDAVMQSCSRLKLLGVLDERDEVTPLGHIVAELPLGVQIGKCLVYSIYLRCLDSMIIIAAYHSVRDPFVLNIERGKKSGQQISRVLFAGDGMSDSLAVIKLYEEFTNLKRKDIGDFCERNFICRNAMEMFVSAASTLRDTVYRIFRFSEASARLASSFNNDTNMIRLALTAGLYPKLAYMDRENKNQLVAEGDPLVQVSRSSCLRGKKKQKDLASEWILFVEKTRTADQISSLEHTTLVSGLMVALAGGKRFITEAHGSEMLLCLDSWIRLKCPAEFGLQLHKVRMLTDREFAKLVATRKLSLMSDFIGPETVRRLLEADVPSTCLAEGKSLLDRDNCDNDF

SEQ ID NO: 18736 - DNA, 3707 bp, DROSOPHILA
tctagaatatgtatttactatattattatgatattatattataaaatttcgaagtatcagtgttgggacaaaatactgtggtttcctatcaccaattgcaacgcactagaggaattgcggacaatcaagtagcgataaaagtgcacttcttggccaatgattttcgacttctgcgcttgagacttgattgatgtcgagagctgactttctaagggggggaatcctaattaaactatatcctcgaagtcgcggatatgcaattgactggcgagtctaatctaatcagctttgtctactccacagggccagccagcaatttgccctaatggttgcactttacttggccctcagccagttcattccactgccatatgcacaaccactcggattgagagccacattttgccattcattttgattacccagttcgttgggtcgttttcatggtgtgtttttattcgtttttttttttctttttttggggttcgcctctggaaattaaaataaattaacaaataaaagtctggcctgaagttcggcttggtggcctgccctcaacctgtttaccaattgaaggccataaataacgtcccattcttgccacctgatgctgacttcaattacgcgtaataaattacaaaggaatatgagacagcgatgctgctgacggcactgctttttccttcctgcacataattaagtggattttaatgagactcggaatgggagccagaaaacccaaagttggccaagttgtttggcctgtgattttgattgcccgcccaagttgacaacggtttttggcgaaagttacaaagcattgcaatgggaacaagttttagttagaaaatactaatttttcgttctgtgcttggttattaacaatttgtacggatatttttctgagcgcatttaaatttaattgaaaaatataaagctaccaaagttgataagatgaaagtttatgacataattaacccctcgtcttgaagaaatgcttggctttggaatcagtttattacggccacttcaggacattgtttcgcggcgctccttcttcttcgatttgctccgcttggctggctgcggcttctgctccttcacttccttcgcagacgtctcttcgagaatccgctggaagagcagcgcactggtttgcccgtccaattgacggctctcgccgagtcccgcaggactgttggagctgttggggctggtggcaaaactctcggccaagtaattccagccacgttgcgcggtggggacgctcagcttatcgagcagccggttggccagctggggaattatgggctgcaacacaatgccgctgagccgcaacgcgtccattgtcatggcgattatggtctccaaacgggcctggttgccatccggtgctcccgcctttagcgtccagggcttggagctctcgaagaagttgttggccgcatgcagagccgccatcgttgtgtcggccaccaagtggaagtgattgcactcataatgcgactcgcatcgctctgcaaaatgcgaaacattcaaggcaattgaaaataaatgtagcaaaaatctaaaaaccttaaatatttatacactacttttctaaaatatgaattaaatttaattcaatttatttaagtgaaacgaaaatgtataaacaggccagataaggctatataattctttgtggttttcccaacagattattctaatcaatcacttattaattgaatttcaaaaaggaaaataattttaaagctgataagaaattttaagtttaaccttaagaccaatttaatctaagtcctacgcactttgtaggtgattataatccaatttttgtttgagtgcagacagtacaatatatatacaatatacaaaatgatggcttcacttggcgcacttaaagccataagctcgctggcttggccacactctcgagtgcacttgccgcacggagattggccggaagtgcttcgggcagatgcggatgcggatgcaaacgcaaatgcagattataaaccatctctatctcgagaaagcgcctcttcagctcgagcctggctgcttaaatattaaaatgacaaagcagcactgcactgcactgtgctgcactccgttccattgcaatccactcacctgacagctgcagaagcgaatcctgcaggcgttttgccacatccaggctccggaggagatccgccaagtgctccgcgctgggtgatggatagatttggccgggattcagcgacttggcactggcacgcgatagcagattgcccagggtgtccgccagctccgagttgaggatgcgctgcgcctttacgtggctgtagtctgtaagcaaaccagagcagacaacttgtcagtttgcatcttcccggaaaacaaagaaagacgactatcagcccaaacaacgtgattacttgtaaaacagcaaacaatgaaagagtacaatcctctttcaaaaacccttattgtctaaatcattctttatcaaatcattaaaatataaggtatttcttgaccaacagctttatttgtatcgctgcatgacgttctcttcgtcaagtgccgacacagtaagaataaaaaatatcagaaaaatgtgagaaagcagacttaagagttgtattttcacattccacttaacttccgtttggcccagcattaactgcttacggattcgccaatatgcctggccgcccattaaggggattagcattacgaaaacttaaccagagtccatggagtcgagagttgctgtccttcgagcaaagccgtttaagataaaatccgaataccgtaacaacaacaagcggggcatggagttttcccctcattttcctttgccacacaaaatgcagctgctgcaggtggctttctgtggggagtaaagctgaacacgaaaggatttaagctgcgctaatagttgcaaaattcgtccggagggaaattgaactgaatgaggtagatagtctgtaggataaaggagtgattccagtaaaatacgtataatgatgtgttcgccgggggggaacttgagaaaattaagtacataaggactgcattcattcaatgcagtctagcggaatctataggagaaagcaaatcgggtgttacttgatttaaaaagcaaccattaagtaagaacacaggcaatggaaaatcatcaaagcaagtaaattcaacggcagctctttatttaaggattaaataaggtcctgctagttgaattaaaaacaacaaccaggcccaaatgaggcaagtgtatcatcgattgctaatggggcccaaactattgatgcaactgcaaatgcaactgcatacttttggtaattaaaaacaagcattgcctgctcaataatcggctaattgctgccggcaagtaattattgttggacgaatttcctactttttgatgatcggatttcgaaacgagtaccaagaacacaacaagaattattcccttgcaaatacatttcgatagtttggacattcaactttctacactggaatcttctccggtttcacctgtgctgtcaaatgaggtttcctcttgagctttctctctggggaaatacaactgccaaaaagtgttgcctgaaacattaatttgttgcacaaccaagagaaatacagcaaaaagtttgcaaccgccggaaaaaggcaaaagtctgcttgtcaaccgaattcaaatgaaagagtgt

SEQ ID NO: 18737 - DNA, 851 bp, DROSOPHILA
atgggcggccaggcatattggcgaatccactacagccacgtaaaggcgcagcgcatcctcaactcggagctggcggacaccctgggcaatctgctatcgcgtgccagtgccaagtcgctgaatcccggccaaatctatccatcacccagcgcggagcacttggcggatctcctccggagcctggatgtggcaaaacgcctgcaggattcgcttctgcagctgtcagccaggctcgagctgaagaggcgctttctcgagatagagatggtttataatctgcatttgcgtttgcatccgcatccgcatctgcccgaagcacttccggccaatctccagcgatgcgagtcgcattatgagtgcaatcacttccacttggtggccgacacaacgatggcggctctgcatgcggccaacaacttcttcgagagctccaagccctggacgctaaaggcgggagcaccggatggcaaccaggcccgtttggagaccataatcgccatgacaatggacgcgttgcggctcagcggcattgtgttgcagcccataattccccagctggccaaccggctgctcgataagctgagcgtccccaccgcgcaacgtggctggaattacttggccgagagttttgccaccagccccaacagctccaacagtcctgcgggactcggcgagagccgtcaattggacgggcaaaccagtgcgctgctcttccagcggattctcgaagagacgtctgcgaaggaagtgaaggagcagaagccgcagccagccaagcggagcaaatcgaagaagaaggagcgccgcgaaacaatgtcctgaagtggccgtaataaactgattccaaagcc

SEQ ID NO: 18738 - protein, 273 aa, DROSOPHILA
MGGQAYWRIHYSHVKAQRILNSELADTLGNLLSRASAKSLNPGQIYPSPSAEHLADLLRSLDVAKRLQDSLLQLSARLELKRRFLEIEMVYNLHLRLHPHPHLPEALPANLQRCESHYECNHFHLVADTTMAALHAANNFFESSKPWTLKAGAPDGNQARLETIIAMTMDALRLSGIVLQPIIPQLANRLLDKLSVPTAQRGWNYLAESFATSPNSSNSPAGLGESRQLDGQTSALLFQRILEETSAKEVKEQKPQPAKRSKSKKKERRETMS

SEQ ID NO: 18739 - DNA, 3824 bp, DROSOPHILA
ctccaacgcctcggtaacctggctgcctgtggccagcaactacaagttggtcaatgtgaagaaggagcgtggaatagcccttagccacctgaacgtctacaagcagctgcgggctctgcgtgatgagcctactttgaagcagggtgatgtctccgtaacagccattggtccaaatgtgctggccttcaagcggtaagctggaacaatcatagaacttacacaaagactggatattgaccggttttccttgtcaacagatctttggcgggctacaagtcgtacatcaccctcatcaacatcaacgatgatgtggaatcgatcaacttggactctgtcttcacctccataaccacgcaactgcaatatgtggtggtgaatgataagagtgtgcgtcgcaagaagtaagcactagacaccataaaatatctttaaacatacaacactaactattttatccttttagcgacctcacctttgccaactccgtgctgctgttgcccaaggaagcagttgtgctgagcacagtttaaactaatatattagatccttaataaagaataacacaaaaatattttgatcgcataacttctttaatagggttggattacttaactaactgtgcttatctatacgatggccccatgccaacttgtataagcactgattagaaacagacccactggaagttttgaataatagccatttaatttattggccatttaggcaataactaaattcgtacgattactatcgatcacgtttattcgcagattaatccatagcgataaccaagcgacagctcaggccaaatgcctatatcttaagtgggtgtctataaaatctagatgtggtaattggcattcaaagttcggtttaatatatttctgggaaaacatatgtcgaaacagggcctatctttattagggaccccagtggcattcgtactgattaacacgaactaaagaagtaattcttgatacaacaaaataagtacaagaagttaagccaaccagcgtagaacgactgcttcgtagggcatgagaatgattctctgtgacagatctgctttttgcctgtaaatcgttttaagttagttaaaagtatagaaatcaagaaagtagagaaaacctaccccgaatagtgtgtggagtaggcagtggccagcacatactcgtaggttttgggggcgagcccatcgaggatttccataccgttgcccatgttgaccaggattcgatactcctcgctgatcttgtttgtgctgtaggatatcaggatattaggatcagcaagaggattagaagaggatttgcttcacgtaccgaatgatctgtagaacctgttccgtcaccgcctcgtaggagaaacctccatcctctttgaacgcaagaaaggcggaactgctcttaagttcttgaagacccttaaagatgttcagggaagatctggaaacaccgcgttcagtctgcacattgtaccgttgatattcgggacttagaggcagccaggtggactccccatcagagaagtcggcattctttccagccgtccactgcatgggcgtgcgctccccatcgcgatcctcgcaagagtcgccggtgcactccacgtccacgttggacatgccaatttcctcgccgtagtaggttaccgaagcacctggcagggcgtttacaatcacatttagtagatccactttgtgagctcccatacgatcggccactcggttggtatcgtgattaccaacaacccaattggccgtctggtgctccttccacatggtattcatccagtagtcgatagatcccacaacatccttggcggtggagtatccactgagatacatcaactggaagttcatgggcagctgggtaccctgatgggtgctgtttccgaagtaagcacttagtgtctccacggaagaataggcctcggccaggagaacccgtgaatcgcctccattctgcgcccgatagttgtccaaaaactcacgccattcgtacatgagatccaccgtggccggctggtccttggtgtagatgtgatcatggtagtcgtaggcgttggggtcactgccccaaccgctaaccggttcatccggataggatccgtctgcattgcggtgctcgtagatgtgtggaactgcatcgatacgaaatccatcaactccgcggtccagccaaaacttcaagacatccagcatgtgctccctgaccattggattggtaaagtttagatccggctgcttcacctgaaactggtgcaggaagtactgctggcgcttctcgttccacgtccacatgggtccgctgaacacactgacccaattagatggaggatctcttgcaccagtttcctcattcagttttccatcgtcccacacgtagaagtcgtcgtagccatcttcgcgattcacggacttttcaaaccacacgttctcgtcactcgagtggttgggtacaaagtcgagaatgatcttaacgcccagcgacttggcctccactataaggtcatcgaaatcctcgagagtgccgaaaatcggatcgatgtcataaaagttagagatgtcgtagccgaaatccgacatgggcgaggtaaaaatgggcgacagccaggtggccgtgatgcctatttccttgaggtagcccaatctcgaagtaatgcctttcaggtccccgatgccatcgccatcgctgtcctggaaggagcgcggatatatctggtacagcgaggcgttctcccaccaatcgatatctgcagtaccctcctgggtggtggaaattagaaggagagctgctagcccgagatgtgcccactttggcatttcgatagcgtttgagtgggccaaactcaatttgctaataccaattgccatgtagcgattgagcagtcgataaggcacaattgcaccggccaactggtaatctatcagttttatcgcatatttgctagattaaataacagtggactggtctttcccgctctcgaatgctctcttttttgttgggcattccattagaccgcgaaatgtcgtaaaagtgcaataaagtacgtttgttaaagttataaattgatgactggcctgagaatcacaagctgcatcaatatcttttagtatttatattcgtagggtaacgggtttaattacaaatataatatagaatttatagaatataatatattttacaatttataaaaattactacaaacatatttcagtgtatttgagcaagacagataataaatgggcaataatgcgtgcacggccaaaatacttttgatataccatatgcttttttctcgacaacaaaaaatgtttagatttataatactaattaggtcaccatttaggctttacctttacaattccacctcaatatgctccagagttcacaaaagatgaaatcataaattgcatgtagaattcttgataccactctagccacaattcaaaggatgtttttgtatttttcatgataagctttttgaggtacgggtactatctaaaccatctgtggtttcatacaatcaatatagctaacaaatacatgtatattttgagttaccttttaaggtagtttactacactaacgcaacctgatgaaggatgcatttattgtaattgacagacaggcggacggacaatcttaagtggactttacaagttactgtactgtacaagttactgcgagtaaaatatgacatttttatagagttagataaacgcaggaaatattttcctcgaaaacgcttatcatatgaatgtcgacctacgctgatactgacaacagtttaggccgtattgcaacgatgattatgtattg

SEQ ID NO: 18740 - DNA, 1704 bp, DROSOPHILA
atgccaaagtgggcacatctcgggctagcagctctccttctaatttccaccacccaggagggtactgcagatatcgattggtgggagaacgcctcgctgtaccagatatatccgcgctccttccaggacagcgatggcgatggcatcggggacctgaaaggcattacttcgagattgggctacctcaaggaaataggcatcacggccacctggctgtcgcccatttttacctcgcccatgtcggatttcggctacgacatctctaacttttatgacatcgatccgattttcggcactctcgaggatttcgatgaccttatagtggaggccaagtcgctgggcgttaagatcattctcgactttgtacccaaccactcgagtgacgagaacgtgtggtttgaaaagtccgtgaatcgcgaagatggctacgacgacttctacgtgtgggacgatggaaaactgaatgaggaaactggtgcaagagatcctccatctaattgggtcagtgtgttcagcggacccatgtggacgtggaacgagaagcgccagcagtacttcctgcaccagtttcaggtgaagcagccggatctaaactttaccaatccaatggtcagggagcacatgctggatgtcttgaagttttggctggaccgcggagttgatggatttcgtatcgatgcagttccacacatctacgagcaccgcaatgcagacggatcctatccggatgaaccggttagcggttggggcagtgaccccaacgcctacgactaccatgatcacatctacaccaaggaccagccggccacggtggatctcatgtacgaatggcgtgagtttttggacaactatcgggcgcagaatggaggcgattcacgggttctcctggccgaggcctattcttccgtggagacactaagtgcttacttcggaaacagcacccatcagggtacccagctgcccatgaacttccagttgatgtatctcagtggatactccaccgccaaggatgttgtgggatctatcgactactggatgaataccatgtggaaggagcaccagacggccaattgggttgttggtaatcacgataccaaccgagtggccgatcgtatgggagctcacaaagtggatctactaaatgtgattgtaaacgccctgccaggtgcttcggtaacctactacggcgaggaaattggcatgtccaacgtggacgtggagtgcaccggcgactcttgcgaggatcgcgatggggagcgcacgcccatgcagtggacggctggaaagaatgccgacttctctgatggggagtccacctggctgcctctaagtcccgaatatcaacggtacaatgtgcagactgaacgcggtgtttccagatcttccctgaacatctttaagggtcttcaagaacttaagagcagttccgcctttcttgcgttcaaagaggatggaggtttctcctacgaggcggtgacggaacaggttctacagatcattcgcacaaacaagatcagcgaggagtatcgaatcctggtcaacatgggcaacggtatggaaatcctcgatgggctcgcccccaaaacctacgagtatgtgctggccactgcctactccacacactattcggggcaaaaagcagatctgtcacagagaatcattctcatgccctacgaagcagtcgttctacgctggttggcttaa

SEQ ID NO: 18741 - protein, 567 aa, DROSOPHILA
MPKWAHLGLAALLLISTTQEGTADIDWWENASLYQIYPRSFQDSDGDGIGDLKGITSRLGYLKEIGITATWLSPIFTSPMSDFGYDISNFYDIDPIFGTLEDFDDLIVEAKSLGVKIILDFVPNHSSDENVWFEKSVNREDGYDDFYVWDDGKLNEETGARDPPSNWVSVFSGPMWTWNEKRQQYFLHQFQVKQPDLNFTNPMVREHMLDVLKFWLDRGVDGFRIDAVPHIYEHRNADGSYPDEPVSGWGSDPNAYDYHDHIYTKDQPATVDLMYEWREFLDNYRAQNGGDSRVLLAEAYSSVETLSAYFGNSTHQGTQLPMNFQLMYLSGYSTAKDVVGSIDYWMNTMWKEHQTANWVVGNHDTNRVADRMGAHKVDLLNVIVNALPGASVTYYGEEIGMSNVDVECTGDSCEDRDGERTPMQWTAGKNADFSDGESTWLPLSPEYQRYNVQTERGVSRSSLNIFKGLQELKSSSAFLAFKEDGGFSYEAVTEQVLQIIRTNKISEEYRILVNMGNGMEILDGLAPKTYEYVLATAYSTHYSGQKADLSQRIILMPYEAVVLRWLA

SEQ ID NO: 18742 - DNA, 4074 bp, DROSOPHILA
ctctcgaaaagcctagatatataagatataagataagatataagatatataaccaaaattaacaagcttgtagaccgctttattatgcgaatagtgattgcgaacccccgaatctcggtcagagcacttgctcaggatatcagggaagaatgtcacctaactgtgtcacacgaaactgtgcgccaagtcatccgacgccataggtactcttcaagagttgcaaggaaaaagcctttgctatcagatgcccatatgaaaaagcgtcattcattcgctgtgaacatccggaagagtactgggatgacgtcatattttgtgacgaaactaaaattatgctcttttataacgatgggccaagcagagtatggcgcaaaccgttgagtgcgctagaaaaacaaaatatcattccaacgataaaatttggaaaaatgtcactgatgatatcagtgatgatgatattggatgatattgtatctccagccgtgaagtgggaaaacgatccttcattgaaagcacaataaatgccgtgcaatatctggaaattttaaaaacaaatttgaaggccagtgcagaaaaatatggtctagttagcaacaacaagccaaattttaagttttaccaggccatgatcagaaacataaagagtgtacgcacctagctcctttataactgtggtaaagtgatcgatacgccccctcacagtcctgatctgaaccctattgaaaatttgtggacctacttaaagaagaaggtggcaaaaagggccctgaaacacgacaacagcttatgactgcaatagtcaaataatgggaaaagatccagcatgacctggaaaaatctccaacttgtagccaaaaagacttgtgttatcgatgaacgacactttacagctgtttaagtgacccattgctacccaatatttgtgctgatcgagtgcgttcacagggattttcagagcattaatataatcgtcaccaaaggggaggggtcatttaagagatttcaatcataatgctttttaatggtttaatttatcacgaggggaataaactaagctgttgttgtggaacgcagcacaatggactcgtggggcatgagggtgacgctgccggcggacacctggtcgccgaccttcttgatggacttctcggtgaccagggcgtactggaacttggcgggcaggctgccaaacacactggataggttcacattctcgatggagtcgaagatgttgaagagagagatgtagacgaagtcgccgctcaggtggctgcaaagaatagccattggagaacgttggagaaaacgttgcttctgtacgaagagaagagagcatagttcgtgaactcaccgcttgacggccaggacgtagttgctaacagccttgacctcggcggatccttcttcaatgctgggctcctgacggagctgctgcagacgcttgaacacgttcaggtggctcagggacacgccgcgctcggttttcacgttcctctggcgataatccgtggataccggcagccaggtgctgttgccagtggtgaatccagccatcgtctcatccgaccagtgcatcggagtgcgggctgggtcgcgggagttatccatgtagtttgcctcgtagccgttgcaggcttgcggatccacggtgtcctcccaggacacatatccgtcgagcatgcccagctcctcgccctggtacgtgatgctgcagccgggcagagtgagaagcaggatgttgaagaggtcaactcgatcggctccgaatcgagagcccacacggttcttgtcatggttaccgatctattcacgggggttattattggttattagtcatgaaaacattaaattttagtggtcaactaattgctaatcgctaattaacttaccacccagttggcgctcttcccctctggcatcagattaagccagttgttaatcaagtactcgtaatgataggcatcggaatcgtagtgcagattacttatcagctggaaattgaacggtatctgggctccatcggcggtttcgttgccatagtaatgcattacgatttcaatgggggaccaggtctccaccatcaatatgctataaagcgacatgataactaatcccttgtttactttaaaaagtcgaagactcaccgctcatcaccgccattgtcagcctggaactgctcaagaatttggcgccattcgtatctgtttttaaagtaagcttaattgagttaattgagccgtatccgtaaccatccaaacttacaccaagtgcggggtctctggctgatccacagtgtagatcttgtgggtgtatccgtactcatctggatcgttggtccaatcgttgcggggctcatccggatagtttccgttctcgtcggcctcaatctcaaaggcgtggtagatggcatccacgcggaaaccatcgacgcccttttccagccagaatcgcagcacgttgttcatctcctcgcgcaccacgggattacggaagttgaagtccggttgcttcttgtggaattgatgaagatagtactcctggcgaccctcgtgccactcccatgcgctgccgcggaacacgctcacccagttggtaggcgggcgacgggttccgtcctcatcgaggaatcccgggtgccacatgtagtagtccttgtactcctcctcgccggcagccgaacgaaggaaccaatcgcactcatcactggaatgattgggcacgaagtcgagaataatcttgacacccagctccttggcgcgggagaccatattctcgaagtcctccatcgttccgaaaagagggtcgaccgccttgaaatcggaaatgtcatagccaaagtctgccatcggggatttcagaaaaggagacagccaggtggcggtcacgccgatctccttaaggtactccagcttctcggtcaccccgtttaagtctccgactccatttccgtcactgtctttgaaggagcgcgggtagatctggtagaaggaagcggtcttccaccagggcgccgcggcatcgacagccagaaggccaaggcccaaaagcaggaacaagctagtccaagtggtcattgctaactgtaagtggtatgattggaatcggtctcttatatacggcgctaatctacaggtcttatcgtttctaagtcttcagtgcgaaagccagtatggccacctggggaaaatatatgatgcgacctttgactccaaaatagaaatggaagatattttgtataagttaaattgagtgatttactaattgaatctgatagtgataatatctgaccataatatcgggacaataattcggttatctaggtctgtttttttgtgtgttttactttaaaaacatgactatctcgtaggactattatttgagcaattttcatttatttgatattgacgggtattccccaaggatttaattactgaacctaacatataatttatttgttcaagtaatgcaatttaaagtgtatgataagattttaatatgcttctaagactggtggcattctaactggcgacagtggtctaaagtcgacgaattttaatcaaaatgtctacccacattagctttattatgacctacactcatatagttccagttattgaatcattccatacaaatcagttatcacaaccttgaacccccattctctctcattatttttattttctgaaagagccaagtaggacaataaatttctcccccctgcgaaatccgaaaacccagtccaccgataagatatggctatgcagttggattcatttaccagccaatctgtctcatgatctctaggcgtgagctggctaaaacaaccatgaaattgactccaataaattccacagcctgcgtatcatgagaacccattcgtagtgtcgtgggatcgtaaatctgccagctccacggaggtaatcagaaatagttttctatatggtgggtttatcaccaccttatcaatgggagcggtatgcttaaataggggcaccttttaatccctctggccattggcaatcgatcgatttagtgggagccatgttcaagttgctggtgctctcgtgccttttg

SEQ ID NO: 18743 - DNA, 1790 bp, DROSOPHILA
atgaccacttggactagcttgttcctgcttttgggccttggccttctggctgtcgatgccgcggcgccctggtggaagaccgcttccttctaccagatctacccgcgctccttcaaagacagtgacggaaatggagtcggagacttaaacggggtgaccgagaagctggagtaccttaaggagatcggcgtgaccgccacctggctgtctccttttctgaaatccccgatggcagactttggctatgacatttccgatttcaaggcggtcgaccctcttttcggaacgatggaggacttcgagaatatggtctcccgcgccaaggagctgggtgtcaagattattctcgacttcgtgcccaatcattccagtgatgagtgcgattggttccttcgttcggctgccggcgaggaggagtacaaggactactacatgtggcacccgggattcctcgatgaggacggaacccgtcgcccgcctaccaactgggtgagcgtgttccgcggcagcgcatgggagtggcacgagggtcgccaggagtactatcttcatcaattccacaagaagcaaccggacttcaacttccgtaatcccgtggtgcgcgaggagatgaacaacgtgctgcgattctggctggaaaagggcgtcgatggtttccgcgtggatgccatctaccacgcctttgagattgaggccgacgagaacggaaactatccggatgagccccgcaacgattggaccaacgatccagatgagtacggatacacccacaagatctacactgtggatcagccagagaccccgcacttggtatacgaatggcgccaaattcttgagcagttccaggctgacaatggcggtgatgagcgcatattgatggtggagacctggtcccccattgaaatcgtaatgcattactatggcaacgaaaccgccgatggagcccagataccgttcaatttccagctgataagtaatctgcactacgattccgatgcctatcattacgagtacttgattaacaactggcttaatctgatgccagaggggaagagcgccaactgggtgatcggtaaccatgacaagaaccgtgtgggctctcgattcggagccgatcgagttgacctcttcaacatcctgcttctcactctgcccggctgcagcatcacgtaccagggcgaggagctgggcatgctcgacggatatgtgtcctgggaggacaccgtggatccgcaagcctgcaacggctacgaggcaaactacatggataactcccgcgacccagcccgcactccgatgcactggtcggatgagacgatggctggattcaccactggcaacagcacctggctgccggtatccacggattatcgccagaggaacgtgaaaaccgagcgcggcgtgtccctgagccacctgaacgtgttcaagcgtctgcagcagctccgtcaggagcccagcattgaagaaggatccgccgaggtcaaggctgttagcaactacgtcctggccgtcaagcgccacctgagcggcgacttcgtctacatctctctcttcaacatcttcgactccatcgagaatgtgaacctatccagtgtgtttggcagcctgcccgccaagttccagtacgccctggtcaccgagaagtccatcaagaaggtcggcgaccaggtgtccgccggcagcgtcaccctcatgccccacgagtccattgtgctgcgttccacaacaacagcttagtttattcccctcgtgataaattaaaccattaaaaagcattatgattgaaa

SEQ ID NO: 18744 - protein, 579 aa, DROSOPHILA
MTTWTSLFLLLGLGLLAVDAAAPWWKTASFYQIYPRSFKDSDGNGVGDLNGVTEKLEYLKEIGVTATWLSPFLKSPMADFGYDISDFKAVDPLFGTMEDFENMVSRAKELGVKIILDFVPNHSSDECDWFLRSAAGEEEYKDYYMWHPGFLDEDGTRRPPTNWVSVFRGSAWEWHEGRQEYYLHQFHKKQPDFNFRNPVVREEMNNVLRFWLEKGVDGFRVDAIYHAFEIEADENGNYPDEPRNDWTNDPDEYGYTHKIYTVDQPETPHLVYEWRQILEQFQADNGGDERILMVETWSPIEIVMHYYGNETADGAQIPFNFQLISNLHYDSDAYHYEYLINNWLNLMPEGKSANWVIGNHDKNRVGSRFGADRVDLFNILLLTLPGCSITYQGEELGMLDGYVSWEDTVDPQACNGYEANYMDNSRDPARTPMHWSDETMAGFTTGNSTWLPVSTDYRQRNVKTERGVSLSHLNVFKRLQQLRQEPSIEEGSAEVKAVSNYVLAVKRHLSGDFVYISLFNIFDSIENVNLSSVFGSLPAKFQYALVTEKSIKKVGDQVSAGSVTLMPHESIVLRSTTTA

SEQ ID NO: 18745 - DNA, 18559 bp, DROSOPHILA
aaaaagttcttgtcagaagtgggattcgaacccacgcctacagagtagactgcgacctgaacgcagcgccttagaccactcggccatcctgacttgatcgctgagtggactgcgcaccaaaaagttcacaagccatttgatctagtcaaaagcacagtaaaaagttctagggagctttgataagctgaccattgatcgataggaaaaactcgatttcaaaccagatattcgataaatttatcttcacgaatagttcccaattttaaactaatacgcaagttaccgctcaagtaaaactaaaaaatagtttcgtttattcatttatccagtatttcatacgatcaaaaatattataatgcattgatacttatgtgtaataattgtcttatatctttattactcgtaactcgtttcgttattataacaatgatctatttgatcagggcgacaaaatcggagatacgagttccacacgccgtccctcgtgatttttaaagaagtcgaaattgcatctttgtatcatttgaattttattgaaaagaaacgtaacgtttccacaaaaaattgctaaacgtttcctaaatatacatagtttaactaaaaatatgactacaatttattcaaaaagttcttgcacatctaaaacaaatgttattacattttagttttgagatataggcgttttgttggccttctagtgatttcagtgtttttattatattttggtactaagtctttcatttgttgcatattaattttgacttttctctttacgtgttttacataatatatttcataaaattcatttgatgtcctttttttaactaaattgagctaaaatatatattacaattgcctttgtaacctttatgcctttgtgtaattaaaagtaatttttggatggttccatttgtgtttagatgtattttactctgcgccaaaaagaagcatttgcaagggaaattcttaggttctttactttcaattgtggcttttaattcataatcaagtcgctttcattgctgctgtctacatttcattacttcaagaattccatacatttaacttagcatagagaagtacactaaatattagatttattttacacatatatgcttttatatgaatgtgtatatcgtatgtacataattaataggcaaccacttaagcttaatataaaaataagtatttttctgcaatataaatttgccacacaatgtactataaaccgaaaactgtacagtatacaatattccttctcatcatcggcattcagttatcattaccattatcattgtcaatcggttgaacagcattcctagcacatacacagcgcatttccaaaccaaactcagcttcagctacatatctgccaagcaagtctttgcgaactttattaaaatgagaaacgagtaattttcgatttctagcaaataagataaaacgaaacgaaaaaggcaaatgagaacattctgtctgtctttacatgcgcaatgtggctaatcggttcctgcatgtactgctcggcatttagatcttttaggacttaagctagtttggttttggatttcgtatgcatgcttatgctgtgtggggtgctactaaaaacaattagtacacactagcttcattgctgctgctttaatgtttgcgtgttgttgtcgttgctgcatctggtacctctggcttagtacattgactttcatgaggcgtacatgcggttaatatcatgctgatatctgtcctggatatccttgcgcttcagcttgaaggcggcggttaccagccccatgtccggagaccagacctccttacaaagtgtgatggcggcgggaacctcatatttttgcaatttacctttaagattaaacaatttgccattaaaaactttgaaaaatactcaaatctgcatcgtagcttacatttccgcgcatgctcagcaatttccttgagaatagccttctctatgatcggtgatgagcacagctcctcaaaggacttatcacccaggccatgtttctgtgccagctcctccaaatggttttggttgggaacgaccagcgccactgtgtactgctttgtcggatctccgtatacgcaaatgttctcgatgattccgcaagtcttaagctcagattcaactttgccaagggaaacatactcgccggcctgcagcttaaccagatccttcttacgatctgcaaaaagcgtattataataaaaaaaatgaaagaaaaagcactgtgctaaataacttaccaataatcttaagtacgccatcagcttgtatttcgccaatgtcgccggttttaaaccatctctgtccatcctcctcaaagaaatcctcgttggtcttgccgggcaacttgtagtatccctgggagacacactcgccaccaatgagaacctcaccctggggataaggtttatttgtgacgcggtagttgccttcttcccagttgactagacggatgtcgcagacagttaatggtcctccagtgcgtccataggtcatatcacggtcttgtattgggtataaagttatttacttgttttcaaaagaaaggtcgatctgcgatcacttacagtccatgacagtggctccagacgtagtttccgtaaggccatagccctgaatcagctccaagcacaagcaggtcttgatctgctcatgtgtatctgctgacagaggcgctccgccagacatgataatgcgcactttgccacccattagctttgccaccttcttgaacaccagtctgcaagaaaaataatagttttagttagcaactcatgatatttatgagcacaccgttcttacttatcaatcagcggcgtcttgtaccccctctgcacccacttgactttgtactggtaaaggaatttgaagagtgatttcttgaacgccgagccagagttaaccttgtcgttaatacccttggaaatgcgatccaatatcagcggcaccgaagtcatgcaggtgggcttcaggacggtggcatcgcccttgcacccgcgtttgatcttgctgctagtgtcgatcagagtcaagggggtcgagtagccaattggaacgccagtcatgagacacacactttccgcaaccaattcaaaaacgtgagccaggggcaggaatccgatcagtacatcatccggatagataggcaccatatcaacaaatcccttcattgtcgcaatgcagttcttgtgcgagaggaggacacccttaggtgtgccagtggatccggaagtgtacatgataatggcaatgtcatctcccttgggtggaacgtgctctgtgggatacaaaataaagtcaattagtactagtttaatatttaacaaattccttgcgcatagcacgctatacatatgctgtcaacatttcagtgctgaattaaaagcgcatactttcggtaaacagaaagaactctttccaaattgtgtagggtgattttttagttcagacaccattcgaaatggctgaagtcctagaggaattcatcaccctaacgcccttgacttgtgtgcaacaatgcaatgctttactaggctcaacatcaggaaagccgagaagctgctccgtattttttacactatttggcgtatactgcggcgttctcatctttcgggcgtatcgcacatattcctctaagcaagaaagagacgaggaaaagataaccgaaggagttacccttgaggctaaggaggaagatttgatcataggacctggttccagtcttgtgaacgaatatgtagaacaaacgaagccgattctgttgcaacccgtcggtttttccagtactgacatgaggtgagagttgtagattaaaacactggatgacccatcaacacattctgtctcgattagatggcgctattgcaaccacttgccggaagcagaattagcacaaggctctgatagtgaaaacagatcaaccgaaagagatgacattgataacctcgaaaggatgagcaatgttgtggatgataatgatgcgcagaagccggttgcatccacatcgatggcaacggctcgggcgcctgaggataacgccgatggtgaacacgtcgagcccacaccattttcggtgtgaaacacgatgcattttagcaaatttatcgtgtaattgacataaataaatcatcttttaagaccctttcaaaacgtaccaaatttactgtcctgtcctgtcttgacaacttggttaaacggcaagatcttgacgccctccttgaagccagtggtttctgtcttttgcagctgatcctcaatatagataatagtcttcaccaatgggcatttgtcgagcagcgtcttaaacttgggcagcagatcatgggaggtgataaccgtggtgacttccgtttcggtgatgcctggcaacagagcaaaatattatttaaaaaccatacacatggtaagccaatttactcacaatgagcaactccatcatcgcccagcgtagcatagacagtgacaatgggcatagcctgcttaaagcatccgtgggcagctatcatccattcggctcgcgtttcggcaaagatgacaatgttctcgcgtggtttctggccaagttctcgcagaccgcgcccgaaattagccgccgtgcgctccgcctcggtgaacgtcttccacttgtagtcaccgaggttgtacttcttgaagactcgaccgttctgctgcacctcatcctcctcgctgaggatctgccgggtgcccagacaacgcttcgacgtgtaagttttggccacatagttgaataccttctccagggtatcgatattctcttgcagcatcttcacgtggacatcccgtggtggatccgtggtccggtaggtcagctcattgtcatcattccgcacgatctttgcctggaaaatgagcgaattcgtggcgattagtttaacgtcgtgttagaggttgcgatttaaaaagaaacgctagattaggggagggaccacaaagtagaatcgacagagagataacggacatgtgagttttcgagggtttgttgaggtgagggccgtaactcgggagatcatgtttcttggaccaacaccaaaaagagtctccaaaaaggggattcaactctgggtacgatcaccaaccagtacctggaacattcattgtgcgtgtgtggtgtttgtgtgttgtatgggggtgccccaatgtatgtgtgtgtgtgtgtgtgtgtgtgttcgtgtaatgtgtgtatgttccataacagatagtattactaaataataaaaaaacacatttgcaaaagttaaacctcaatgtcatccggcgcgtacttggactcatcgaccaacattttctggttaatgggcttggcctgtagaggaaggaggagttgagatatgcgatgagaagctagttagctgtggtattgcatagagttactgattcccgattaaggcattcaactcgttttacttattttttctaaagattatgcaaactgcacacaaatgaaagcgatcttagattccggcgttggcgtacccttactaacccataaaccttatcagccgactgaaaaggccaaccaaaatgcgttccatttagatagtgaaaagtcagataaaagtgtacctcaggtgggacttttcctaaacgagttatagctggaaatatttatgttttagtttgtttcctttatttaagtgccaattttatttttttagcattgctagaatttgaaactatttgagtttcgagaagagactgtgagcaacgcaatgatccaattcagcgacgaagtcgaacaattcctccatgcatgtctcagtggttttggacttgccattcacacgatcattgcactcttgatacttgttgtacagggacgcaatgtgacctttggcctggcacttctccctaagggctgcttgcggatcaactaactccttttcgtcatcatcggccttgaggacaggcaccaaaacccggctattaaacgccattccttaggctttcagttaacaagactaatttattttgcaggaaatgtgataagctaacactcacttcgaaatatgttttttatttctgggctgagagctagggtgtctcacttgcacagctcactatgtgtgaatattatttccatttgaaaagaaggtagagatattctatgatttcttaacttcatggttctgttatcaggaccaactgcgatttcattatggcctgacaacctgtgcacttgtcaaatacagccatggctggaagtcctgacattcgcggagttataaagcaaaatgaaagaaagttaatcggatatgataattaccgcataaaaagcgaagccctgataaaggcgaatagattgtggaaatggtggacctggtcaataaatcaaaagtagtcatatctacatagattagacaatgaaatgaacataaggaaaccacctggcgagaacaaggctcgaagtaagggaaataaatgcggaaaagaacttaatgaaactgataaccgagggtgcacttttttaataaaaactaaaacaactcgattgtagcaggcctctgtactttggaacgtgcagtgcaaagtcgaaagtatttcaactacacgattctagagatagttacacccctcgtcgcaccgattggccggctaagtctgtggctttttccattcgtttcaactagccagattagtggcaagtcctgtcaaagcactcaccttcacgcgacgcgagtcctgacggcgtttccagggcttctgcagcaccaagtaaaccggaagggtgatgatgtcgtagacaaaggcgatcgccttgatcgcgccaatagcgctctgcacccagaagctgtccattctgaaagggcaatagaaatgtcaaattagtggccaattggtatgcaaatttcagcggggtatttcaactattgctttccccgcctcgtcaagtattcgcccggttgactcctgcaaccattctcccattgcacccacccactcgttgtagcgccgtcgcaagccgaaaaccaactgatatcaccacctgctgctgctgccactgttagttagcaggtcttaaaagtccgacggcggaaaaggggtagacactctcacgctcactttggttctcggtgctcagaaaacgcttttcaaacggccgataaccggtgaagagctctgaaggtgttcggctttttatcagctacagattgcttagcactaactaacgcgccgaagcccggaccgctagtaatcatcactctttcgcggcacagaattctgccattgtaataaaccgaaacttaagtgtgtgtgtctggcactcgtctggacccttttatacgtccggcatcttatctgccatctaaaaccaatctagttggcttgccaagtacttcataaaacgtgtcaaaaatcaagggtatttgcaatatatcattgattttgaagcaatctttatggcccaaatactttataaaatgatgacccaattttggggaaatacttcctaatttttccaacggctaaattcggctctattcttaaaactcttatctttagtttatttgtgtacttatcgacaaccgaaaataacgaaaagatttgtcgggaactcttactttctttgcaattccattaggaccgccgtcattttaaacgttcttgtcacgttatttataattaaaattggacaaaaacctcatgccaaatatttttaaattttgatttataattataaatctgaacgactgccaccagaacactagataaacttattatcgcaatgcctaattaattaaaacactgtaaagcattttactaagaatttcggacgctgattactgattatcgctcgatggcagactaaatggaaaaccagttactagtagcataccaagaccatactaagatagaagctagtttaataggaaacgagtcatgctgagattcgcacttaacaaatatctatatataattatataattgaatattatatgccggtcgtggcatacatacatacatatgtgtcactttttataattcctagttgaaaactgcacacttgataaagacatcgtgtgtgagtgctggcctgataagcaaatcgaacgaatgccttgaacttggcttgcgcaaaatggcatgacgtcaatttcccgggccaatgagcttaaaaggttgcgcgctatgtcaaaagaaatttaataaaccgcaaatagaatgtttaaagttaagaggtgaaaagtccatgtgctaagtgtcaactcattaaaaaaaaatacccctacatttgagactcagcgttcttaatggaatgcaatacattaattatatttcccaactccaaaaaatccacaaccacaagcttacactgagtgatgtacttatgaaataaaaatacacagaaaacgggctcaaaactaaacaggtcttatataataaatgtgtttacttactgcgcatcgtcttcgatgaacatcttgctgccttttctctacttgtccgatctatgaattaaatgagtgttttttgatcggtagtgaaaatggtgggtgtgaggcgtatcctccaaaagagcccagctctgattaatggcaagaacaaacgaacaatggacgcaacaataatacaataggatgatgtcagttgttcctctccagatgttcagtttgtagtttcacctgcaaccgataaaagaacaaatatatgcatttatgtagtgctaatgaggtaggacgacaaatggggagcgacagcagacgaggaagtcatggaaatcagcattgctgcatttaaccgataccagagcgtgtgatgacataataacaaagcacctttgagcacacagaaaataacataattctataggctgctatctagcttaggctatattatcttagtacagatagtaatttcccaattgcattcttaaaatagattatcataatcaaaccgcgcgtaaatatatttttttccaattagccaactgtgcggccttcgtaaatattataatcaaatcagaacctgaagtccaaacaagttgttgttacgctttcggtatttctggatacttgccagaatatcgaaacgctgataataagaacataaaaagcgattaaagatattatcaacagagaatggggtgtatacctatagggaaaatgtaaaattaggctgccaagagagcgattgcgtaatcggattctcaaccccctcaaaatcactctctctttcatttcgcccattagctaggcggagaaacattggcataggtcggggacatcaatagaaactaaacaaattctttggcattcatttacacaacttacaaagcgctgtttttgctattcgtttataaaaaaaagtgttgaaggcaagggccaaagtccgacgcaccaaggtttatccgctctgaaagccgataccaattggttcccttagaatctgcccgccctgataagcaacgaagagcattccactccaaggcgccaaagttcgcctcttatgcaaccgctcaaaactcgcacatcacataacatgcgagcgatacaaaagaaaagggtatacgaagtcgaaactccgtttcagtttgctccggcggagtgcattgaactggccccaaattacagatcttccctcgaaacccttgacacatggttaaaacgccgagcagaagagtcgaaaccgtaagcgttgtgaatacgtgttttgtttgcgaagaaagataaaatgaaaacaagatgaaggctgcgaaaacaacaacacatttcggtatttaaacaaagtatatgcgaaagaaaaagctttgcaaaacaatcagcactgtgggtcaggaaagtggtttagagtgtgtaaatttgcttcatttcagtacactttccttatggacattcttcaaaagtcctttcaagctgataaataataaataaaccttatttttctttctagttaatgtctagttaaatctagttaaagttcaagcacaatgaaaatctagacaccataaacagctgtattttttcaagtgaaactcgaacagagctcacaattttattcttttgcaaaccactgtgcgaagttcaaaacgtttaaacgacgcgtacatgggcgaaagttgtaaaattgcctttgtaggttaatgaatgaaaaataaatgagaatatcaaatccatgggtcagttgcagccattctgagcctgatcccgggggcaaagttggagctctaagtacacaaaaagagacctatgtgtgaaatgatattgcagagaatggcgtgttggatgcaaaggttatgccgagtgttctgtctaactaagccaatcatggtccgcttaaaaacaataaggaaattgtgcacattaagcctgtgattactgtaatccgaactttggaccgcccctctggtcggcgatgtgcgatgtcgcacatgtgaaaaaattatggtggatgtgcctaaataagcactgctctgagaattgattgaatcagaacagacccgattcgtaaaccttgtgggttagataacacacccggcgtattcgtaatgtcttacaacgagcactttaaccggtacagaaggtcgaccagccatcagacgagttttcgaaagcaaaaaaacactgagattgaaactaaatttaaaataacacttccaaatttaagcattgttaaaatgcttttataacgacagtattgccaggaagttgttatactgttgttgttatactataaaatcggccacatcagaataaacacacagtaatatagaatgctacggttcgataggggtaatttatcgattagcctcacggttaagataaaataaacgttcgaaaaacaagattttaagatagacttttcacacaaacagattaaccgataacccaatgcacttgaacattttcggagatcgcgtggttaccaagttaccaattccagttattcaacggccaaaatgcagtcttcattcagcacatcgcagactacgaactgtttttaatttcagagtgaaactcacttaattgcctctattaagacaaaggcacaaaccttgtattaattgctgctgaacggcaggtacttgtaactgttgctgtttccgttttcgtattgattgctattattatttgctctcattgcacgacacactgcaagcggctgaaatgcattgggcaaacgaacacgtcgtgcttgatttaatcagaaaatacacctggaatcgcgacgaaagcagggagtacaaagtagagcatacctcgaacgtttacagactgttatttgtattttgctgacgcgaatgcaactgcaacttcacaaatccgaaaccccaaacgcagtgagctgtcaaagtccaagatccatgttttttttagcaccaagcgcagacattacgaaattgccaaacaatgccaaaattcgagtgcagagcgttctccactaattgtacggaatacttgccacaaagagcaagccttaactactcacaaagaacacgtcaccagaaatgcctcagacaaaaaacgtgtccacttacgtggacttcatttgcgtgtttcgtacgaaattcggcatactccaccccacctttgccgtgcaagttgcgcagcagaaaactcgaagagtgactcaaccctttgcctttgctgtttgggtaacactttcccagctccaattgtaaaccacctgcgtagctgcgactgcccgtcgatcagctgcgttattgtttacaattggaagtccaccttccagcgcttgcataaatgccacttgaactttggtcaaggtgtcgtcggcgtcgcttatgggaaatagcaacgggaactaccgactgccttgacattgaaacggggcaggcggcggcggagtgaagtgaagtaaagtgagtgtgtgagaacgcgccattatgcagcccgtcgcgaatgcgcacactgcaaaatgtgaattaaattgcaacatttgattcacttatttccaccctgacgccgttacgtgactgtctgccggtaccgtcgactgctgcgctcccccgagcggcggttctctggcgaataatggggtaacgaaatcatcgtatgactgtgtcaaagtccgaaataaaaatacttttggcagtcgcagtgcacacataaaaacgagaagaattgctcaaacgagattgaaataaagaaaacaacagatgtacacagagcaaaatttcacttgttcgccagtggattattttagagatttgtttgctttaaaaaatatatgtatacgtattaacattatatggatattgtaaaagcaaaagctctcatttaaattttctgattattatctaattcggagaaaaacgtatttatgttcgaatgtaactagaaattccagctttggttggagcggttctaattagacttttacaattttttctgtttacttcatgtataccaattctacaggagttatgtgaaaaatattaatattccattcaaaaagataagattattcgtttttgaactggaaacgtacaagccatgtggcaactactcgaaaatgtttccggtgtgacctcaacagcatcagtaagtgagaagaacttttgcacggggcgttgaatatttcactgaatgaaaacgagccagccaagagagtagcaaacacggcaaacaaacaagcaaacgagtgaccgaccgcgtgtgtgcgtgtgtgggtgtgttttggaggcgaactgaaaataaatttgattaccgccggcggagaaagagagaaagggagaaaggagagcgctacacccacacgggcgctgagaagaaagatcaactcgctctcttttgcactcgctcagctcgcatgaatactcgagatattcacgtatgcatgtatgtacatatgtatgtaaatgggagtgtgtgaaagtaaggcagttgcgtagcgctaaaataaatgacctagacaagcgagtacttatctttagagtgaccatcaccgccgagcacgtgctcgagtgaaattttccagggaaatacagactttggcaatgatcgcaagagttgggggcagtggcaaagccaaacggccggtttaatcgaagcggtactgcgtgaaaaccggttagaaaatccaccaaagtcatgactaaaacaaacacaaataatgctcatacgatccaggggcttagatcgaggggacctcaaaccgaccatcgtgacggtgagtcggataaaacttccagtggtcagtgctcctcttcgcaagccactgtccctgaaactgaaatacaaacaacttgttttctaaaccagacgcttgccaaacatagaacatagaaaccgcaacgaggtagaaaatttggttggtatgccgactggaaattgaaccgggaaccaaaatcaacgttttgaagaaatgaagcactcgggaaaagttatagtttatattattaatgccttcataggcgttttatttatttattttatttattctttattattgaattctttgtaaattgtaaataaatggatttcatttacattttgatttttcacctttatacattaaaattccagtctgaatttgtaaaaagaacaaagttctatatttttaaagcgcaatctgcagctgttgcacctagctgatcaaaaaataacggttaagttagtttgttgaaaggtcggaaaaactgtcaatcgggggttgggctgggcaacaggccgattacagattgtcgttacaacccgaattggaatccgaattccaagggcgggcaggcgatgggcggagtgtgggtcagacatcagtcccccagacatcgcgtgactatttttgactttgcgcccggagagacaacgagcgcagggaaaatgaaaatcagccactgcagctgcacagtacacaattttcgattattacaaatttcagatttcaagttccatccatttaatcataaaccctttatacaatagttaattttatattttctaatatataccagaattcaaaattaggaattatttttttatgccgacttactatttcgtcatattacttcaaaatctttttagttgtattttcagctcctatatgccacattttaaatgtattcgaatcgagtattacgacttcgtcagcaaacttgcatgataaaagttgtagtttcagtaacattttataaatcactttgttcagtgtggcattgggaaaagtcacgaggcgctggacaacagggacggcgacgaggggtgagtgctatggggtggttgggtggcacgtttttcctttgatataccagctgaaaatcgtatgagtttcaggggaaattgtgccgccgtgaagcttaaaacaaagtacaagaatcatgcggcgaaaagagcgagattgagagagccggttgcatgtaagcgagtgtatgtgtgagtgtactgtactgcactgcactgtgggtacgcggcgaagagcgggagagagagagagagagagagagagagagagagtggtggagagagtcaggggcaaagtgtaaaaggtcaaagagcaaattgtttacatggagcaaccgcaagtgagagacgggtggaaaactgggcggcatgaccatgaatgaaagccgcgaccggcaaacgtggcccgcccacaaagcgagcattttcacattttaactgtctggacattttgtaagttacaccaaggcaatgataccagtaaaaaagaagaaacaatcatttttgaatagattaatcacctgattaatgttggttgtatgttgattgtaggtgttttaatatacaatgtctctattactgctttcctttattcaaaagccatgtgtaagtgtaagttctcgatttcggctagattttgaagttctgccattatcaattaaaagtccagttcctctataaattggtaataaaatagctctttacagccaagtatatgtgcaattttgtaagattaaaggtcaaaatgttgtgaacttttcttgcacttgagtttaaagaaccattagatttgttccatttgacattaaatgttctatgtacattaatatgactttttgtggatggttttataaacaagcattactatattctaaaaatcaaggataaaggacgagctttacaggaggtaacattcctattgtacggctttatttttcttatacccataagagcataccactaggatccgactttcgggtgtaagcacatcaagaagcttatcgcaaatctatatgtgaacttataaatcactcctagccgagctcgatgtatggctaagtttgcccgctcctacagaataactacgggcaccggcaatgtgagcgatattacgattattaagtgcttccacctcggatgtctgagtcgcgtttccgccacaaaagtggaaaccgcgccctagaaacaaaagcgtggcacgaaaagtgcaaccaacccagccagtcaaccacccactccacccaccacccaccgctcagctggtcgcgaggtattgaaaacagatgacacacgtcacacacacgcctacacacacacgggtgcctcagataaaactcgcatgattttcagttggtataacaagccgagacaaagagagcgcatctctctcctaagagcgagtctgcgcggagcgcgttacaagaaacttacacgtgcaagccaggtaggggaagagcagcgagagagcgaaaagagagatttgtttatgtgcgtaggtctccattggaatgggacccttctctccgcatctaattacaatttaaactgccttggctaggaatgcaattaacaggtttaaaataacggtaaggctacagtaaaccgtctaaaagcgagatgctaagctaagacagggtaatagaatttatgttttgttttttaactaagtgagatttaaactcttcaattgcttggccactttaagtgtacgctctctttctaaaggtcgtaataaaaagttatacgctttaatatcacacatcaaaacaattgttatcattgaaattacatagtatgcgaaacacacatatattgaaaagtgataccatggttgttaatataactgttggttcatcgttttgtgtttgtttcttttatttgcgacagtccgcgctcgataagaagaatttacactaatacatcgcatgtactgcctcatttgagatggttttcgtggaggctggagtctaatccgaacttatttatgatttggaatttaattagagtgagactccaagtgaattttgaaagccactctattaaatcccattcgtagagtggagctactttgggaagcccgactgtactcaagtggcgaaagccaaacaaatcaataaacaaacagcaaacaaaatacgcctgggtgccaatggcaaccaattgcataaggaaagtgcagttgcgcttgcaccaacactgtggctttcgaattgggtcaagagagaggaggactgttgattcctggccacgaaaccagatttattgggtaaatagacaaggtggcgtgacatcctagtgggaaaaggaagccggcgaacgagattgactccggacttacctttcttatagaggctagttcgcagctctgagcagcagttgtgtgagtttttggtggcgcacacatgcaacgattgttagaataaaatacagaaatcaggcaatggaacgcaacagatcgcatatcgaaataaaacaccgattatataaaatgacgttttgccaataagaacgcacggacacacacacatacaaaggcgcgcggacgcacacgtaataccagcataaaagaaaatgttgcgttggcttcaacacgtttttcctcctctcggctatttctgtttgttctcggaactctcggatttttattttagatagtcaacgttgcgctttaattgataaaactttcgcaaaactttcacaaaactgcacaattgcacactagcgcacaagagcactcacacagacgcaggctgggaagcgtcgtacgtgtgtgagtgtcggtgtgtttatcacgccactcgaaaaacacttttctacttacacacaatacgatagtgagttgtatttcataaactgcgtttcaatgttgtttttagtaactttttgcttaagttagtttggcgcccgcagaagtgacggaatggcgcacaacgttctcaaatcacgttaagtttgtttctgaactttttcgccgtttcgcttttgccacgatattattttctttctccttcgccgcggctctctctttgactctctctgcctctatagctcacacacacacttgcgacttgctcgaatgccgatgatggctctccccttcctgcgtgtgggtgtgttgttctggcgtttgcaatcaaccttcctgctgacaattgattttttcccattgcagcaaatgccttttcactcaatgcgtgccacccacgtttgctaaaatacttgaactgcctctattccacggcttgtgcagaaatctactcacgcatcgaaaacaatttaaaaattgcaaccagtgttaccagatggtgaaggagctttaaccccgtttgttctcgataagccacatctggtactaaaaaatcccgccttaccggtaaatttaaatagtggttcatctttaaatgttaataatctggaaatatcaatgttaagaacagtaggagtggatgatcatttccagtgcacagtaagtgaaaatttagcaattcgtcataattttgttaatacataaagtaacgatttttaaattgtaatggttctgtcaagaatcagaatagtgcaaatgaaatagtgaaataacataataaaacatacaaatctgatcaattgactaaatcacctttagctatatatagaaaactgaatttgacattcaaggttttgacataactttttgcaccgtgtagaacagcttacccgagacttaagccaaggagttgatcatagctaagtacaagtattttcgtgtataaaagtttatcaataacgtataaaaatttaaacttttgtagtcttctttttttttaggatttttacaatttattaaaaaaatggaatctttttattgatacagcgaaaacttccgtttcttttgttctctgctcactgttaaaaaaaagtcatgaatttcgcttttaaaaaactgtataatatatatttttattaaaaaaaagacagtcagtcttcgtgcaacaaatgtacatggataaatgccgcgtttacaatcgttcctcgcttcgttttccatttttatgcttatactcttgttttattttggttgtaagtacggttaggggaggagggatatctctcttgtagttgattaagtaatagttattttttctcgtttctctcgtttccgtttaagcgatactattttggttcaagtccttgtgttttatgtacatatttaaactaaattacgagctacaattactagtttgtgtgtttcctttttgtgtgggtgaatctcgcattgaattatatgtaagtacattgtgtgtgttttgcgtgtgttacaataaatatctctaagtttaagtattccttaggtgctagcatactacatacatacaaagctgctacgcagaggggcggtggggcg

SEQ ID NO: 18746 - DNA, 3768 bp, DROSOPHILA
tttaaatttaccggtaaggcgggattttttagtaccagatgtggcttatcgagaacaaacggggttaaagctccttcaccatctggtaacactggttgcaatttttaaattgttttcgatgcgtgagtagatttctgcacaagccgtggaatagaggcagttcaagtattttagcaaacgtgggtggcacgcattgagtgaaaaggcatttgctgcaatgggaaaaaatcaattgtcagcaggaaggttgattgcaaacgccagaacaacacacccacacgcaggaaggggagagccatcatcggcattcgagcaagtcgcaagtgtgtgtgtgagctatagaggcagagagagtcaaagagagagccgcggcgaaggagaaagaaaataatatcgtggcaaaagcgaaacggcgaaaaagttcagaaacaaacttaacgtgatttgagaacgttgtgcgccattccgtcacttctgcgggcgccaaactaacttaagcaaaaagttactaaaaacaacattgaaacgcagtttatgaaatacaactcactatcgtattgtgtgtgaaactacaaactgaacatctggagaggaacaactgacatcatcctattgtattattgttgcgtccattgttcgtttgttcttgccattaatcagagctgggctcttttggaggatacgcctcacacccaccattttcactaccgatcaaaaaacactcatttaattcatagatcggacaagtagagaaaaggcagcaagatgttcatcgaagacgatgcgcaaatggacagcttctgggtgcagagcgctattggcgcgatcaaggcgatcgcctttgtctacgacatcatcacccttccggtttacttggtgctgcagaagccctggaaacgccgtcaggactcgcgtcgcgtgaaggcaaagatcgtgcggaatgatgacaatgagctgacctaccggaccacggatccaccacgggatgtccacgtgaagatgctgcaagagaatatcgataccctggagaaggtattcaactatgtggccaaaacttacacgtcgaagcgttgtctgggcacccggcagatcctcagcgaggaggatgaggtgcagcagaacggtcgagtcttcaagaagtacaacctcggtgactacaagtggaagacgttcaccgaggcggagcgcacggcggctaatttcgggcgcggtctgcgagaacttggccagaaaccacgcgagaacattgtcatctttgccgaaacgcgagccgaatggatgatagctgcccacggatgctttaagcaggctatgcccattgtcactgtctatgctacgctgggcgatgatggagttgctcattgcatcaccgaaacggaagtcaccacggttatcacctcccatgatctgctgcccaagtttaagacgctgctcgacaaatgcccattggtgaagactattatctatattgaggatcagctgcaaaagacagaaaccactggcttcaaggagggcgtcaagatcttgccgtttaaccaagttgtcaagacaggacaggacagtaaatttgcctcaagggtaactccttcggttatcttttcctcgtctctttcttgcttagaggaatatgtgcgatacgcccgaaagatgagaacgccgcagtatacgccaaatagtgtaaaaaatacggagcagcttctcggctttcctgatgttgagcctaagcacgttccacccaagggagatgacattgccattatcatgtacacttccggatccactggcacacctaagggtgtcctcctctcgcacaagaactgcattgcgacaatgaagggatttgttgatatggtgcctatctatccggatgatgtactgatcggattcctgcccctggctcacgtttttgaattggttgcggaaagtgtgtgtctcatgactggcgttccaattggctactcgacccccttgactctgatcgacactagcagcaagatcaaacgcgggtgcaagggcgatgccaccgtcctgaagcccacctgcatgacttcggtgccgctgatattggatcgcatttccaagggtattaacgacaaggttaactctggctcggcgttcaagaaatcactcttcaaattcctttaccagtacaaagtcaagtgggtgcagagggggtacaagacgccgctgattgataaactggtgttcaagaaggtggcaaagctaatgggtggcaaagtgcgcattatcatgtctggcggagcgcctctgtcagcagatacacatgagcagatcaagacctgcttgtgcttggagctgattcagggctatggccttacggaaactacgtctggagccactgtcatggactaccgtgatatgacctatggacgcactggaggaccattaactgtctgcgacatccgtctagtcaactgggaagaaggcaactaccgcgtcacaaataaaccttatccccagggtgaggttctcattggtggcgagtgtgtctcccagggatactacaagttgcccggcaagaccaacgaggatttctttgaggaggatggacagagatggtttaaaaccggcgacattggcgaaatacaagctgatggcgtacttaagattattgatcgtaagaaggatctggttaagctgcaggccggcgagtatgtttcccttggcaaagttgaatctgagcttaagacttgcggaatcatcgagaacatttgcgtatacggagatccgacaaagcagtacacagtggcgctggtcgttcccaaccaaaaccatttggaggagctggcacagaaacatggcctgggtgataagtcctttgaggagctgtgctcatcaccgatcatagagaaggctattctcaaggaaattgctgagcatgcgcggaaatgtaaattgcaaaaatatgaggttcccgccgccatcacactttgtaaggaggtctggtctccggacatggggctggtaaccgccgccttcaagctgaagcgcaaggatatccaggacagatatcagcatgatattaaccgcatgtacgcctcatgaaagtcaatgtactaagccagaggtaccagatgcagcaacgacaacaacacgcaaacattaaagcagcagcaatgaagctagtgtgtactaattgtttttagtagcaccccacacagcataagcatgcatacgaaatccaaaaccaaactagcttaagtcctaaaagatctaaatgccgagcagtacatgcaggaaccgattagccacattgcgcatgtaaagacagacagaatgttctcatttgcctttttcgtttcgttttatcttatttgctagaaatcgaaaattactcgtttctcattttaataaagttcgcaaagacttgcttggcagatatgtagctgaagctgagtttggtttggaaatgcgctgtgtatgtgctaggaatgctgttcaaccgattgacaatgataatggtaatgataactgaatgccgatgatgagaaggaatattgtatactgtacagttttcggtttatagtacattgtgtggcaaatttatattgcagaaaaatacttatttttatattaagcttaagtggttgcctattaattatgtacatacgatatacacattcatataaaagcatatatgtgtaaaataaatctaatatttagtgtacttctctatgctaagttaaatgtatggaattcttgaagtaatgaaatgtagacagcagcaatgaaagcgacttgattatg

SEQ ID NO: 18747 - protein, 766 aa, DROSOPHILA
MFIEDDAQMDSFWVQSAIGAIKAIAFVYDIITLPVYLVLQKPWKRRQDSRRVKAKIVRNDDNELTYRTTDPPRDVHVKMLQENIDTLEKVFNYVAKTYTSKRCLGTRQILSEEDEVQQNGRVFKKYNLGDYKWKTFTEAERTAANFGRGLRELGQKPRENIVIFAETRAEWMIAAHGCFKQAMPIVTVYATLGDDGVAHCITETEVTTVITSHDLLPKFKTLLDKCPLVKTIIYIEDQLQKTETTGFKEGVKILPFNQVVKTGQDSKFASRVTPSVIFSSSLSCLEEYVRYARKMRTPQYTPNSVKNTEQLLGFPDVEPKHVPPKGDDIAIIMYTSGSTGTPKGVLLSHKNCIATMKGFVDMVPIYPDDVLIGFLPLAHVFELVAESVCLMTGVPIGYSTPLTLIDTSSKIKRGCKGDATVLKPTCMTSVPLILDRISKGINDKVNSGSAFKKSLFKFLYQYKVKWVQRGYKTPLIDKLVFKKVAKLMGGKVRIIMSGGAPLSADTHEQIKTCLCLELIQGYGLTETTSGATVMDYRDMTYGRTGGPLTVCDIRLVNWEEGNYRVTNKPYPQGEVLIGGECVSQGYYKLPGKTNEDFFEEDGQRWFKTGDIGEIQADGVLKIIDRKKDLVKLQAGEYVSLGKVESELKTCGIIENICVYGDPTKQYTVALVVPNQNHLEELAQKHGLGDKSFEELCSSPIIEKAILKEIAEHARKCKLQKYEVPAAITLCKEVWSPDMGLVTAAFKLKRKDIQDRYQHDINRMYAS

SEQ ID NO: 18748 - DNA, 3907 bp, DROSOPHILA
actttttcgttttcaaatgtcaggagaatatctttccagtacttggtattttgtacaaaatgtagtttgcgctggccttttatctgcattttcttgtggtctttattattcctgctatcccaacggatttcttgtttgccttgcctaatttgcttattagccggaaaatgtggtagcttgcaaattgagaaaaagtgactgactaattaactttttgccttgcaaatgaagctatgcagcttttaagccactgtcaaaataaacaacccaaagatgccgttgtaatatatatgtagtccattctaattgactgtgagtcacgggaaatagttgattgttcgctgtggtttttcaactgtgccccagagcaattaacaatgcaaattgatacgccaaggcagcagacgaatagatgccggcaagtaagtgaattcattttgcccccaagccgaaaactaagcggcttgaaggaccttctgcaatcaaatcggcggcttaagctgaacataaatcttgcattgaatggcgggagaactttcacctgctccgccataaatttccattgcaattccaccactcaatgtggcttaagcgaccgactattcactgacaccgtgattttgtgaggacgaattgggtaatttaaaaccgtttggcagagagggctaacaatggtgatcaaagtaagatgttaaactttacagaaaagataactttttcggggcaagaaaaagacaaagtaattttgaacgtattgaacgtgcatatgttctagaatagtgaaataatgtgaaattatgattataagacttatctcttacaattatgcaagtgctgctgaagcagataagattatatttcaatttcaccaagccaatacttttaaaattgaaattgaggagtaggacaaaattatgaaattatgaaaaaattcacacaactgctattaattaaagtaattttatttgagattcatttacaagctagctgtgtgcgtaacctaaaagccctctattaatgggaacccgctcttcgtcacctgctcatcgatccagttcctcaaataggccacattcgtgtaggccgcaggcacatccttctcggcacattcgatgccccaggacacgaggcccaccagctggtagcgatccttctgcccaggcaaagtgcaaaacaacggggagccgccgtcgcccatgcaggtgtccttaccctttacgccgccggcacaagtgaagctcggatggagattgtagcgacgccccaggacagtgtgccgcaacagccgttggcaggactcgtggtccaccgccggcagctcgatgcgctttagcaggttttccatggtgcgggacgtgctgtacctgagcccccacccagtggccaagcagcttgcactccgcaactcagcctccatttggggcgtctccggtggcggcaggcagatgggctgtatgtgcggggccacctggaaaggtcgctccagcaccaccagagcaatgtcattgtatagggtcaggttgttgaagttctcgtggcgatgcagctcgctgatggcccgcatctggtagggatgcagctctgtctggctgttaaggtcccagtcaccagctcgaaccagcagcgagtcctcactccggttgaacacgttgtgggcactggtcagcaccagctgcgggtggatgagggtgccgccgcagacgaagttgccttccatgtccatcagcgccaccatccaggggaactcggcgaagacggactcgccattgttgtagccatccagctggtagtagagccccttcgggttgctatagccgcatcccttcagcagaaaatcctttacgttacgctggataggattgcgaccctcctctatctggaaaaaatgtatatttaagcgttaatggaaaattgtcgaattgaagtcggtaaaaatgaattaaactaaattgaaatccgtagcgaacacacaaaacgacaactacggacacttttgtattaaattaaaacacaaattgttttgaaaattccatctcaattgttttatgagaaacaccaccaacagcaaatagaaagaattaaaaaacaagacaatctgtagataataagtatataaaaaactttttctcgttgaatacattttagattataaaaccatttttcaaaaaacaagaaacaagcctaacttaaatgattaaatacgatttaaatgcaaatcagttctttagcacaatcagaagatatttttatgaatcgtgactggaaattgtactacacgcctgaagtgaccttactttcccctataatcaaatcacaacaacaagctttcatttctaaacgtacactagctaacaacaaaatattttaaacgattgtaatatatgatcggatttgatttcttacctgatcgcccaacgggcagcactcctccacgactcggcagccgaagttgctctcctcgttaatgcgcggcttgatgatgtacctcccatcctcgttgaccactccggtggagcagaggtgccgcggaacacactcccgcttgacgccgcagcttttgtagcccggctcgtcctccttggcgccgacgaggttcggtttcggttcgccttcaaggggattatccgaggaggcccagatattttttcgtcgctgattccggtactcgatctcggcctgataggcctcaaagttctccaactgctccctatcgcagcactccaagtcgcgcccgcagctgttgtccaatatgcgcttgaccagcttccccttgccggaatcatccgactcgtcgcacttcttcttgctaacgcagacctcgtggctcccgcaggtgcggatcgagaggatcgccggtgcgagggaaatcaatgccagactgatcagcaacacctgctccacattcatggcgacgattggaattggtatgggaaagccacactcgttcacacagttcaacagtgagccagccaaacaataaacagcacacacactcgctgggaatttgtttggaatccgaataacccctacgatttcagccggatcaatgcgcaattcactttgtattactttcaagagccgcgacgcgttttcgactgactctgccctcgcagcgatcggcggaattatgggagagagactctgatctccggagattagtaaaatcaactaatagctctcaacaaattcaattctcttccgatcggcagcactttacttctcagaatccggaaagccggttctaacaatatatatatcttgagctcaactataggcgatcagtcgtctttgtgaaacatatgctacagtgttgacttcggtgtattgtctttgccttaaatacgactatgttgagtaattgcttcatatgttcaataaatgctatatgttaatgaatatatttgaagaaaaagtcaatatcatttgatttttcccgaaaaataacaacattttttaaggtatctatttatagaaagcagtttatttataacaaatatatacaatatatatgttgattcgaagaaattgctgtttgcataaaaaaatacaaaatacgcctatatatgatatcacaggatcaagaagtaggtggatctgttatcctggtgtcgctgtgtaactaaatagcgttgggaaaacccactcctcttcacttctctcttacgtgctcttccgagcttagattcccagaaagcaggttctataaatgcttcgatttcaactctacttgatcagtcgacatcgcgagtctgtagctacgagattgtttctaatcggtgttctctttgctttaaactgcactagcacataggtataaatggtagcagtatatacgcctacgtatccgcatactttagttgtaacatatactatatatcgacaagggcaacaactgataataaaacca

SEQ ID NO: 18749 - DNA, 1380 bp, DROSOPHILA
atgaatgtggagcaggtgttgctgatcagtctggcattgatttccctcgcaccggcgatcctctcgatccgcacctgcgggagccacgaggtctgcgttagcaagaagaagtgcgacgagtcggatgattccggcaaggggaagctggtcaagcgcatattggacaacagctgcgggcgcgacttggagtgctgcgatagggagcagttggagaactttgaggcctatcaggccgagatcgagtaccggaatcagcgacgaaaaaatatctgggcctcctcggataatccccttgaaggcgaaccgaaaccgaacctcgtcggcgccaaggaggacgagccgggctacaaaagctgcggcgtcaagcgggagtgtgttccgcggcacctctgctccaccggagtggtcaacgaggatgggaggtacatcatcaagccgcgcattaacgaggagagcaacttcggctgccgagtcgtggaggagtgctgcccgttgggcgatcagatagaggagggtcgcaatcctatccagcgtaacgtaaaggattttctgctgaagggatgcggctatagcaacccgaaggggctctactaccagctggatggctacaacaatggcgagtccgtcttcgccgagttcccctggatggtggcgctgatggacatggaaggcaacttcgtctgcggcggcaccctcatccacccgcagctggtgctgaccagtgcccacaacgtgttcaaccggagtgaggactcgctgctggttcgagctggtgactgggaccttaacagccagacagagctgcatccctaccagatgcgggccatcagcgagctgcatcgccacgagaacttcaacaacctgaccctatacaatgacattgctctggtggtgctggagcgacctttccaggtggccccgcacatacagcccatctgcctgccgccaccggagacgccccaaatggaggctgagttgcggagtgcaagctgcttggccactgggtgggggctcaggtacagcacgtcccgcaccatggaaaacctgctaaagcgcatcgagctgccggcggtggaccacgagtcctgccaacggctgttgcggcacactgtcctggggcgtcgctacaatctccatccgagcttcacttgtgccggcggcgtaaagggtaaggacacctgcatgggcgacggcggctccccgttgttttgcactttgcctgggcagaaggatcgctaccagctggtgggcctcgtgtcctggggcatcgaatgtgccgagaaggatgtgcctgcggcctacacgaatgtggcctatttgaggaactggatcgatgagcaggtgacgaagagcgggttcccattaatagagggcttttag

SEQ ID NO: 18750 - protein, 459 aa, DROSOPHILA
MNVEQVLLISLALISLAPAILSIRTCGSHEVCVSKKKCDESDDSGKGKLVKRILDNSCGRDLECCDREQLENFEAYQAEIEYRNQRRKNIWASSDNPLEGEPKPNLVGAKEDEPGYKSCGVKRECVPRHLCSTGVVNEDGRYIIKPRINEESNFGCRVVEECCPLGDQIEEGRNPIQRNVKDFLLKGCGYSNPKGLYYQLDGYNNGESVFAEFPWMVALMDMEGNFVCGGTLIHPQLVLTSAHNVFNRSEDSLLVRAGDWDLNSQTELHPYQMRAISELHRHENFNNLTLYNDIALVVLERPFQVAPHIQPICLPPPETPQMEAELRSASCLATGWGLRYSTSRTMENLLKRIELPAVDHESCQRLLRHTVLGRRYNLHPSFTCAGGVKGKDTCMGDGGSPLFCTLPGQKDRYQLVGLVSWGIECAEKDVPAAYTNVAYLRNWIDEQVTKSGFPLIEGF

SEQ ID NO: 18751 - DNA, 4614 bp, DROSOPHILA
tatttatagtgctgtgctgccttatcgccaatggctcattttatggatggccataagtattctagttgtttgggaacacgtgaacttatatgagttaataattttcaaatcattctttcatgttgcatgtggcattaaaaatttcttggttttttgtgctatttttcgttcctgcaaaagttctcaagtttttctaaaactatttataaattgccaaggaaccgagaaaacctcatcatttctcgtaataaacaaaaaaacattccaaggcgaaggcaaacatatttcacgttgcagtttgcagctagctatttccgctggaaaactttgtgctgcagttgtcagttggttaaatggaaaatatttttgaccagccgggcacgtttatttatggagcgagtacacgccatattaaatagcttggaagagaagatttatgccatttatgcctgggtatggtctccagtcctggatgcagctaatactgctagccataaattgccgcttagcattataactcaattagccagtggacgggttgcgtatacgcaatgttgtccagcagaaacagttacatttacaactgtactggcgaattgtgcaagcactaattaatgtcaagcggcagggtagcccagtttctggccttgtagttgtcactgtagccattccaggtcactttccgcccatgtctaccaatccgctggccgttgctgtgggcacttgttgtggggtaatgaattcgctgccaggagtcttgccttcgtgtctgcggctttcctccaattagcgccgactcacatttgacttaaccccattgtcatcgcaagggtgtgaagagccgcagtttgaagccaacacggcgtatacgcaatccaactgacccactgcattacgttaattgagctgttatgattaagatgccgctcgataactgctttcacagttgaaattaccaccttagcagggaaattcattttataaaacattacattacattacattataaaatgtatatttattaattatgattatcattattcattactattataatgaattaagtaccgaaaattttgtatatttccatagaaaacctttttccctagatatcaccgaatgctgccttgactggcaagtccacagaaaacgaatgtatgacttttctatgaattaggatagcaaaaagcaagtaaatgcagtaaaacacgatagaaaatatgcccacggagcgcctggcgaaaaatcccagcgtcgtggaccatagaagagtggaaaacacacccaggtttagaaaaatgaatgcatttaagccgtaattgcccgtttggttagcttccgagaccgggaggccaaatagattcttgacatgcatcacagtgctggcggacatgacaacggctgtgatttcagagcatattaaggatgttccaattggcacacacaatactcactgaagaagggtcctccaatggctgaggcgtaggccatcctgggatatccgtgcaatgccatcgccacgttggcaattagtggacccagacttcccgtacaagccttcaccgttgcgcccataaagtcgtcctccaccttcaggatgtggccaataacttccaggaccttgtctatttccgtcgcgcaaatgaagatcataaacatagagccagttaggttcattacagtaaacacctgtgaattcgaaactcacgttaacgtgatgcaacctgttagcgccactgtaactcaccgaatggtaaaatggtggcacatcggttcgagattggataaacataaagaccgctatcggcacggttatgggcagggaatacatagcataaatggcttcctcgcccatggcaacgtaccacagcgagttgcccctagatgatagcaaagctatgggaggaagactactattattaccttttaatgctcttgagcaaacaataaccttgtcgaacgcacctttaatggccattatggacattgccggatttagcattacttgaatgcaattcagaagcttgttccagccatgtttgtccagctcgtagtccaccagaggtatgtagatgcagcatatgatcacagctggtattttggtcaacataaaggcgcgcttgattatgtttcctttccgccacttttcacagttaattggcctcagggctatgaagaggtccttgaatagtccccagttccgtcccagagctctgttgtgcaataccatccgtgtggccttcctatcgaggcttatgcgagtgctgcggcccattctcaaggtggtgtaccttattttgttgatgttgggacccgagttggtcctttcaaaaatctccacttccatgtcacgggtgtagatcgcctggttcctttccaattcactcagccgctttctcttttctggagtcatttctcctaccaagagggcatcaatctgtgcatttgttgctgggaaataacaattacaatctttattcaaagcaaattacttaaccacttactctttaaagccctccgaataagatacacatcaacgacattcactaatatgtaaaaaatgtatacaagaaacataactaaaattgaggaaggagtaacattagtaacaataatgatttcttccaaagcgaaaagcttgcctatgaatgacgtttcgggtacatgtgcactgctggccaggaagtactgaaggagcattgatccgaagataagaaacaaaatgtcccgaacactttcgtacgcgttcatcttgaagggactcgtgtagcagatcaggcctcctgaaaccatggacacaaagagggcggcggccaaactattggcaaacacgggcacattcgcattcacactggccaagttggagaataggtcggcggagctgttcccaaaagccaacaaggtcacgcccgccacgtgctcgttcatacagaggaaccgcgacacggcctttagagcaggactgtagctgaaggtacacaatcatattgaggtgcgaagtgaaatacttagatgtacatagtattgtaattagaaaccaattagaggtatatttcagctattggaaatatttatccaactactactccccagggaatgcctctcttctatctgagtatcaacttttgtcagtggacgtgtgtacttactatttgttgcaaacgtggatcagcagattgtaattagaaaccaattagaggtatatttcagctattggaaatatttatccaactactactccccagggaatgcctctcttctatctgagtatcaacttttgtcagtggacgtgtgtacttactatttgttgcaaacgtggatcagcagaacaagtatctcgtagcacagacccatgaacagagcgaggaagataacctgctcgaattcgtttacgcagttcagatcgcaggccatgatcctcatgtatggcagcacattagtgctcctattgcagtccttggcactcgccacaaaggcacacctttcctcgaagggaaacgtgttggccgcgtagcagctgactgtgtcccagaagttatcgaactccgcatcgaaggcattgggcacatagctctcttcggtggccattgcagtgttgtgtgtgtgaacgaaacgaaatctgaaaaataactggcacgattgtcggggtctccattgcttcaaaggtctactatgtagaactgtcaatgagtaacatttaagggtagagttttcggggatccctgtcagccctgcgtctactgacacttcccattcggcccaatacaccagcagaactcttaaattgactccaatgtaaggacgggatataatgtaagacagcgagccgactccactagcctgtgcattgaaaaagaaaggactcgggtgcaaaatggtcagtcagctgcccgcacagtctgctgatttagacaagctcgctccatcaggtcagtttgccgtcgctgtggtcagcaatctccagagatcgcgttcgagctccgatcgccgggggctcgtcttgatcctgctctccagcgacctgggcacctacatcagacgcctgctggcccgtgtggcggagaaggcatgtacgatcctacgtacatatctggggcttagctaccgggaagtgtccgtgtcccaggacatggcccacagactggccgtggttggccggaagaccctggtcctggacctggatgagactctggtgcactcatgttacctcgatccggacacccacgacaacgtgggatgtagccagttgcccgaacacgcacaaccggactatgtgctcaatatttccatcgacgggatggaacctatcgttttccgggtcttcaagcggccgcatgtagacgagttcctggactttgtgtccaagtggtacgacctggtgatctatacggccagcctggaggtctatgccgcccaggttgtggaccatctggacgcggggcgaggattgattactcgccgcttctatcgccagcactgtcgagcctcctcgccaatggtctccaaggacctgacattggtcacccctgacatgagcggcgttttaatcatcgacaactcgccgtacgcataccgcgactttcccgacaacgctattcccattaagaccttcat

SEQ ID NO: 18752 - DNA, 1880 bp, DROSOPHILA
gtttcgttcacacacacaacactgcaatggccaccgaagagagctatgtgcccaatgccttcgatgcggagttcgataacttctgggacacagtcagctgctacgcggccaacacgtttcccttcgaggaaaggtgtgcctttgtggcgagtgccaaggactgcaataggagcactaatgtgctgccatacatgaggatcatggcctgcgatctgaactgcgtaaacgaattcgagcaggttatcttcctcgctctgttcatgggtctgtgctacgagatacttgttctgctgatccacgtttgcaacaaatactacagtcctgctctaaaggccgtgtcgcggttcctctgtatgaacgagcacgtggcgggcgtgaccttgttggcttttgggaacagctccgccgacctattctccaacttggccagtgtgaatgcgaatgtgcccgtgtttgccaatagtttggccgccgccctctttgtgtccatggtttcaggaggcctgatctgctacacgagtcccttcaagatgaacgcgtacgaaagtgttcgggacattttgtttcttatcttcggatcaatgctccttcagtacttcctggccagcacaacaaatgcacagattgatgccctcttggtaggagaaatgactccagaaaagagaaagcggctgagtgaattggaaaggaaccaggcgatctacacccgtgacatggaagtggagatttttgaaaggaccaactcgggtcccaacatcaacaaaataaggtacaccaccttgagaatgggccgcagcactcgcataagcctcgataggaaggccacacggatggtattgcacaacagagctctgggacggaactggggactattcaaggacctcttcatagccctgaggccaattaactgtgaaaagtggcggaaaggaaacataatcaagcgcgcctttatgttgaccaaaataccagctgtgatcatatgctgcatctacatacctctggtggactacgagctggacaaacatggctggaacaagcttctgaattgcattcaagtaatgctaaatccggcaatgtccataatggccattaaagctttgctatcatctaggggcaactcgctgtggtacgttgccatgggcgaggaagccatttatgctatgtattccctgcccataaccgtgccgatagcggtctttatgtttatccaatctcgaaccgatgtgccaccattttaccattcggtgtttactgtaatgaacctaactggctctatgtttatgatcttcatttgcgcgacggaaatagacaaggtcctggaagttattggccacatcctgaaggtggaggacgactttatgggcgcaacggtgaaggcttgtacgggaagtctgggtccactaattgccaacgtggcgatggcattgcacggatatcccaggatggcctacgcctcagccattggaggacccttcttcaccgttgtcatgtccgccagcactgtgatgcatgtcaagaatctatttggcctcccggtctcggaagctaaccaaacgggcaattacggcttaaatgcattcatttttctaaacctgggtgtgttttccactcttctatggtccacgacgctgggatttttcgccaggcgctccgtgggcatattttctatcgtgttttactgcatttacttgctttttgctatcctaattcatagaaaagtcatacattcgttttctgtggacttgccagtcaaggcagcattcggtgatatctagggaaaaaggttttctatggaaatatacaaaattttcggtacttaattcattataatagtaatgaataatgataatcataattaataaatatacattttataatgt

SEQ ID NO: 18753 - protein, 582 aa, DROSOPHILA
MATEESYVPNAFDAEFDNFWDTVSCYAANTFPFEERCAFVASAKDCNRSTNVLPYMRIMACDLNCVNEFEQVIFLALFMGLCYEILVLLIHVCNKYYSPALKAVSRFLCMNEHVAGVTLLAFGNSSADLFSNLASVNANVPVFANSLAAALFVSMVSGGLICYTSPFKMNAYESVRDILFLIFGSMLLQYFLASTTNAQIDALLVGEMTPEKRKRLSELERNQAIYTRDMEVEIFERTNSGPNINKIRYTTLRMGRSTRISLDRKATRMVLHNRALGRNWGLFKDLFIALRPINCEKWRKGNIIKRAFMLTKIPAVIICCIYIPLVDYELDKHGWNKLLNCIQVMLNPAMSIMAIKALLSSRGNSLWYVAMGEEAIYAMYSLPITVPIAVFMFIQSRTDVPPFYHSVFTVMNLTGSMFMIFICATEIDKVLEVIGHILKVEDDFMGATVKACTGSLGPLIANVAMALHGYPRMAYASAIGGPFFTVVMSASTVMHVKNLFGLPVSEANQTGNYGLNAFIFLNLGVFSTLLWSTTLGFFARRSVGIFSIVFYCIYLLFAILIHRKVIHSFSVDLPVKAAFGDI

SEQ ID NO: 18754 - DNA, 6720 bp, DROSOPHILA
ctttctactttctacttaccatttgtcactttccattcctccacaggcacactgtctggtcacgagaaccgcatcacttgcatcagcctgtgccccaatggcatgtgcctggcgtccaccagttgggatcagcaagtgcgtctgtggctctaatctgtgcctctgatctgggttcagtgtcgtccaaaggcgaagacaacgtttatgcgtgcagtttgcttgcaaattacgtatacgtaatatccatagcctgcaagtaataaggatagttctcagtgcagactaacaatattaatacaatattaaatctattgttaaacttgcgaacataagaatagcttgccccctttaagtgctaatttgcaagcaaaacgtgcgtatgaatattattataataattgaatacttgattacctagagaaagtagcctccaataacaagcaagtgccaattggatgtgcgaaataaaatgtatgaatagtacaacaaagtaacacgtctcctccattaaaactccattgcaacttaattttttttatatattttttatatttttcttataaaaaatacttatacaattacgaagatatttttgctgctgcgatttttggcgcttggttttgtttgtttgtggaaattgtctttgagctggtcaaagaggcagctaggtaaattaaaacaaatcacttttgaaatcaacagagagataaagatacaggttcagatacagaatagtcgaaagtatacagatagatagaagatagatagaaagagagagagagagagagagagagatagaaatgaaagtcgcataaataacagatggatagagatagcttaggatcacacaggaagcaggatgcaacgatttgagtattctgtagatggatcagcatagatcagctggtacagtttgtttagtttatcagactctcggtggaactactgtgagttgttctcctgtttgggtagatggaaggatagcgacgacgggacggccttaaacggagaagccatcgccggtgggatccaggatccaggggtagttgttggggcactccatgcacgtgaagagacgcagcgtctcgccgggcagctccctggtggtcaggggacacgcgttgggcagagagcagtagggctggcccttgacgtcgcacttctccttccactcctggaagtcgcgcagcgagttcagctcggtggggttctgcatccactggatcacctgcaggttggtcacgaagaacacgtcgttgcggccgagcatctcctcgatgaatttgatcagctcgtcgcggtactccttcttcgacttcagccacgaagcgtggaagtggagtccaagtggagcacggttgctattgtagtggcggttgaagttgtggcgcagcaggcgtgcgaactggtcgccgctggctacgtttgagcaggagtccaccatatggcaaccgggcagggactcgtcgaaggtgggatcgtcgcgccggtccagctcgttcatgaccatctcccacacggggtggctcctcgatgggcagttgtgcgcgttgccgttgcacttgtgcggcatgcggaagtacagggtgtatggccaaatgggcacgcggccaagggaggcggtgatggaggcgtcgtacacgaagaactgatcggccatcatctcgaactgcttgttgccgcccacgcggaggtagggcgcccgcatgccgatgatggagccgtcggtgatgttggcgaagcgctccacgatcagtcgggagccggccatctcggccagccagtcgtcgtagctgccgccggtccagtagttggggtcatccttgtgcgttagcgagaacacggagatctcgtgtccgcgacgatgaaggtcctgcaccgccgagtagttggtgtacttgtgggacacgaagaaggtgcccttgatggagcagccgttgggattctggcgctgtccgttgaagatgtcctcgtacaggtcgatgttgtccacgttgacggcgccgttgaaggtgatcgtgatcatctggggcacctgttggggctcaatgccgccgggaatgcgggttccgtccgccgagcagaagcagtcgggcagggcgcactgcgtcggatcgcattcgggggcgcggttgggatcctcatcgacagctggaaatggtagatggttggggatcattcttctggatcatttattgaactttgcgctgtaatgtatgctgcatttcctcaacaatttatcatctcaagcaccatttggaattcagttcgaatctgtaggaataatcgtgtgttggacttacagcaggcgttctcatcggattcgtccttgcagtcggacttgccgttgcagaagagctccttgtccaggcactcgccgtcgccgcaggacagcttaccctcgggacagatgggctcatccgtcttcaggatgggcttggccttgcgcggctctgtggaatgtacactcagttagtgggaagctacgttttggagctactggtggatggaggcgtgttagtgacaacaaatgtctaaattttgaaatgagaagtatttacatgagtgtgatggggtttagtagtttaggtggttgttagtttcgagctgggttagggtttgtttcgttcgtggatctaccaaagttccggaagtctaacattgctgactactgtatgtacaggtgtatattggcttgattggttggtttgtttgtttggcttgactgtttggtctggctggttggtcgtcacacttactctctttctcgtcgcaattggtcaccttggccttccagtcgcaggtctgcttgatcacgtcgaaggccagacccgaaggacactgaatttctttcaaacccgacttggtacatctacaaaataaagttcatgttctgatttcgtattggcgttgctagctatagaactttggcaccgattcgggggtggattcagggtgtttatgcaatgactcgatcgattcggggactcggggactccccggttttagtgacacacacagagagagacagagacagatacagacacacacacacacacagggggtgagagacagatagacagacacagcgatagaggaggggtggttgatagtgggctggggatctgggctctcgggaagtatcttgagctttagacatccgcagcggattgggtgatctggttgatctagtcgatctgggtggcgtcacttactctcgagcacatcgcaggacttcacattcgacttccaatcgcaaagttggcgcaaaacatcgaatgccaggccgccggcgcagcgaatcggcgccaaacgccaagtgccatcttcgccggcactgtcgcaccttcgatagcgatacaagaagtggcaagaattggttgtaggagtgctgctttggtcattgcatcgggcatcagccgtctcagctgaacaatcggacaacccagggccacatgtggccgcaattcgacttacctgtacacctcgcggcagtcgccgtcggtctccaggcggaagtactcatccgcgggacgatcggcgcacacctcctccacatcaacgccctccagcttgtcctggccatgtgctgttgggatgggaaagatggttaggcatggctaatgatcgttggtgatcatttagatcaggttacttgactacattgattatgtgcatttgtttagtttctagccataccaacgtagttctagtctctggactttagtgcttgcctatgttggcaatgcgttttaatacgaagtgtgtatactttcgatcggaataaacgggaattggatgttcgatcggaatgatgttaaaggtggtgttttctgaacgaaattcatttgaaactttccacaattttccctacacatttgtaaccatcaatttgatagtttagtgtaagaagcttgtagcaaactttgcgaaaaagtaaataatgcagtattcaatttataattttcgttgctttgtcaattctcataattacgttttctttggtatctccttgaagggtcctgatctatggcgggttcaaatgaatttttaacatacaagccatctggttgaatagaaatgtttacatattatcgtgccaacaaatatatttttttagtgttcggcgagcactgcttaagaaaatctaatttatttttgttttaattttttaatagaatagaatagggacatactgtcaggaagaagaagaggaaatgttttctgaagaaatcgccatgaatttaagcagaattgaaaaaaaagtttgagatacgagacagaagagaaaacaccagagactctttctttaatataagtacttgttatcctattttaatttaaaagtcaataaatactctaaaaaatatataaattaatataagtatttgaaatcaatcaagttctttcctaactccgttcgctgataatttgccgacatcttaattgttaaattgatattgttctcattggcaacttgatcgtgatgggtgccattaatcacagtcgttctatcagttaatcggcgtcttagccagtataattggccgcacctcatggcttaacggttaacttactcccaacaccaacgactttcgaccggtttttggccattggtttgtgtggaaatacgagtaccacttctagccgaccaaaacaactctcggttttgttcaatacagtttgtctacatctcgtttcggctgaaatcgaaagggcaaacgaaagcggcatatcccatttatgggcacaggtccacatatctgggatgatctggggaatgctggcggatcgtatcgaatgcggtatcttacggtagcggttggtcatgtaaggtgtctttccaaacgggttgagagtattggctaaccgcgttgttgttgttgttgttgatgttgattttgtggttattggaaacccgttttcggtttaacattaaaatgatattgcataaacaacgctggcgagtccaaaaatacatatgtacatatatctacatggaaacggaaccgacggcagacagcagacaggctggttttgttcgttttccaatgctaatttcggttttatggccaaccggagtttcgtcctcttgccacagtttcttttttctttattattatttttttttttttgttgctttgtggttcgttttttcctttttttccgacaactgaactcttacatcaccagcgattgaaggataagtttaatcgattgcatgccgctaatgactgcgacttcgacttcgatcaattgtgatgtttttcgagcccacatcatcgcactttttcaagtttattcgccttggccagcgatcgaggttcgtttcagctagtattgtattttttttctttggcaaccttgcgaaaagtggcaaagtttccaccgccaaaggtcaccaacttaactctaggcacaactaatggctacctacgtactaggtgtaatcgaacggagtactcaccaacagcaaggcagaggcacacaacgctcaaaattggccaccaacgcgccatgatagattccagagctctctgcgggcgaaattcgtagaagggttagcaacacactagtcacaattccgtactaatgatactgatggcacatagtacgaggtataggttatagggtggtaactttggaaaactcaactgacttttgcccagactctgagtgggaatgcttggatcgaatggaagtggagtgaacggagctcactcttccaatacacagccacgcttacactaggtgttggccaccagcaacgagttctatttatcaagccgaggtgtcttggtcgggctcgaatccatggtgggtagcgagcaactcaccctctggccaactcaccacgaccgctgcgccggcgccggagctttcgaggggcagtcttgtggaacccattcggaaatgccaaggtacgcgggcgtctcttcgcttctgcgatgtgtgaagaaaggttaattagcatttataggcgcaggtgggagcgggattcggtccgtactttacggccgattgtgcgggggatttgatttgatttctgatttcgaattttttggcttcagacgactgcaccccatgggcttgtttgtttactcctttagttagtcatccgcttagacatacataaatcaaagacgaatgcccatcaatctctttctgccactgaccctgaatttgcgagtcttttgttcgaacatctgcgacgcggctgcttctcggcgattctatcaaaactataaactattctacgataatctcgatttcgtaactgttttttttttttcttatttctttcttttctttctaaaccgttttctacagcacgtttattggccacttcatttttattttcacccaaacgagccgagaatcccaatgggctggagctccgggtcacctggtgcatactaaacagggtctttggctgcctctggaagcttcccagtgcctgtgcagccgatcatttgtatgccaatcgcagctgccgcataaaattcttgttaacgtggctaagacaccaaaaggttattaaacctccgacgactcgagccatcgaaagctcgagtcttccagcagaagagagtcttcttgcgagtgttcgctgagtcacagggataagtccgaatgcactccctgcagcagatcttgagttgcttaattatgccaagccaagtcgatgccgttgttaactgttttgttattcccttcttt

SEQ ID NO: 18755 - DNA, 1675 bp, DROSOPHILA
tgagctccgttcactccacttccattcgatccaagcattcccactcagagtctgggcaaaaagagctctggaatctatcatggcgcgttggtggccaattttgagcgttgtgtgcctctgccttgctgttgcacatggccaggacaagctggagggcgttgatgtggaggaggtgtgcgccgatcgtcccgcggatgagtacttccgcctggagaccgacggcgactgccgcgaggtgtacaggtgcgacagtgccggcgaagatggcacttggcgtttggcgccgattcgctgcgccggcggcctggcattcgatgttttgcgccaactttgcgattggaagtcgaatgtgaagtcctgcgatgtgctcgagaagccgcgcaaggccaagcccatcctgaagacggatgagcccatctgtcccgagggtaagctgtcctgcggcgacggcgagtgcctggacaaggagctcttctgcaacggcaagtccgactgcaaggacgaatccgatgagaacgcctgctctgtcgatgaggatcccaaccgcgcccccgaatgcgatccgacgcagtgcgccctgcccgactgcttctgctcggcggacggaacccgcattcccggcggcattgagccccaacaggtgccccagatgatcacgatcaccttcaacggcgccgtcaacgtggacaacatcgacctgtacgaggacatcttcaacggacagcgccagaatcccaacggctgctccatcaagggcaccttcttcgtgtcccacaagtacaccaactactcggcggtgcaggaccttcatcgtcgcggacacgagatctccgtgttctcgctaacgcacaaggatgaccccaactactggaccggcggcagctacgacgactggctggccgagatggccggctcccgactgatcgtggagcgcttcgccaacatcaccgacggctccatcatcggcatgcgggcgccctacctccgcgtgggcggcaacaagcagttcgagatgatggccgatcagttcttcgtgtacgacgcctccatcaccgcctcccttggccgcgtgcccatttggccatacaccctgtacttccgcatgccgcacaagtgcaacggcaacgcgcacaactgcccatcgaggagccaccccgtgtgggagatggtcatgaacgagctggaccggcgcgacgatcccaccttcgacgagtccctgcccggttgccatatggtggactcctgctcaaacgtagccagcggcgaccagttcgcacgcctgctgcgccacaacttcaaccgccactacaatagcaaccgtgctccacttggactccacttccacgcttcgtggctgaagtcgaagaaggagtaccgcgacgagctgatcaaattcatcgaggagatgctcggccgcaacgacgtgttcttcgtgaccaacctgcaggtgatccagtggatgcagaaccccaccgagctgaactcgctgcgcgacttccaggagtggaaggagaagtgcgacgtcaagggccagccctactgctctctgcccaacgcgtgtcccctgaccaccagggagctgcccggcgagacgctgcgtctcttcacgtgcatggagtgccccaacaactacccctggatcctggatcccaccggcgatggcttctccgtttaa

SEQ ID NO: 18756 - protein, 531 aa, DROSOPHILA
MARWWPILSVVCLCLAVAHGQDKLEGVDVEEVCADRPADEYFRLETDGDCREVYRCDSAGEDGTWRLAPIRCAGGLAFDVLRQLCDWKSNVKSCDVLEKPRKAKPILKTDEPICPEGKLSCGDGECLDKELFCNGKSDCKDESDENACSVDEDPNRAPECDPTQCALPDCFCSADGTRIPGGIEPQQVPQMITITFNGAVNVDNIDLYEDIFNGQRQNPNGCSIKGTFFVSHKYTNYSAVQDLHRRGHEISVFSLTHKDDPNYWTGGSYDDWLAEMAGSRLIVERFANITDGSIIGMRAPYLRVGGNKQFEMMADQFFVYDASITASLGRVPIWPYTLYFRMPHKCNGNAHNCPSRSHPVWEMVMNELDRRDDPTFDESLPGCHMVDSCSNVASGDQFARLLRHNFNRHYNSNRAPLGLHFHASWLKSKKEYRDELIKFIEEMLGRNDVFFVTNLQVIQWMQNPTELNSLRDFQEWKEKCDVKGQPYCSLPNACPLTTRELPGETLRLFTCMECPNNYPWILDPTGDGFSV

SEQ ID NO: 18757 - DNA, 14385 bp, DROSOPHILA
ccatggagtttgacatcaagcatacggcgccgcagcaccggcaatatctgtccaacgagggcatcggagtgggaactccatttcagcggcaaaagcagtaccagcaggtgcgcgccatgaaggctcaggaacgcgtcctggagcaccgcatcgacaaggcggctgccggagagaaaacactaatgtccaagggcggcagccactttcggaaacatgctattaagaccaagtacggtattgatcgtgtggtcgaggatctcattcaggaggccatgtccaagggtgactttaacaatctaaacgggtctggaaagcccctgtcctcggctcagtcgcagaatccctatctggactttacgacccacaagttgaacaagattatgttagacaacggcttcacgccggaatggataagcctgggcaaggatattcgcgatgcgattgctcagctgaagacgaaactgcgccaggagcgcaaatactacggcgaatggccattgcagcgcccggacgatctggcagcctggaaaatattcacgctgaatcaccaggacgatgtgaagcaattgaacaaactcattgacaagtacaatctaatagtgcccattctggaaaatcagttctttcgcctgcatctcgacagaatggccgaacctatatttaaggatccggaattgcaacgtaacgtaatcagacccgaaatgaaatctaagcccagcagcaatctagagaatcagggcagcgctagtacaagtttattttccctaattagcaaactattgtaattaaaaatgtgtgattgtaaaatatgtgatattagatgtagattaaggtgctgtacgtttatgtgtacaatatatgtacgaaatagttcaataatccaagagacctttttgttattataacattaaaatcattgatatgttctttgttgtaaatcgagtgataaaaaatattggatttttttatatatagtttaattaatgtgtacaaattttttgcgatttttttaatcaaacttgaagtttattaatatatttttgtagtttttatataaaaagaaacgcagcctaaacctataaaaattgctatacaacttattaacgtcaaattatcgctgaatgttcaagattataattataactaatttgacaaaaagtcttcgagtaagataaactcatccctgcttgttatatttaaattgtcaggtttcacaagctggcatttactgactgctgacttccggagaaatgagagctgttccgttgaccaacattgctaatgcccttggaaaagcccagtgctcagccttgtggatgcgttgggtcagcgaatcctcgtcgtcatcgggcaaaatgggaacagcagcctgaacaatgatcgctcccgtgtccacaccctcgtccacgaagtgaaccgtgcagccggactccttttcgcccgcctccaaggcctgcttctggacatgcagaccaggatacttgggcagcagcgagggatggatattgacgagccgtccacgccactctcgaacgaatggagcactcaggacacgcatgaagccggcaaggcagatcaaatccacacgagccgccttcagatttcgcgtaagttccgcatcatagacctctcggctagcgaaatccttgtgggagatgaccaacgaaggtattccggcttgcgtggctcgctgcagacccagaacaccagtcttattgctgattaccagcacaacatcggcatggataccctgtgccgagtcgcgcgttgcatcaattagtgcttgcaggttgctgcccgttcccgaaatgagaacagcaactcgtttccgacgctgcgagagcatcttctgtgtcctggccaatgatgcctcaaagttctggaccaccacctgcgacttcttcggatccttgcgtgccaccacctcgccgaccacagctgctctttgcggataacgcagctccttaagaacgtcctcgacttccgtcggggccaccaccagaaccatccccaagccgcagttatatgtgcgctgcagctcagtggagctgatatttccggccgctgcaagccaggcgaaaacgggcggaagctggaacttattggcatccaggcgcacggccaaatccttacgcaatactcgcggtatattctcgctcaggcctcctcctgtgatgtgggctagtgccttgatgccgtgttttccgcgggacagcagagtggacaatgccttgacatagatcttggtgggcaccagcagctcctcgcccagcgtcttatcactaaagggcgccttgtcatgcagacccaagcccactcgcttcaaaacggcgtgaaccaaactaaatccgttgctgtggacgccagacgaaggtaagccgatgagcacatctccgggctggatttcatccaaaaggggtagaattccggtgtgttctgctatgcccaaggcgaaaccagccagatcatagacctggggttcgtacaggagcggcagagcggcactatgtgagtctggaggagattggacaaagcataaagcatttgtatataaaaagataccaagccacacttaccaatgaaactgctgttcgcctgcctggcaccctcttggaccccggagtgaacctccttggccaactgctcctgccagtgcccgcaggcatagtagcttgagaaactgattggctcggctccattgcagaggatgtcgttgacgcacatggccaccaaatcgatacccacgctcgtgttgcgattcgtttgctgcgctattttcagcttggtgcccactccatcggtgcccaggatgagtatggggtccttgtagtgggtgggtatgcgcgtgagccgacgtccagctgcgttttcaaagcattcctcgcgaggagctgataaatccgagttggaaggcagtttcttgagctcttcgggcaattcccgatcgccgagaccaccgaacggcgaggccaccttctccagttgctccacaaagttgcgcacctggacaggtgatccactaacctttgaccgccgttgcaggacgcccagtactttggctcccggaagggacgttcgccacagctgacttgactgaggcaggatcagaaccatgccaatgccgcagttgtgccgctctagaattgtttgggcactcagctttagctttccggccagccaaccaaagattttgggcactgggacggcaccgaaatccagcgttgtctcaaatccatcgggaagcagacggaggatatcgtttagcagaccatgggtcacgtgagccaccgacttgatctcatctcctttctgaagatgaggcaacagctgctggacatacagttgggtgggcgtggctaagacatgggccaaggtcagcccatcgtcgcctccgtccacgggagaacgctctctgagattcactttggatgccgccaactgggtgagtatttcattgaagccggcgcaatgaagcccagatgatggcagaccgatgagtaagtcacccggctggtaaagatcgaaacggggcaggattcgagactgctccactatgccaacacaatagccagccatgtcgtgttgaccgggagcatatagagaaggcatctctgcagtctcaccacctgaagagaaatttcaaattaatcgatggattttagaggagctcggtcatgtgctcacccactaaggcgcaccgcgcatcccggcagccatcagccattcccttgaccaactgggcggccaatggaacttgcagcttgccacaggcaatgtagtccagaaaggcgaccggctcggcacccacttccaggacatcattagcagccaaggcaaacaggtcgtagcccacattttcatacaattcgtgcgtcagggcaagatggatcttggctccgactccctgagtggcctcagcaatgactggctccttgtaggtgagttccttcaaacggaacagtcctccaaatccacccaagccgccaatcacgcccgggcgctgggtaccccgagacaagggcttgatgcgttgcaccagtgcatctccagcatcgatgtccactccgctgtccttgtaactcaaccccggggtgctggcactggcactacgtatggaaaggatacggaagaagatagtagtagctgatcaaaaggtcacatcaaataggattgttaggaaatgagatgtagtgagaaacctttgataagtaaactagataaaaattaaaatcttggttgctttatttgaactgagtcttgatgcatgatgtgatccacttgtaattacattttgaacgccttctgggcaatgtccgttcggtactgagctccagagcccgaaaaactgatgctgccagccaatttggttgccttcgcagcagcctccttcaagctgccgtccagagcgatcgcgatgaggacgcgaccgccattggttagggcttccttttgtgcattcacggcaaggccgctgtgaaagaccagttgggtgggtgtattggcagccggaagtcctgaaagtacgatacaagctattatgaagatctaagggaaatggtgaaaatcttacccgatatgatgcaaccctttgtggaggtctccggatagccagcactggccaggatcacaccaacggcactcactccattgcgccattgcaggggaatcttgtccagctttccgctgcaacaagcctccatcacatcgaacagatcgctttcgagcagcggcagaatcacctgggtctcgggatctccaaaccggcagttaaactccagcacacggggaccatcgcgtgtcagcatgagtcccgcatagagtacaccctggtagttgatcctctccttgatcagaccctgcacagcccgctccagcacggccttttgcaccagttccagtgctggctggctgatcaacggacaagggcagtaggcgcccatgccgccggtgtttggtccagtatcgccattgcccagtcgcttgtgatcctgcgctggcagcatggcacgcacacttttgccatcggtgaaggccagaacggaaacctcttcgccctccagtagctcctccaccaccagcgtggcgccagcctgaccgtatttcagatctcccaggatctcgtccaccgcctggcaggcctccttcgcattggcggccaccaccacgccctttccggcggccaatccagcagctttcaccaccagagctggatacggagcgctatttgataaagatattttaaaaggatttctttcaaagcatataagttggtaccttcttatgaatgccttggccttttcggtgtctgtgaaactttcgtaacgcgctgtgggaatcccatggcgcagcataaagtccttggcccacttcttgtccgcctcgatttgggcaccttgcttgccgggtccaaagcagggaattccagcgctctgcagcacatcgcccaaacccaaagccaagggatcttcgggtcccacaaccactagggctatctggttctccttgctccatttagcaatggcctttaaaagaggcgattaaaattaagttagtaaaataaactaatcaattcttaaatgttttcaatttaataatacgaaaggtactcctctttgtgcagtgattcataatttcgtaacaaatataaagcaattcatttggattattccagatcatccagaacaataccaacccgacaagcttgttgtgatgaaatatataatccaataaccgatgttaaaattacttaattgacattgtaatcgcgtttacaactgatgcactgataaattctcgccaaaaagttatcatttttgtgggatccggcagtcgggatctcagaatttgcatcgtaatcgtgttgattccaaaagcaatcttcacttttgagatcataattggtttttccaatcaaaccgggtcacgatcgtccgccatctcttgggatcctcattgttttaggttgttttcgactttttgaggcaaccacattccaagtcaaagataacactcctctaagtacccaaccggttccatcgtcaatttgtcgccaaaatactaaatgccttcctaattgttttgccattaaactgggtctgtgggtgcattgtcttcgcacttggcgtatcgatggcgatgatgaactgactcaggcgccagctatgtcagccatgtcaacaaaccaagttaatcccagcttgatcgctggtccggtttcgatatcggtttcggattcgaatgcggagccgtcaatatcgttagtcagctctaattcgaattggcgccaacgcagcgccggattaccaccccgcgcactggcctgcgttccagaccatttagcacctgggaagctcatcctcatcccgatttcctgacccccgtccatttcatccggttgaccgtatctcgtttcccagggttcaagaacgttcacacaaaatgacgcttttattggcccatttggctttccaaattaagcgcgatttggcaaacccggccaaggttttaatttcccgtaacgaagattgccaagatcttatgacagatgatttggaaccgcagaagtaaaaagatcaacaacttttatatctgttcagttctggtaagactcgcattctccgactggctctatccaaatttggctagaacgttttcgcctttatgctttacagagtgcgctcatgatttactgtattatatgcaaattaagtgcgggagaattggttggtgggtatatggctaccaggaggggggaggggacaggaggtctggagcggaatgctgccacatttgtctgcggataagtacggaattagatacgctttgctgaattagtcggacgggttttgtgatcggccaaaagaagtatcatccaggggatagcaggaaactgcgtctgctgttttgctgccaagtgattgaattatatgcttgatgataaaaatccaaagatcatttatcagaatacctatgcttatgcaatttctaagaataaccatgcaaataaagtcagcgcaaaatgttgcgtatcaagtcgaagaagtaattaagcttaattaacccaaaattggcatttcggctgtaaagcgttacttaactggaaagtcatttcctttataactaatttgcgtttaggacgtcatattacaaaaagtctatcggttatatgaaaattccgaacataaatttaagctcaaatgactattattaaattaactaactgtcagcgaatcgtggtggtagctaatttgtagttcataccatcgatcattcaaaaacaaaagttacatttactacacatcttgaaaacatcgacaatacgatttttacgacactgcagttcaacgatcgttatggtatttagagctccttgggatggtaagtcgagccgggcaatatgggattttcaagatcagccacaatacatatcaaattgtaagtgccccaaccttcgagtagggcataaccatccatccattcacgaatgtttcatttaggttttactcggctttccgttttgccgaactccacaccgtcccacacttttgggaattgcagcggcgacaacgacaaataacgccgttgatacctatataaaataattcctataagaaataaaatcattttatttatgactgactaaggcgaccagcagcgatgagatgtttgtagatggagacgatcatgacgatgacgagcggagatggagatggaaacggcaacggcaacggcaactcggaactgggtttccgaggcgatgtatagccaaaaatccgctggtgagcggatggatataaaaacgaaagcgtccgagaagcaggcaagcagtttagaaccaaactcgaacgcgacaccatgtatttgcttgtaagcatcacctgggaatttcccgaaattggattataatcgccgactctcgtctcgaatcccgcccacaggtgaacttcatcgttgcgctggccgtgctgcaggtgcaagccggctcatcctacattccggactcggatcgcaacacacgcaccctgcagaacgatctgcaggtggagcgggatggcaagtatcggtatgcctacgagacctccaatggcatttccgcatcgcaggagggattgggtggcgtggccgtacagggcggcagtagttacacatcacccgagggcgaagtaattagtgtgaactatgtggccgatgagtttggctatcatcccgtgggcgcacatataccccaggtgccggactacatactgcgctccctggagtacattaggacgcatccctaccagatcaaggactactacaccggggagctgaagaccgtggagcacgatgcagccgcctttaatgtgtacacacgcaacattcaggatcatacgatcccccaatcccgaccgagcaccacgcccaagaccatttacctcacccatccgcccacgaccacgtcgcgacctctgcgccaaagacgagctcttccgacgcactgatgatcgatggacgtgattctttggcggggcaaggggctggtctcttcggcggccagcgggcgaatctgtgaattttgatctaaacaattaattaagccacgaacaataaatagaagtgctaagcaaacataagctaaagtgtaatcgatctgtcgagttgtctgctggggatcatggatcacatcatggagcgacataaacaattttgggtattcgattctgtttatggcagagcaatcaatttgaaagaagtctgtcccaagcattccattgaaatgcgagcaattgagactgaaagttaataattgatattgagtttaagaattaggggaatcctattaagctgttgaaccaatatattttggcaattcaaatttccatatttaataacgaaccaaataacacctgttgtccgcgctttaaagtctataaatgatgggatcgtaaaagtcgcatttgaaagatataatttaaaggaataaaaagtggaaaggcccaatttaaaggtaatttttgtataatctaaaatcgaatctaaaatttttgccactgctacctgctataattaattaaccgaattaaagcagataatgtattaaaactggtttttggttcactttcagttgtagttttgtgtatttttgtgtataccattatttaagtttgaaaaacgttgttaaatgagtactcaatgaacaaatgtatatgttgtaatttaatttactaatatgtagattatatatatatacaacaaattaatactttacaaaattaagcagtggatgcatagtgcaaaactttttaaaaatatatttccaataacgagatagatcacacatcacttatcagccagacgtgcaatcgcgcccccatggcccgtctaagggttaaggcgtcgcgacgcaccaagattggatgcaatgaaacgttttcccagcgtctcgattacggatttatgactgccgctcagcataaaggtgctcgtcgagcatggagtgcgtttcttaccacgaccagaagccataaaagcgaataatatcactgggtaacaccattaaatggcaaccaaacgcattaaatgacgataaatgagcacccgctacccaattaacacacacatttgcacattttcttagtaactttaggaaccgcacgaaggtcgctccaaggtcggcgtaacgaacctacctcgaaatccttaggatccaaggtcttggcatccagattccggcacttctccaccagctggatgccatggctacccggcagtgcgtatatttgggccaccttcggagattgcgacaacttccagcagatcgcgtgctcccgaccgccgctgccaatgaccagaacgcgatgcgacataattccgctggagtggaggaaccactaatcagactaattcgacttaatcacgtttccccagagcaacaataacaccaaactaatgcgcacccacgtgttgatcgaaaagcacgcgcaattcgaagtttaaagcccggttcggtttcgaattcggatcaaaccgctcgcttcgacgcctctttttcaactaaaatctggaatcgagaagttggaaactaggtaggcacagtatgtgtgtatgtatgtgcataaatgtgtgaatatgaataccctatcccatgcgcgcgattatgtttgtcttcaggttcaggggctgataagagcgcttccagtgggttgattgcattattttctacacagacgaaaatcaactacatggtaactagatttctcctatatacatagatggtatagttcaagttgacatagtagtatagtacataccctttaaaagttgaacaaacaatttctgcctgtgctagcgcatttttttccagtgcaaccgctgctgtttgttgttttcggctgggcgattggaaaagttgctaataaataacaaaaacacgacgatagcctttcgggacccctgcaaaatcaacgatcgctgggggtaaatggagcaataactcaaattgcattcgcttatcaggatcactttgtaaatcaaataaacatccgaaagaactggaatttttcctcaaaaagtacatatgtatgtgtgttgttctctactacctttatgcgaaatattagatcagctgtatgctaaaagctcttctttaacatacatatatgtatctagaataaaagctcaaagcttaacgagctaactccccggctaagcttttaagatctgaaactactttatctaccatgcattgaaaaactatattcataatcctaaaaatcacgaatagcctttagatacataccatacaccaccatattagtcagacagttgaatcgaaaatcattaatgaggtcgaaaacaagtcgaatttgaatcaacatccgctgattaattaggtattgaaaggcaacaggcaataaataagatcgaatctcgagctcaatgatttgcgggatcattgcactgcaaaagcataatcttgcatcacattttaaaattaccgtttcgttttattagtatgcattatacaaaattttgtggtgtgagttgtaaatttacaaaatatctaccatagtccgtcataaaatttgtttaagatagttgtggatactcctcgggtctagccagtgggtagatcaacgaaaacgcgccacatcgaacctgagtgcaaatctgtggcgacattgaatctcagaatgccgcgtgggttgcgcttttcgtttgattttaatttttatatatatatatatgtagaaacatgcatttggaatcgaagtaccaagttgaaaattagaagttattgaaatagacaggacttgctccattgccgcagtctgttaccggcgcatctgaaagccaatggagccattcggacagggacccttgggcaggcgcaggactaggtcgttgaacggatgcggatgctggccgagctgctgcgcctgatgattctgatgctgctgctgatgctggtgctgctgctgatgctgctgctggtgctgctgtggcgactgcagcgactgttggcgcaggagggcggcggacactgatccgcccacaacaggtgaccagctctgctgcggattgggcgacgactggggcggcgcctgagcttgcatcccaacaccgcccagtcccgatcctccgcctccgtacggcggcaaccgttgattgaaatgctgcgacggctgctgctgctgttgctgctgatgctgatgctgatgttgcgggttatgcggatagtagtagttaaggccaggctgattgtgcagtcccgggaagtagctgttgtagttattatacatcggcgtcacttgggacattttcggtgccgaactcgagcggtgcattccgcctcctggatggctactattgttgttgatgacgttgttgttgctgatcgcagaggggggagtgacaggcggcgccgcggacgaaacagccacactgctgctattgacagctggcgtgatgggagtggccctaaaaaaacaacgaatatgtgcatatgtctgattaaatgtgggtttctgtttagatatctctataaattagaccaaatcataaagaaatattctagtatcaagaaaatatttataacaaagtaaattatatatataaacattggtcagtcttcaacttctgagtgaaattttaagattaacttggatatcggcaagatcctggtaggtcatttggctccacctattagtgttgcgatggtaaatattggtcaaacataaaagttatgctttcttagtaccaaaataaatcaaataaagtaaatttggaaactaaatcaacttgttattgcaacatacggtttgtcatcctccgggtttttggcagcgcccaggatgcgcagcctggcctcggcgtactcctgttctcgctgcttgagcgtcttgatgggctgcttcggtcgcattccgttaatgtcccgccgctcctccgcctgggcgggccgccgcagtatcttgacggtctggttgctggtgggcgtgcaataggtggccgcatcgtagtcattggtcgtcttgtgcagcaccatcatgacgggctgctgctgttgctcctgctgggtagatgagtcaacctctgctggcggtacttggggcttccgggcaatggtgatctgccgtggcgggggattcccgcccccgtttccaccaccgccgccaccatcgccgctgctcaggatttgtgaggactcctgtacgctctgcggccgttggagcaatttcattttgttgacaggtgggtcgctcgtctgcagctttgtttgcagagtcatagagagctgggcaagaaaaaataaaaaaaaaggggggggggtgttccattggttatcaggtatgatgctcaatcacatcgcgtggcgcactcaccccatcctcgtcgatttcctcccagttgtctaacacatcctcgccatgggacatcgttcgacaaagcacgttgctcgactgctgctagaatatatacttcgggtttcggttgcgttttcgctcactttcttctcttgcgcctgctgctgcagctcgcactcttactgatacatgattccttcgcacttttatcagacataagttatgcgtatgttggcaagcacacttttttcacgaaattcgcacccaagaaccctactgaaaaaacaaaaaacaatacgcaacaatttggcctgctgctaatgtcgttctcgttgttgttgttgttgctttccgtgggctagtcttcttcttgcttatcaggtcacagcaaaagtgacaggttttgttcgtttgcacgggaactggaaaagtggttgcactttactggcccaaccagcactgcgccagaagatacttggcccacccacctttgatagccacacttgttaaccatttatttttaacgctttattaataaaagaagtgtgtggccgccgcccgcgtttccctgcgaatgtcgatggaaatttggaatcgcagaatgtccgatagactgtgtaatcgaacgggaaatttaaaatttgttttgcatgtaattttctaacaatttattttatttataatgacaatgtcgtgcagagcaaactttaagttataaagcttgaaacgctaaaaagaagaatgaacattctgtttaatatttcgattgaccatgtcatactaatgactgcaatcgatagctgaatgttaagccaatgttaggtgtatgttttgttaacatgataagcaaatcagctgttccctctgcaattttggaacagctaatgaaatatttgaaatagataagaggcactattgatcatggaaattataataccgcgctattcggaatcacacagcattatcataggtcagcaaccgcgcagcaagcagatcaccaagcgatagcgttcatcaggaagccagcgatcttcaagcacgtgcatttcgttcagaagctgacggaatttctcggcgtgtttacgtaaatagttaaaattcagcaatggaggaggtcgaaatcagcacagaaaagaaatccaatcccgtaaagtcatttattgcgggcggcgtgggaggcatgtgcaatgtgctcgttggccatccattggacacaataaaggtgagcttcaaaactgtgtttacaaatggaaacgatgtaatgctttaagttccactttaggtccgtctccaaaccatgcccacacctccacctggacagccgccgagatacaagggagtcatagattgtgccgccaggacatttcgttatgagggttttcgcggattctacagaggaatatccgctccacttgtgggagtaacacccatctatgccgtggactttgccgtctatgcggcgggtaaacgattgttccaaacggatgaccacattaggctcacctacccacaaatcttcgccgcgggagccttggccgga

SEQ ID NO: 18758 - DNA, 5937 bp, DROSOPHILA
ttttattaataaagcgttaaaaataaatggttaacaagtgtggctatcaaaggtgggtgggccaagtatcttctggcgcagtgctggttgggccagtaaagtgcaaccacttttccagttcccgtgcaaacgaacaaaacctgtcacttttgctgtgacctgataagcaagaagaagactagcccacggaaagcaacaacaacaacaacgagaacgacattagcagcaggccaaattgttgcgtattgttttttgttttttcagtagggttcttgggtgcgaatttcgtgaaaaaagtgtgcttgccaacatacgcataacttatgtctgataaaagtgcgaaggaatcatgtatcagtaagagtgcgagctgcagcagcaggcgcaagagaagaaagtgagcgaaaacgcaaccgaaacccgaagtatatattctagcagcagtcgagcaacgtgctttgtcgaacgatgtcccatggcgaggatgtgttagacaactgggaggaaatcgacgaggatgggctctctatgactctgcaaacaaagctgcagacgagcgacccacctgtcaacaaaatgaaattgctccaacggccgcagagcgtacaggagtcctcacaaatcctgagcagcggcgatggtggcggcggtggtggaaacgggggcgggaatcccccgccacggcagatcaccattgcccggaagccccaagtaccgccagcagaggttgactcatctacccagcaggagcaacagcagcagcccgtcatgatggtgctgcacaagacgaccaatgactacgatgcggccacctattgcacgcccaccagcaaccagaccgtcaagatactgcggcggcccgcccaggcggaggagcggcgggacattaacggaatgcgaccgaagcagcccatcaagacgctcaagcagcgagaacaggagtacgccgaggccaggctgcgcatcctgggcgctgccaaaaacccggaggatgacaaaccggccactcccatcacgccagctgtcaatagcagcagtgtggctgtttcgtccgcggcgccgcctgtcactcccccctctgcgatcagcaacaacaacgtcatcaacaacaatagtagccatccaggaggcggaatgcaccgctcgagttcggcaccgaaaatgtcccaagtgacgccgatgtataataactacaacagctacttcccgggactgcacaatcagcctggccttaactactactatccgcataacccgcaacatcagcatcagcatcagcagcaacagcagcagcagccgtcgcagcatttcaatcaacggttgccgccgtacggaggcggaggatcgggactgggcggtgttgggatgcaagctcaggcgccgccccagtcgtcgcccaatccgcagcagagctggtcacctgttgtgggcggatcagtgtccgccgccctcctgcgccaacagtcgctgcagtcgccacagcagcaccagcagcagcatcagcagcagcaccagcatcagcagcagcatcagaatcatcaggcgcagcagctcggccagcatccgcatccgttcaacgacctagtcctgcgcctgcccaagggtccctgtccgaatggctccattggctttcagatgcgccgcggaattatgtcgcatcgcgttctggtcattggcagcggcggtcgggagcacgcgatctgctggaagttgtcgcaatctccgaaggtggcccaaatatacgcactgccgggtagccatggcatccagctggtggagaagtgccggaatctggatgccaagaccttggatcctaaggatttcgaggccattgctaaatggagcaaggagaaccagatagccctagtggttgtgggacccgaagatcccttggctttgggtttgggcgatgtgctgcagagcgctggaattccctgctttggacccggcaagcaaggtgcccaaatcgaggcggacaagaagtgggccaaggactttatgctgcgccatgggattcccacagcgcgttacgaaagtttcacagacaccgaaaaggccaaggcattcataagaagcgctccgtatccagctctggtggtgaaagctgctggattggccgccggaaagggcgtggtggtggccgccaatgcgaaggaggcctgccaggcggtggacgagatcctgggagatctgaaatacggtcaggctggcgccacgctggtggtggaggagctactggagggcgaagaggtttccgttctggccttcaccgatggcaaaagtgtgcgtgccatgctgccagcgcaggatcacaagcgactgggcaatggcgatactggaccaaacaccggcggcatgggcgcctactgcccttgtccgttgatcagccagccagcactggaactggtgcaaaaggccgtgctggagcgggctgtgcagggtctgatcaaggagaggatcaactaccagggtgtactctatgcgggactcatgctgacacgcgatggtccccgtgtgctggagtttaactgccggtttggagatcccgagacccaggtgattctgccgctgctcgaaagcgatctgttcgatgtgatggaggcttgttgcagcggaaagctggacaagattcccctgcaatggcgcaatggagtgagtgccgttggtgtgatcctggccagtgctggctatccggagacctccacaaagggttgcatcatatcgggacttccggctgccaatacacccacccaactggtctttcacagcggccttgccgtgaatgcacaaaaggaagccctaaccaatggcggtcgcgtcctcatcgcgatcgctctggacggcagcttgaaggaggctgctgcgaaggcaaccaaattggctggcagcatcagtttttcgggctctggagctcagtaccgaacggacattgcccagaaggcgttcaaaattgccagtgccagcaccccggggttgagttacaaggacagcggagtggacatcgatgctggagatgcactggtgcaacgcatcaagcccttgtctcggggtacccagcgcccgggcgtgattggcggcttgggtggatttggaggactgttccgtttgaaggaactcacctacaaggagccagtcattgctgaggccactcagggagtcggagccaagatccatcttgccctgacgcacgaattgtatgaaaatgtgggctacgacctgtttgccttggctgctaatgatgtcctggaagtgggtgccgagccggtcgcctttctggactacattgcctgtggcaagctgcaagttccattggccgcccagttggtcaagggaatggctgatggctgccgggatgcgcggtgcgccttagtgggtggtgagactgcagagatgccttctctatatgctcccggtcaacacgacatggctggctattgtgttggcatagtggagcagtctcgaatcctgccccgtttcgatctttaccagccgggtgacttactcatcggtctgccatcatctgggcttcattgcgccggcttcaatgaaatactcacccagttggcggcatccaaagtgaatctcagagagcgttctcccgtggacggaggcgacgatgggctgaccttggcccatgtcttagccacgcccacccaactgtatgtccagcagctgttgcctcatcttcagaaaggagatgagatcaagtcggtggctcacgtgacccatggtctgctaaacgatatcctccgtctgcttcccgatggatttgagacaacgctggatttcggtgccgtcccagtgcccaaaatctttggttggctggccggaaagctaaagctgagtgcccaaacaattctagagcggcacaactgcggcattggcatggttctgatcctgcctcagtcaagtcagctgtggcgaacgtcccttccgggagccaaagtactgggcgtcctgcaacggcggtcaaaggttagtggatcacctgtccaggtgcgcaactttgtggagcaactggagaaggtggcctcgccgttcggtggtctcggcgatcgggaattgcccgaagagctcaagaaactgccttccaactcggatttatcagctcctcgcgaggaatgctttgaaaacgcagctggacgtcggctcacgcgcatacccacccactacaaggaccccatactcatcctgggcaccgatggagtgggcaccaagctgaaaatagcgcagcaaacgaatcgcaacacgagcgtgggtatcgatttggtggccatgtgcgtcaacgacatcctctgcaatggagccgagccaatcagtttctcaagctactatgcctgcgggcactggcaggagcagttggccaaggaggttcactccggggtccaagagggtgccaggcaggcgaacagcagtttcattgactcacatagtgccgctctgccgctcctgtacgaaccccaggtctatgatctggctggtttcgccttgggcatagcagaacacaccggaattctaccccttttggatgaaatccagcccggagatgtgctcatcggcttaccttcgtctggcgtccacagcaacggatttagtttggttcacgccgttttgaagcgagtgggcttgggtctgcatgacaaggcgccctttagtgataagacgctgggcgaggagctgctggtgcccaccaagatctatgtcaaggcattgtccactctgctgtcccgcggaaaacacggcatcaaggcactagcccacatcacaggaggaggcctgagcgagaatataccgcgagtattgcgtaaggatttggccgtgcgcctggatgccaataagttccagcttccgcccgttttcgcctggcttgcagcggccggaaatatcagctccactgagctgcagcgcacatataactgcggcttggggatggttctggtggtggccccgacggaagtcgaggacgttcttaaggagctgcgttatccgcaaagagcagctgtggtcggcgaggtggtggcacgcaaggatccgaagaagtcgcaggtggtggtccagaactttgaggcatcattggccaggacacagaagatgctctcgcagcgtcggaaacgagttgctgttctcatttcgggaacgggcagcaacctgcaagcactaattgatgcaacgcgcgactcggcacagggtatccatgccgatgttgtgctggtaatcagcaataagactggtgttctgggtctgcagcgagccacgcaagccggaataccttcgttggtcatctcccacaaggatttcgctagccgagaggtctatgatgcggaacttacgcgaaatctgaaggcggctcgtgtggatttgatctgccttgccggcttcatgcgtgtcctgagtgctccattcgttcgagagtggcgtggacggctcgtcaatatccatccctcgctgctgcccaagtatcctggtctgcatgtccagaagcaggccttggaggcgggcgaaaaggagtccggctgcacggttcacttcgtggacgagggtgtggacacgggagcgatcattgttcaggctgctgttcccattttgcccgatgacgacgaggattcgctgacccaacgcatccacaaggctgagcactgggcttttccaagggcattagcaatgttggtcaacggaacagctctcatttctccggaagtcagcagtcagtaaatgccagcttgtgaaacctgacaatttaaatataacaagcagggatgagtttatcttactcgaagactttttgtcaaattagttataattataatcttgaacattcagcgataatttgacgttaataagttgtatagcaatttttataggtttaggctgcgtttctttttatataaaaactacaaaaatatattaataaacttcaagtttgattaaaaaaatcgc

SEQ ID NO: 18759 - protein, 1747 aa, DROSOPHILA
MSHGEDVLDNWEEIDEDGLSMTLQTKLQTSDPPVNKMKLLQRPQSVQESSQILSSGDGGGGGGNGGGNPPPRQITIARKPQVPPAEVDSSTQQEQQQQPVMMVLHKTTNDYDAATYCTPTSNQTVKILRRPAQAEERRDINGMRPKQPIKTLKQREQEYAEARLRILGAAKNPEDDKPATPITPAVNSSSVAVSSAAPPVTPPSAISNNNVINNNSSHPGGGMHRSSSAPKMSQVTPMYNNYNSYFPGLHNQPGLNYYYPHNPQHQHQHQQQQQQQPSQHFNQRLPPYGGGGSGLGGVGMQAQAPPQSSPNPQQSWSPVVGGSVSAALLRQQSLQSPQQHQQQHQQQHQHQQQHQNHQAQQLGQHPHPFNDLVLRLPKGPCPNGSIGFQMRRGIMSHRVLVIGSGGREHAICWKLSQSPKVAQIYALPGSHGIQLVEKCRNLDAKTLDPKDFEAIAKWSKENQIALVVVGPEDPLALGLGDVLQSAGIPCFGPGKQGAQIEADKKWAKDFMLRHGIPTARYESFTDTEKAKAFIRSAPYPALVVKAAGLAAGKGVVVAANAKEACQAVDEILGDLKYGQAGATLVVEELLEGEEVSVLAFTDGKSVRAMLPAQDHKRLGNGDTGPNTGGMGAYCPCPLISQPALELVQKAVLERAVQGLIKERINYQGVLYAGLMLTRDGPRVLEFNCRFGDPETQVILPLLESDLFDVMEACCSGKLDKIPLQWRNGVSAVGVILASAGYPETSTKGCIISGLPAANTPTQLVFHSGLAVNAQKEALTNGGRVLIAIALDGSLKEAAAKATKLAGSISFSGSGAQYRTDIAQKAFKIASASTPGLSYKDSGVDIDAGDALVQRIKPLSRGTQRPGVIGGLGGFGGLFRLKELTYKEPVIAEATQGVGAKIHLALTHELYENVGYDLFALAANDVLEVGAEPVAFLDYIACGKLQVPLAAQLVKGMADGCRDARCALVGGETAEMPSLYAPGQHDMAGYCVGIVEQSRILPRFDLYQPGDLLIGLPSSGLHCAGFNEILTQLAASKVNLRERSPVDGGDDGLTLAHVLATPTQLYVQQLLPHLQKGDEIKSVAHVTHGLLNDILRLLPDGFETTLDFGAVPVPKIFGWLAGKLKLSAQTILERHNCGIGMVLILPQSSQLWRTSLPGAKVLGVLQRRSKVSGSPVQVRNFVEQLEKVASPFGGLGDRELPEELKKLPSNSDLSAPREECFENAAGRRLTRIPTHYKDPILILGTDGVGTKLKIAQQTNRNTSVGIDLVAMCVNDILCNGAEPISFSSYYACGHWQEQLAKEVHSGVQEGARQANSSFIDSHSAALPLLYEPQVYDLAGFALGIAEHTGILPLLDEIQPGDVLIGLPSSGVHSNGFSLVHAVLKRVGLGLHDKAPFSDKTLGEELLVPTKIYVKALSTLLSRGKHGIKALAHITGGGLSENIPRVLRKDLAVRLDANKFQLPPVFAWLAAAGNISSTELQRTYNCGLGMVLVVAPTEVEDVLKELRYPQRAAVVGEVVARKDPKKSQVVVQNFEASLARTQKMLSQRRKRVAVLISGTGSNLQALIDATRDSAQGIHADVVLVISNKTGVLGLQRATQAGIPSLVISHKDFASREVYDAELTRNLKAARVDLICLAGFMRVLSAPFVREWRGRLVNIHPSLLPKYPGLHVQKQALEAGEKESGCTVHFVDEGVDTGAIIVQAAVPILPDDDEDSLTQRIHKAEHWAFPRALAMLVNGTALISPEVSSQ

SEQ ID NO: 18760 - DNA, 6720 bp, DROSOPHILA; identical to SEQ ID NO: 18754

SEQ ID NO: 18761 - DNA, 1792 bp, DROSOPHILA
tgagctccgttcactccacttccattcgatccaagcattcccactcagagtctgggcaaaaagagctctggaatctatcatggcgcgttggtggccaattttgagcgttgtgtgcctctgccttgctgttgcacatggccaggacaagctggagggcgttgatgtggaggaggtgtgcgccgatcgtcccgcggatgagtacttccgcctggagaccgacggcgactgccgcgaggtgtacaggtgcgacagtgccggcgaagatggcacttggcgtttggcgccgattcgctgcgccggcggcctggcattcgatgttttgcgccaactttgcgattggaagtcgaatgtgaagtcctgcgatgtgctcgagagtaaatgtaccaagtcgggtttgaaagaaattcagtgtccttcgggtctggccttcgacgtgatcaagcagacctgcgactggaaggccaaggtgaccaattgcgacgagaaagagaagccgcgcaaggccaagcccatcctgaagacggatgagcccatctgtcccgagggtaagctgtcctgcggcgacggcgagtgcctggacaaggagctcttctgcaacggcaagtccgactgcaaggacgaatccgatgagaacgcctgctctgtcgatgaggatcccaaccgcgcccccgaatgcgatccgacgcagtgcgccctgcccgactgcttctgctcggcggacggaacccgcattcccggcggcattgagccccaacaggtgccccagatgatcacgatcaccttcaacggcgccgtcaacgtggacaacatcgacctgtacgaggacatcttcaacggacagcgccagaatcccaacggctgctccatcaagggcaccttcttcgtgtcccacaagtacaccaactactcggcggtgcaggaccttcatcgtcgcggacacgagatctccgtgttctcgctaacgcacaaggatgaccccaactactggaccggcggcagctacgacgactggctggccgagatggccggctcccgactgatcgtggagcgcttcgccaacatcaccgacggctccatcatcggcatgcgggcgccctacctccgcgtgggcggcaacaagcagttcgagatgatggccgatcagttcttcgtgtacgacgcctccatcaccgcctcccttggccgcgtgcccatttggccatacaccctgtacttccgcatgccgcacaagtgcaacggcaacgcgcacaactgcccatcgaggagccaccccgtgtgggagatggtcatgaacgagctggaccggcgcgacgatcccaccttcgacgagtccctgcccggttgccatatggtggactcctgctcaaacgtagccagcggcgaccagttcgcacgcctgctgcgccacaacttcaaccgccactacaatagcaaccgtgctccacttggactccacttccacgcttcgtggctgaagtcgaagaaggagtaccgcgacgagctgatcaaattcatcgaggagatgctcggccgcaacgacgtgttcttcgtgaccaacctgcaggtgatccagtggatgcagaaccccaccgagctgaactcgctgcgcgacttccaggagtggaaggagaagtgcgacgtcaagggccagccctactgctctctgcccaacgcgtgtcccctgaccaccagggagctgcccggcgagacgctgcgtctcttcacgtgcatggagtgccccaacaactacccctggatcctggatcccaccggcgatggcttctccgtttaa

SEQ ID NO: 18762 - protein, 570 aa, DROSOPHILA
MARWWPILSVVCLCLAVAHGQDKLEGVDVEEVCADRPADEYFRLETDGDCREVYRCDSAGEDGTWRLAPIRCAGGLAFDVLRQLCDWKSNVKSCDVLESKCTKSGLKEIQCPSGLAFDVIKQTCDWKAKVTNCDEKEKPRKAKPILKTDEPICPEGKLSCGDGECLDKELFCNGKSDCKDESDENACSVDEDPNRAPECDPTQCALPDCFCSADGTRIPGGIEPQQVPQMITITFNGAVNVDNIDLYEDIFNGQRQNPNGCSIKGTFFVSHKYTNYSAVQDLHRRGHEISVFSLTHKDDPNYWTGGSYDDWLAEMAGSRLIVERFANITDGSIIGMRAPYLRVGGNKQFEMMADQFFVYDASITASLGRVPIWPYTLYFRMPHKCNGNAHNCPSRSHPVWEMVMNELDRRDDPTFDESLPGCHMVDSCSNVASGDQFARLLRHNFNRHYNSNRAPLGLHFHASWLKSKKEYRDELIKFIEEMLGRNDVFFVTNLQVIQWMQNPTELNSLRDFQEWKEKCDVKGQPYCSLPNACPLTTRELPGETLRLFTCMECPNNYPWILDPTGDGFSV

SEQ ID NO: 18763 - DNA, 3151 bp, DROSOPHILA
gacctaattttttatgttgtattgttttcgaaagaccagagtatatgcaaataacctaattaaaatttaactaatattatcaatttcttaagttcatgtaaaaacttatatcgaatatccaagttacctttacaaatactagtataaatgacaataaactggtatcaaatttttctcggtgaacttcctctaacaaagtcagcggagtcaaatttgtaagtgaaatcatgcaccgagtgtggaggcactcgccttatcaggcatgttcaattaattaaatactcctccaggcgtctgcacgtgaaggagcacttcgagaagcgtttgtagaatgcactggcaaactgaagatcgtcatcttcaagtgacagactgggtggggaagaaaagccgtcaaacattcgattgtgaaaccattcattcgtttaattttactatttaagcagtgcagttattgctagtcactgcagaaattaatcatgccactgagcctaatctgtgatgttcctttccttccctttgagtaagccacttaaaatgttgcggtgttatcaatttgtttttaatgtttttcttttatgtaaaattataactgcattatcaaaaactaaaatattacgttagtagaagattgcaagcaaaggtgacccaaacagtgaactacacctttgaaaaaatatttaacacttgctttgaataattacgaaaaagaactagtttcttgggatattattgctttttaagctactcccataattgtttatagttcgattatttcagcaagccttgatagtcaaattaaattataaatttttagtcatagtgctttactatagaggtgaaagattaaaaatgtattttgaaactgtcatttttttgaaagtaacgtaattatgaaatagagtagccacaaagtttgaatttgtcatacttcatacgcatacgttcacactgacagaatatatcgcttggatttaagaaaaatcgtgctaagcgacagtcacactcccctccgccatatttcttttcttcgtttccggtaggtgtgtgtactccgcatttttcgacttcaatttaacttttgccgaaatatcagtgaattagcgccttaaattatgtaaaatatcatagttaagagttagatctacgggggtagcgaattattgattttccaattgaacttgaaaaatcaataccaactgacccccgctgagacacatcgctgagcctttgaaccggcaccagatgttttcccttagcataattgatactatttgcaaagcaattacctaacctcgtgttctccacttgcttccccacagattaaaatgcccgaactgaccgaaatcaagagcgaggctgcgccctccacctccgctgaggcgaaacccgaggacgtccgcgttgaggatgatggcagtgatagcgactccgatggtggcatgcctggtctggaggaggctgtagcggccaccacacagctgggtggaggtgccaccggtctgcccatcgacctcgtctcaaaggccaagcaatcgcgcggcgagaaaaaggccaggaagatcatgctgaagctgggacttaagcagatccagggcgtcaaccgggtgacgatcaggaagtcgaagaacatcctgttcgtgatcaacaacccagatgtgtacaagaacccccacagcgacacctacatcgtgttcggtgaggccaagatcgaggatctgtcgcaacaggcccaggtggctgccgccgagaagttcaaggccccggaggctgctggcgctgcagacagcgtgggcgccaccacatcggtggcccccattgccgaggaagacgaggaggatgtcgatgacaccggcgtggatgagaaggatatcgagctggtcatcacgcaggccaacacgacgagggccaaggcgatcaaggctctgaagaacaacaacaatgacatcgtcaacgccatcatggagcttactatgctttagagcgggcttcagcgttagctgcactcctgattttgttgtttacccgcctttcgataatactgacccaaatgttgtgcatgcccctcaaggggcagcatgttacaccagtcgaacatttaattatatttcaaaagattgcgtcttaataaaaatggatttatttcaaatcaaatacgattgcgtgtatttttcgactagtttcggttttccactaggtggtgtgggtgtctttacttgccttgctaaccgaattcgattaagtatacattgaggttccaggttaagtactttgagattagggactggcacataagggattctattctgtattagctattaatgttcaggttgcagccagcttgaggacgcgggcctgactacgcgaggagaggcgaatatccgctggactctgcatccagggttcgccatccgcctgcattggcacggtctccttgacttgtagctaaaaaaaagattgttggttaacaaatattcggttccatcactgcagggcttacccttatttgcttggcttggccaattcgcactggtttgcttatattgcactgcagttgggcaatgtggaaagaggaaacaatgccgaacacctccatcataccatcggagatggagtttacaatgcgcacttcaccattggcgttgcttagctcgcagagcttgcagccagctccccatgagtcgatatttaggaacaccagcgcctgcagctcaggcagttgcactggcttgttgtccagatacaaggtcagcttttcctcgatgtgttcgcagccaggttgcatcacctgttgcgttccgaaggtaaagtacagcagctgacgagatggatacattagttaacgttaagtaagcacactagattgtagcctaccttattgaatattcgactgctgagcagatagaatcgagattcgcgcgtcttgtggaagttgtaagtgatgtacgcatccacacctacactgaaatagttgtacacatgaatcgtcttcgtgggatgcctctgaataggcagtcgatagtgcagtttctctatttgcaggtcaaagcggtcgagattcacggaacgtgctcgccgtatgctcctaaggatcttcaccgggtcgagaacagagggcggctctgctccccagcccagaactcgcgacaaa

SEQ ID NO: 18764 - DNA, 866 bp, DROSOPHILA
tcacactcccctccgccatatttcttttcttcgtttcattaaaatgcccgaactgaccgaaatcaagagcgaggctgcgccctccacctccgctgaggcgaaacccgaggacgtccgcgttgaggatgatggcagtgatagcgactccgatggtggcatgcctggtctggaggaggctgtagcggccaccacacagctgggtggaggtgccaccggtctgcccatcgacctcgtctcaaaggccaagcaatcgcgcggcgagaaaaaggccaggaagatcatgctgaagctgggacttaagcagatccagggcgtcaaccgggtgacgatcaggaagtcgaagaacatcctgttcgtgatcaacaacccagatgtgtacaagaacccccacagcgacacctacatcgtgttcggtgaggccaagatcgaggatctgtcgcaacaggcccaggtggctgccgccgagaagttcaaggccccggaggctgctggcgctgcagacagcgtgggcgccaccacatcggtggcccccattgccgaggaagacgaggaggatgtcgatgacaccggcgtggatgagaaggatatcgagctggtcatcacgcaggccaacacgacgagggccaaggcgatcaaggctctgaagaacaacaacaatgacatcgtcaacgccatcatggagcttactatgctttagagcgggcttcagcgttagctgcactcctgattttgttgtttacccgcctttcgataatactgacccaaatgttgtgcatgcccctcaaggggcagcatgttacaccagtcgaacatttaattatatttcaaaagattgcgtcttaataaaaatggatttatttcaaatc

SEQ ID NO: 18765 - protein, 217 aa, DROSOPHILA
MPELTEIKSEAAPSTSAEAKPEDVRVEDDGSDSDSDGGMPGLEEAVAATTQLGGGATGLPIDLVSKAKQSRGEKKARKIMLKLGLKQIQGVNRVTIRKSKNILFVINNPDVYKNPHSDTYIVFGEAKIEDLSQQAQVAAAEKFKAPEAAGAADSVGATTSVAPIAEEDEEDVDDTGVDEKDIELVITQANTTRAKAIKALKNNNNDIVNAIMELTML

SEQ ID NO: 18766 - DNA, 2354 bp, DROSOPHILA
gcaggtaaccgcggagcagggacaacacattggcacccgtactgctgcccgacttggtgttggcgatcacaataagcggctcccagttctcaatgtctggcggcgtaatgctggccaagtggagccgcatcgagtctctggttcgggcggccacaaagctgtatggcgggaagatcatgtccttgaactcgcccaagtcgcaggcttccatggagtcagcgcgagtgtagcaatcgttatgatagcaccgctgacaccatgcacatcgccatccgtataatcctggatcggtgctgacatggtgatccacctcctcgttgcagtcggcacaatgcactcccataggcagattgccatgcacccacaagtgccgcacggaggactcgttgcgcaaccacttgtccttgcaccggtactccctgtccgccctccgctggcaagggggcgtggcatgggtgcacaggccgcagcagtcgcaaaagagtcctgcggagggggttagcaggatctcgcacacattgcagaagcaggcctagaatgaagggcatgtatcctatggtatctctttcgcggcaagtgaatccgctcacctgttccaacacttttattgatttccagctgtgacgtgttttgaaggtgctcacaaagtcctcggaaagcaggctgcggcagaaggcaaagaggatactgagggccagcagggatcctatcagcgcctccacgctcagctcaatagtgcctatgtccatggtccacgcagataaggcccaattacgctaaatatcctggtaatttggcatattcacaaatcgtttgtttttgccccatcgaccagtgtgaccgcttcaaagacaacaaaaaacaccttcgacctcaattaaaaacacttttcaagaataagcactaatgcgtaatttcgataggcggagtgacactagtatttagattcaggacgtttccaacactgcttgtcaactcaacctaacaaatcagctgtgagtttggcgtgtggaaaaagtttgattgggaacaaatcggacgtctttaacaaaaatctagccaacatgaaggttatctacaacaccctgttcaagcgcacctccacctacgccgtggccatcatcgcgtcggcctttttcttcgagcgcgctctcgatgtcacgtcggttgcgattttcgagggcatcaacaaaggcgtaagtataatcctgttatgtaagcaaagtttcctggccaaatctcaagatttccccgctttgcagaaactctggaaggacatcaagggcaaatacgaataaattaacatgatttgttgtaattagcaataataatcaacgtttattctaaacgaaacgataactaagtgtggtttcttttggttattttgatttgggtgcttccagtgcgtcttccgacacctcccagggcttctcatgcctcttctcatcccagggctgctcgttgggcaggcgagagggttccttgaaggacaccccattatcctgaatggtttgaagcagcttctgcagcttgctacccggtaccgcctccacgttgcaggtcatttccgtgatcccagactgcaggcagcgctgtgcgagcactctgccgagatttacaaacgcagatgtgtcgttggtcttgtacaactgctgtttaatggcccattccgaggtgctggcactcaggatggttccattctcaaagtgcttgacatcgccgctgacatagcggccgctggtgttgatttccaaagtgtgccagtaggaacgacctggtttctccagatgatagcctaccggcttgtaggcaatgcgtaatctttccaagttccgtggattccggttgatcacgtattcagtgctggcttgcggggttgttaattccttgattttgtgcagtacacgggcggaggtgagggggcgagcactgcgagacatttttgcgatggaaacccgaaaaaagcgcgcgtttaattgatatttatgtggaaattacaaaaccacgataaaatattttgagctgcctttagtgttaccagactgccagaactgagtgtgggtaaacgatttattggtgctgtaaaatgtccaaacatcagttggatgtaaatggcaaaaaacagctgtttcagattggtttatcctcaaatttctagtttctgtagattctattggccttggaactttcgccgctccccaccacaataacgcccccttcagacatgcgccaagtgaacacggcgcctcctgcccgtacgcccatgagattgctgctgaggtgaagaagtggcggttgggtgaagaagcaagcagtgcgcgcgtcccaaattgcaaagtgatttttattcggcc

SEQ ID NO: 18767 - DNA, 288 bp, DROSOPHILA
tttggcgtgtggaaaaagtttgattgggaacaaatcggacgtctttaacaaaaatctagccaacatgaaggttatctacaacaccctgttcaagcgcacctccacctacgccgtggccatcatcgcgtcggcctttttcttcgagcgcgctctcgatgtcacgtcggttgcgattttcgagggcatcaacaaaggcaaactctggaaggacatcaagggcaaatacgaataaattaacatgatttgttgtaattagcaataataatcaacgtttattctaaacgaaac

SEQ ID NO: 18768 - protein, 55 aa, DROSOPHILA
MKVIYNTLFKRTSTYAVAIIASAFFFERALDVTSVAIFEGINKGKLWKDIKGKYE

SEQ ID NO: 18769 - DNA, 5351 bp, DROSOPHILA
catcatcgcgtcggcctttttcttcgagcgcgctctcgatgtcacgtcggttgcgattttcgagggcatcaacaaaggcgtaagtataatcctgttatgtaagcaaagtttcctggccaaatctcaagatttccccgctttgcagaaactctggaaggacatcaagggcaaatacgaataaattaacatgatttgttgtaattagcaataataatcaacgtttattctaaacgaaacgataactaagtgtggtttcttttggttattttgatttgggtgcttccagtgcgtcttccgacacctcccagggcttctcatgcctcttctcatcccagggctgctcgttgggcaggcgagagggttccttgaaggacaccccattatcctgaatggtttgaagcagcttctgcagcttgctacccggtaccgcctccacgttgcaggtcatttccgtgatcccagactgcaggcagcgctgtgcgagcactctgccgagatttacaaacgcagatgtgtcgttggtcttgtacaactgctgtttaatggcccattccgaggtgctggcactcaggatggttccattctcaaagtgcttgacatcgccgctgacatagcggccgctggtgttgatttccaaagtgtgccagtaggaacgacctggtttctccagatgatagcctaccggcttgtaggcaatgcgtaatctttccaagttccgtggattccggttgatcacgtattcagtgctggcttgcggggttgttaattccttgattttgtgcagtacacgggcggaggtgagggggcgagcactgcgagacatttttgcgatggaaacccgaaaaaagcgcgcgtttaattgatatttatgtggaaattacaaaaccacgataaaatattttgagctgcctttagtgttaccagactgccagaactgagtgtgggtaaacgatttattggtgctgtaaaatgtccaaacatcagttggatgtaaatggcaaaaaacagctgtttcagattggtttatcctcaaatttctagtttctgtagattctattggccttggaactttcgccgctccccaccacaataacgcccccttcagacatgcgccaagtgaacacggcgcctcctgcccgtacgcccatgagattgctgctgaggtgaagaagtggcggttgggtgaagaagcaagcagtgcgcgcgtcccaaattgcaaagtgatttttattcggcccacaaaagccggttatgtaaagaccgtataggccaaatatctacacacatatcgtactcgttaaattaagaacttgtagaaatgtttatggtcgtgtgttccaatttaaggcgtcccgggcacgtgggcgccgcatctgcagcgcgaaatataaactggctgatcagcgagggatatacaccgccgatccgggcaatggcgcgggtaagcttaattatagcaattaaccctgaaatttttcacctaaatacacgcaataaatataaacaaaatcaggccatcgctttctccttttttcaccacgttccagaactgaccaccagttccaatcccaccaatggtggcgggaaaatttaaattagccattgctaaaaatgtataggaatcgatttaaaaggtgcttttactacttaagaaaaatgcctttttatgagcacttcattttaaatgcactaaagacacagttaattgtggaattatcattttaagctgttcaactcttggaatataagagtactttatttttaaatatttgttgatgagtttctacgtccgttagcatatacctaacaaaggtaaacaaaggcatctattatctacaaaaataatccagattgagcaactgataagaacactgttcaaactcaccaccttgcacaaagcaccaagatcccaaacccaccacgctgggcgcacaaatttaaatgcttatcatatcaaaccaaaccagcgtgatcattatacacggaagcgctcggctaagcacttttgctaactgataaagatagtttcacaatctctagtcaaccacttgactgttgcctaactacttctactttggggccctttccttcgctctttttcgctttgtctctctttgtttgggggcaaacgccctcgttttgtgcgtgcttttgcttttgagcttgttgcacttggcgatttcagtggagacgaaaatcagttacgcacgaaagttcccgccgtccggatgcgaaagattctcaggtgcccaatgtaatacatctcgaaccgagtgaaggtcgccatagatctctgacgacgtgagtttttcctgcattattattcgcgcgaaaatgcagtgcggtgtctcgcagcaacagattttcagtgcgcatgctgctaacctgtggcacaaaggcggcttttgcgggggttgttgggttagtcgaacagttgacaaaggaataattcaaatagaaatcaaaatgcgtaacactgagaggcgtttggctagacacaagcacaaaaggaaactattcttgggcccgataagattaaagactatccatggtcagcagtgggatttgttgtgtgcactttgtggccgtcggtaattaaatttccgcccttatctcgtttccacagccatacgtccaagctccggaggcgcggccagtgcccgatgagcgctatccgggcagccagcaggataggaaggatatcgccacccagactgtgcggagcagcaagcccaaagacctgcgaccgccttcgccgccgacgccgtcccagaccctaaactcctcttcccttccgcccccaatgtccgaccaggatgctgatccctccctggatgtgcccaccggcgtggcgatgccctacaacatcgactggatattccctaggctgagaaacccctcgaagttctggtacgtggtcagccagttcgtcgtctccgccgttggaatcttcagcaaggttgtgctgagtgagtatctaaccggcagagccgaccttaccaaacaactggcccaaaggcacgtttatttttggccaagagatgcggcgtttgctcggagagcttatgcccctgaccgtgaatgcgaaaccgaatgcgtcagcgaatctctcgattgataaacgatgtgtgcggatgctggcgatctcgttcaacgaggtcaaacgtgtgccgtgttgttaattggcgccccccgccacaattatgcaaatgatgaactttcgcctctctttttcgttttgctttgcagtgtttttgaataaaccccgcgtctataacagggagcgactgatccagctgataacgaagcgacccaagggcattcccctggtcaccgtgtccaaccactactcctgcttcgacgatcctgggctgtggggctgccttcccctgggaattgtctgcaatacctataaaattcgttggtcaatggccgctcacgacatttgcttcactaacaagctgcactcgctcttcttcatgtttggtaggtatttcatagcttatttcctggtttcaggagtccacaataaaccgaggcatcattctttccattcgcaggcaagtgcatacctgttgtgcgtggcatcggtgtctaccaggatgccatcaacctgtgcatcgagaaggccgcactgggccattggatccatgtgtttcccgaaggtaaggtgaacatggataaggaggagctgcgtctcaagtggggcgtgggcaggatcatctacgagtcgccaaagatccccataattctgcccatgtggcacgagggcatggacgatctgttgcccaatgtggagccctatgtgatacagcgtggtaagcaggtgacgctgaatgttggccagccattggacctcaacgactttattctggacctaaaaaaacgacaagtaccggagccaacggcgcggaagctcattacagacaaaatccaggaagcctttcgggtaatagtaaattatccaacttaaattattattttttaacatgcagtttctttttaccttacttttttttacaggacttgcgggcggagacagagaaattgcacagagagcgcaactagaacgtgatcatggatgagcatagacatttgtaataatatttatttgtatagtattaagcctaaaatgaaccctcgaagcccttttgatccatttattataattataattatttccgtgtattgcgactagttcttcaagatgtatttgctggataggaacattaagtaaatcagtgtgcattattagtataaatatacaattgaaactaatttgatccaaaggcaataaattgcataatataaaaaagagtatatcttcaaataaatgtgattaacaaacttgacaatggtgccaataatatcgttttggataatggggcaacgttaccagtcacacagctgtttaggaatccgttataatcggtgaccatgtggagttcttaaaaaacttgcagatggcttagatatgggagaccttttattgaacacaccgaaaagaaagcaactgctcaaggatggtccacccgtacccactaggtgtcaggtactcggacgtggagcctacggcaccgttttcaaagctatttacagaggtaggcactaaaacgaaattcgtttgtagataattttcaatatctttttttttagatcgctccgttgctgttaagataattcgagcccaggcagcctcaactttgcacaatgagtctcatttgctgaatctggagcacaggaacattgtacgccttcttaagctggagtctgcggcagatttcggcttggtcatcatggaatgtccgaggggacaaagtctgcagaggatcgttgacactttggctctaccactgatgcacagggtcttgtatgatacttttactttatcccccctaaatactttgtaattaatcattatcttcttagaataactctggatgtggttgctgctctgagatactgccattcccaaaacgtattacatctggatgtaaagccaaccaatatattggttgccctgggaacaaagtcttccataacttgcaattcctcgaagatcaaagtgaagcgaagctacatctgcaagctctgtgatttcggctcctccatcgagatgggcgaattttgtgcttggcaggagccaagcgtggccaaaggaaccctgagatacatgtctccagaagctctgcgatcggatacccttaccgaagcctccgatatttactccctgggcattacaatgtggcaactgcaagcgcgtagattgccctatcacacactcgattgcaatgagaccatagcctaccaggtggtcaagcacgaactgcgtccggacaactatcatcaac

SEQ ID NO: 18770 - DNA, 1738 bp, DROSOPHILA
aaaaacagctgtttcagattggtttatcctcaaatttctagtttctgtagattctattggccttggaactttcgccgctccccaccacaataacgcccccttcagacatgcgccaagtgaacacggcgcctcctgcccgtacgcccatgagattgctgctgaggtgaagaagtggcggttgggtgaagaagcaagcagtgcgcgcgtcccaaattgcaaagtgatttttattcggcccacaaaagccggttatgtaaagaccgtataggccaaatatctacacacatatcgtactcgttaaattaagaacttgtagaaatgtttatggtcgtgtgttccaatttaaggcgtcccgggcacgtgggcgccgcatctgcagcgcgaaatataaactggctgatcagcgagggatatacaccgccgatccgggcaatggcgcggccatacgtccaagctccggaggcgcggccagtgcccgatgagcgctatccgggcagccagcaggataggaaggatatcgccacccagactgtgcggagcagcaagcccaaagacctgcgaccgccttcgccgccgacgccgtcccagaccctaaactcctcttcccttccgcccccaatgtccgaccaggatgctgatccctccctggatgtgcccaccggcgtggcgatgccctacaacatcgactggatattccctaggctgagaaacccctcgaagttctggtacgtggtcagccagttcgtcgtctccgccgttggaatcttcagcaaggttgtgctgatgtttttgaataaaccccgcgtctataacagggagcgactgatccagctgataacgaagcgacccaagggcattcccctggtcaccgtgtccaaccactactcctgcttcgacgatcctgggctgtggggctgccttcccctgggaattgtctgcaatacctataaaattcgttggtcaatggccgctcacgacatttgcttcactaacaagctgcactcgctcttcttcatgtttggcaagtgcatacctgttgtgcgtggcatcggtgtctaccaggatgccatcaacctgtgcatcgagaaggccgcactgggccattggatccatgtgtttcccgaaggtaaggtgaacatggataaggaggagctgcgtctcaagtggggcgtgggcaggatcatctacgagtcgccaaagatccccataattctgcccatgtggcacgagggcatggacgatctgttgcccaatgtggagccctatgtgatacagcgtggtaagcaggtgacgctgaatgttggccagccattggacctcaacgactttattctggacctaaaaaaacgacaagtaccggagccaacggcgcggaagctcattacagacaaaatccaggaagcctttcgggacttgcgggcggagacagagaaattgcacagagagcgcaactagaacgtgatcatggatgagcatagacatttgtaataatatttatttgtatagtattaagcctaaaatgaaccctcgaagcccttttgatccatttattataattataattatttccgtgtattgcgactagttcttcaagatgtatttgctggataggaacattaagtaaatcagtgtgcattattagtataaatatacaattgaaactaatttgatccaaaggcaataaattgcataatataaaaaagagtatatcttcaaataaatgtgattaacaaacttg

SEQ ID NO: 18771 - protein, 376 aa, DROSOPHILA
MVVCSNLRRPGHVGAASAARNINWLISEGYTPPIRAMARPYVQAPEARPVPDERYPGSQQDRKDIATQTVRSSKPKDLRPPSPPTPSQTLNSSSLPPPMSDQDADPSLDVPTGVAMPYNIDWIFPRLRNPSKFWYVVSQFVVSAVGIFSKVVLMFLNKPRVYNRERLIQLITKRPKGIPLVTVSNHYSCFDDPGLWGCLPLGIVCNTYKIRWSMAAHDICFTNKLHSLFFMFGKCIPVVRGIGVYQDAINLCIEKAALGHWIHVFPEGKVNMDKEELRLKWGVGRIIYESPKIPIILPMWHEGMDDLLPNVEPYVIQRGKQVTLNVGQPLDLNDFILDLKKRQVPEPTARKLITDKIQEAFRDLRAETEKLHRERN

SEQ ID NO: 18772 - DNA, 3209 bp, DROSOPHILA
tcttcatgtttggtaggtatttcatagcttatttcctggtttcaggagtccacaataaaccgaggcatcattctttccattcgcaggcaagtgcatacctgttgtgcgtggcatcggtgtctaccaggatgccatcaacctgtgcatcgagaaggccgcactgggccattggatccatgtgtttcccgaaggtaaggtgaacatggataaggaggagctgcgtctcaagtggggcgtgggcaggatcatctacgagtcgccaaagatccccataattctgcccatgtggcacgagggcatggacgatctgttgcccaatgtggagccctatgtgatacagcgtggtaagcaggtgacgctgaatgttggccagccattggacctcaacgactttattctggacctaaaaaaacgacaagtaccggagccaacggcgcggaagctcattacagacaaaatccaggaagcctttcgggtaatagtaaattatccaacttaaattattattttttaacatgcagtttctttttaccttacttttttttacaggacttgcgggcggagacagagaaattgcacagagagcgcaactagaacgtgatcatggatgagcatagacatttgtaataatatttatttgtatagtattaagcctaaaatgaaccctcgaagcccttttgatccatttattataattataattatttccgtgtattgcgactagttcttcaagatgtatttgctggataggaacattaagtaaatcagtgtgcattattagtataaatatacaattgaaactaatttgatccaaaggcaataaattgcataatataaaaaagagtatatcttcaaataaatgtgattaacaaacttgacaatggtgccaataatatcgttttggataatggggcaacgttaccagtcacacagctgtttaggaatccgttataatcggtgaccatgtggagttcttaaaaaacttgcagatggcttagatatgggagaccttttattgaacacaccgaaaagaaagcaactgctcaaggatggtccacccgtacccactaggtgtcaggtactcggacgtggagcctacggcaccgttttcaaagctatttacagaggtaggcactaaaacgaaattcgtttgtagataattttcaatatctttttttttagatcgctccgttgctgttaagataattcgagcccaggcagcctcaactttgcacaatgagtctcatttgctgaatctggagcacaggaacattgtacgccttcttaagctggagtctgcggcagatttcggcttggtcatcatggaatgtccgaggggacaaagtctgcagaggatcgttgacactttggctctaccactgatgcacagggtcttgtatgatacttttactttatcccccctaaatactttgtaattaatcattatcttcttagaataactctggatgtggttgctgctctgagatactgccattcccaaaacgtattacatctggatgtaaagccaaccaatatattggttgccctgggaacaaagtcttccataacttgcaattcctcgaagatcaaagtgaagcgaagctacatctgcaagctctgtgatttcggctcctccatcgagatgggcgaattttgtgcttggcaggagccaagcgtggccaaaggaaccctgagatacatgtctccagaagctctgcgatcggatacccttaccgaagcctccgatatttactccctgggcattacaatgtggcaactgcaagcgcgtagattgccctatcacacactcgattgcaatgagaccatagcctaccaggtggtcaagcacgaactgcgtccggacaactatcatcaactaaagattctggctttagactcgcccattgactgcgattgggatttggcccatgaaagcaccgccaacgtgatctgcagaagggcaaatacctcggcgcgccgtaatctaagcctcgatccatcttacaccgtcggccgtgatctgaaaaagaagcgccaccggaaccgattagcactccactttgatagtccggcgccggagggcagtgcgtgctcggaaagcgcttactcccaattatacaagagctgttgggtcagcgccccggaattacgattgagttctatccagctgaagcatgagctggaattcattctctgtcatagcacctaggtgatagtctaagtgatcgtgtgtgtgtttgcattttatgttattgatttcgtagtacatacccgtatttatgtaagattttaccaacccgctgcgataaacgattttcgagaagcgtggcctctggttaggtcaataatccaattttctgtaacttctttttgtttattttgtactcgctacgctaagaaaatacatttataatgttcatacgagcttacgtctagattccctcctcacgatcataatgcgttctgttctatatagtgtaagtatgtatgtatatatgcttaggaaacgggctgctgcaatgaagtagtcggtggcagcagcccggaggagctaactacggttaaagaagagcttgtcattatcattatcattagctttaagaacgactgctatgtacagtttattgttatggttgtcgtctaatgttcgcttagaaaccggtatacatatatatatatgtatcgtatctttatatatatatatatatatatgcatcatatactgcatcgtaaacactttgaaatatttcacccttaaatgcaaatgttcaactgctgttgtgtctgaggagcactaatccggattagcttatgtggttaactctaaccaagtcctacgaatacactcgacttgtgcggaagactacagtcttggttcacctactacgtgaccatagctaatagtggtttgaattcagtttgaagtcattcaaaatgtcccattatacatatgtagttagtataacccgctgatttggatgctgcaaccgctgctctacaaaatatatgtggtatagagcagggcgagctgttcggtttttcgattttctatctcatagggggaacagttggcagtgccgcttacaaggtaaaacatcatccaaaaatttacaatatacataaatactcgtattcgtacgtacaaaacgtgcctgctcatcctggccatcatctcttaatgcttctgtaactctcgattcggttttgtt

SEQ ID NO: 18773 - DNA, 1095 bp, DROSOPHILA
atgggagaccttttattgaacacaccgaaaagaaagcaactgctcaaggatggtccacccgtacccactaggtgtcaggtactcggacgtggagcctacggcaccgttttcaaagctatttacagagatcgctccgttgctgttaagataattcgagcccaggcagcctcaactttgcacaatgagtctcatttgctgaatctggagcacaggaacattgtacgccttcttaagctggagtctgcggcagatttcggcttggtcatcatggaatgtccgaggggacaaagtctgcagaggatcgttgacactttggctctaccactgatgcacagggtcttaataactctggatgtggttgctgctctgagatactgccattcccaaaacgtattacatctggatgtaaagccaaccaatatattggttgccctgggaacaaagtcttccataacttgcaattcctcgaagatcaaagtgaagcgaagctacatctgcaagctctgtgatttcggctcctccatcgagatgggcgaattttgtgcttggcaggagccaagcgtggccaaaggaaccctgagatacatgtctccagaagctctgcgatcggatacccttaccgaagcctccgatatttactccctgggcattacaatgtggcaactgcaagcgcgtagattgccctatcacacactcgattgcaatgagaccatagcctaccaggtggtcaagcacgaactgcgtccggacaactatcatcaactaaagattctggctttagactcgcccattgactgcgattgggatttggcccatgaaagcaccgccaacgtgatctgcagaagggcaaatacctcggcgcgccgtaatctaagcctcgatccatcttacaccgtcggccgtgatctgaaaaagaagcgccaccggaaccgattagcactccactttgatagtccggcgccggagggcagtgcgtgctcggaaagcgcttactcccaattatacaagagctgttgggtcagcgccccggaattacgattgagttctatccagctgaagcatgagctggaattcattctctgtcatagcacctag

SEQ ID NO: 18774 - protein, 364 aa, DROSOPHILA
MGDLLLNTPKRKQLLKDGPPVPTRCQVLGRGAYGTVFKAIYRDRSVAVKIIRAQAASTLHNESHLLNLEHRNIVRLLKLESAADFGLVIMECPRGQSLQRIVDTLALPLMHRVLITLDVVAALRYCHSQNVLHLDVKPTNILVALGTKSSITCNSSKIKVKRSYICKLCDFGSSIEMGEFCAWQEPSVAKGTLRYMSPEALRSDTLTEASDIYSLGITMWQLQARRLPYHTLDCNETIAYQVVKHELRPDNYHQLKILALDSPIDCDWDLAHESTANVICRRANTSARRNLSLDPSYTVGRDLKKKRHRNRLALHFDSPAPEGSACSESAYSQLYKSCWVSAPELRLSSIQLKHELEFILCHST

SEQ ID NO: 18775 - DNA, 2801 bp, DROSOPHILA
gatacaagtgagtcccgctggcggagtgaaagcgtcatagccacttgtattatacttggcttaaggcattttatgcgaaacttgcgctttattgggttctccttttaacgctcaacttaaagcgataagcgaattgcaatttaggttcagtgtctgccctctatttcccctatcggtgcacttaaatgctgtgcgggagtgacactaaaagcctctccagtcggaagaccagcaggcggcattgcacatttacgatactaaatcacttaagcccgtttttgattagctttatttcaaggaatatggaaaaacattcaaggcttcctatataatataatatatttacttgaccgtttaacatgttggaaaactcgtttttacattgtgaagatcctttaaaggccttcaaacattcgaataggctttaataggcagcagtccactttaagcgagtaagcattttcctaccatcacatacctggatcacgaaccaactacccgaaactttatttttatgttaagtcgcttaaaaaattgcaagttggatatatgctagtctttcgaaatttaaattttcgcgcctagctaaaaaagaagtggcagcacacagttgtaacttggagagttggcatcctccgcacatcagctgtgatttgtttacattacgttttgctaagtgtcgtaattcgggaaaagtcgccaatttggagcaacctcttatgattattccaaaaatgtcgaggcatgctctgataggtacgttcaaaggtgttagccatcgggcgcagccaccaataaccaggaatctcgctcaggtggtggcactggcttcatcggtcgcaacctggctaaccatttgaccaaaaagggttacgatgtgacggtgatctcccgcatgccaggtgcgaagcgtatcacctggcacgagctggagaagaatggtattcccggatccgtaaacgccgtggtaaatgccacgggccagaacacattggatccaacgagacgctggactccaggattccagcagaatgtgtggaactcgcgaatcaactcctcaaaaactttggctcaggctattaagtcggctccccaggtctcatctttcgtgaatctatgcggtgtgagtcactataaaccctcggagtccaaggtttacaccgaggaggatcaggtgcaaggattcgactacatgtccaggttgtgcttggcctgggaggaggctgcacacactggtagtgagcaggattgtaaaaccgtaagtcaatactatagagcatctacaataggtataaaaaccgcttaatccttttcagaccatcctgcggtgtggcgctgttgtgggtcatggcgggggcatggttcagtccatgtggctgccctttaagtttggcgtaggaggaccattgggtaatggaaaccaaataatgccatggatacacctgcacgatctgtgcagcttgatacagtacatcatagagaaaccagtgccaggagtggtcaatgcggtggccccagaaataaccagcaatttggagtttagcaaagtaaaaatatcacagcttcttaatacaaacactataatatcttacgtttttgtcaggcctttgccaaagcacttcatcgcccgtgtatcttcggcgttccagagtttgttgtccaagccatctttggaccagagcgggcagctctggttttaagtggtgccaaggtcaagccacagaaagctctatcatccggatttaaatttcaatatcccagcgtcaaagaggctgtgacgcaactgaccctcaaaggataaccgaatctacactgaattctggttacacgtatgctttattataaagcagtctgtatattaaatagatgttagtaccaagcgcaaattaaaacgaatttctgcgatagggggatttatgaatcacgccctccgaaaatagacccatttaatttgtttactcattagtcttgtccaccagtatttcatcattattttggtaccacattaaatgtaatcattgacttaattcgatttataaaacgtgtataaactttaattgcctgaaggggaatcttttgcgaaaccaacatgtaatcttgtactgtaagctaaataaaagcgtgtagatacaaggggatttcacaagaattattcaacgtgtgcgaaaggtagataaagagataaatccgatcccttttgctgcgttacttgccaattaatataattgcaaccaaagctaaattaatagcaaaaaaaattaattgacttgcacacgctgtgaatacgctataaaaaccgacataatcataatcatacatcaatggctgatattttttttacctctcggtgggttctataaattggggacccatgtcggttggagaatcagtatcgttttttgagctgccgaaccaaaaatgctttcaaaatcgcagctattactgctcgttgtcgggttctgcctggtatgatgatgtgttatcacgcgactctagcccggctataactaatctattaacagaatgcagccgtctcggctgacgtggactgcagcaagcggccatcgtttgtcaatcccaaaacctgttgtccaatgccggacttcgtgaccgccgagttgaagcaaaagtgcatcaagtttgacatgactccgccgccgccgccggatggggaagcaagtggatcctttgagagcaagcgtcgtcatcatcatccgcatcccccaccagttagtaccactggaatattgttcttgatcatgataacttgattacccacaatccgttcagtgcttcttctc

SEQ ID NO: 18776 - DNA, 938 bp, DROSOPHILA
gaaaagtcgccaatttggagcaacctcttatgattattccaaaaatgtcgaggcatgctctgataggtggtggcactggcttcatcggtcgcaacctggctaaccatttgaccaaaaagggttacgatgtgacggtgatctcccgcatgccaggtgcgaagcgtatcacctggcacgagctggagaagaatggtattcccggatccgtaaacgccgtggtaaatgccacgggccagaacacattggatccaacgagacgctggactccaggattccagcagaatgtgtggaactcgcgaatcaactcctcaaaaactttggctcaggctattaagtcggctccccaggtctcatctttcgtgaatctatgcggtgtgagtcactataaaccctcggagtccaaggtttacaccgaggaggatcaggtgcaaggattcgactacatgtccaggttgtgcttggcctgggaggaggctgcacacactggtagtgagcaggattgtaaaaccaccatcctgcggtgtggcgctgttgtgggtcatggcgggggcatggttcagtccatgtggctgccctttaagtttggcgtaggaggaccattgggtaatggaaaccaaataatgccatggatacacctgcacgatctgtgcagcttgatacagtacatcatagagaaaccagtgccaggagtggtcaatgcggtggccccagaaataaccagcaatttggagtttagcaaagcctttgccaaagcacttcatcgcccgtgtatcttcggcgttccagagtttgttgtccaagccatctttggaccagagcgggcagctctggttttaagtggtgccaaggtcaagccacagaaagctctatcatccggatttaaatttcaatatcccagcgtcaaagaggctgtgacgcaactgaccctcaaaggataa

SEQ ID NO: 18777 - protein, 297 aa, DROSOPHILA
MSRHALIGGGTGFIGRNLANHLTKKGYDVTVISRMPGAKRITWHELEKNGIPGSVNAVVNATGQNTLDPTRRWTPGFQQNVWNSRINSSKTLAQAIKSAPQVSSFVNLCGVSHYKPSESKVYTEEDQVQGFDYMSRLCLAWEEAAHTGSEQDCKTTILRCGAVVGHGGGMVQSMWLPFKFGVGGPLGNGNQIMPWIHLHDLCSLIQYIIEKPVPGVVNAVAPEITSNLEFSKAFAKALHRPCIFGVPEFVVQAIFGPERAALVLSGAKVKPQKALSSGFKFQYPSVKEAVTQLTLKG

SEQ ID NO: 18778 - DNA, 4137 bp, DROSOPHILA
tgggtaatggaaaccaaataatgccatggatacacctgcacgatctgtgcagcttgatacagtacatcatagagaaaccagtgccaggagtggtcaatgcggtggccccagaaataaccagcaatttggagtttagcaaagtaaaaatatcacagcttcttaatacaaacactataatatcttacgtttttgtcaggcctttgccaaagcacttcatcgcccgtgtatcttcggcgttccagagtttgttgtccaagccatctttggaccagagcgggcagctctggttttaagtggtgccaaggtcaagccacagaaagctctatcatccggatttaaatttcaatatcccagcgtcaaagaggctgtgacgcaactgaccctcaaaggataaccgaatctacactgaattctggttacacgtatgctttattataaagcagtctgtatattaaatagatgttagtaccaagcgcaaattaaaacgaatttctgcgatagggggatttatgaatcacgccctccgaaaatagacccatttaatttgtttactcattagtcttgtccaccagtatttcatcattattttggtaccacattaaatgtaatcattgacttaattcgatttataaaacgtgtataaactttaattgcctgaaggggaatcttttgcgaaaccaacatgtaatcttgtactgtaagctaaataaaagcgtgtagatacaaggggatttcacaagaattattcaacgtgtgcgaaaggtagataaagagataaatccgatcccttttgctgcgttacttgccaattaatataattgcaaccaaagctaaattaatagcaaaaaaaattaattgacttgcacacgctgtgaatacgctataaaaaccgacataatcataatcatacatcaatggctgatattttttttacctctcggtgggttctataaattggggacccatgtcggttggagaatcagtatcgttttttgagctgccgaaccaaaaatgctttcaaaatcgcagctattactgctcgttgtcgggttctgcctggtatgatgatgtgttatcacgcgactctagcccggctataactaatctattaacagaatgcagccgtctcggctgacgtggactgcagcaagcggccatcgtttgtcaatcccaaaacctgttgtccaatgccggacttcgtgaccgccgagttgaagcaaaagtgcatcaagtttgacatgactccgccgccgccgccggatggggaagcaagtggatcctttgagagcaagcgtcgtcatcatcatccgcatcccccaccagttagtaccactggaatattgttcttgatcatgataacttgattacccacaatccgttcagtgcttcttctcctgcatctttaacgagactggaatctatcaaaaccggaaactggatgaggcaaagctgaacgcctacttgcaggaggtcttcgaggacagttctgatctgcagaccacggccacccaggccttcaccacctgtgcaaccaaagtcgcggatttcgaggccaatttacctcctcgtccggctccatctccgccacccggattccccatgtgtcctcacgatgctggtcacctcatgggctgtgtgttccgcaatatgatgaagaattgcccagactcaatacggaatgattcccagcagtgcactgacatgaaagagttcttcaccaagtgcaagccacctcgtggtcctcctccttccgccgaagatatgtaaggcacccaagaaaaatcctatttgtctgaaaacccgcaatgaatttacctctaccaagccgaacttttaatatcattcaatttaagccaataaacatttaaagctcaatatggtttcactttcctttcgccgattggagcatcctttgtgccacttatcactaggatgcacgtctgggtgcgcaatgagttagaaaattagattttccgcgaggaaattgcttattgcgcgcatgtgcgtggctaggaaaccgtaccctgcccagaaggggttcatttgtgtttagtcctcaaaggtgtaaggaacatggcggaggagctaaaagtgttcttcgaagagtgtcgtggacaagggttttccgcaaaggaaatgctggctgtatgtcaacctttgatttggagaatccgcttggctagaatcaagaaatggttcttcatcctactgcccctgatggttatttatctgctttggctatgcagtgacaccttttcttggtggctaagtgccctgggtcgattggtgctcatacagatccttccactctgggattggcggccctactatcatgccaagtgcctgataccacgcgatcaaagtgtccaagagcaggcaccatcattgggtaaagcggagaccttgcggcagaattgcgatctctgtgaaggtttgggtgagttcagttttcgatttgtttattacctatatttttaatcatttaattttcagagggaataggcacggtttccaatgtaagctactcctccttggagtctgagcacctagaacgtgggcaaccagtgattataacagacactggactgcaaacggatgtttttagtctcctagagcaaatagagaagaagtcacctcagtggctaaccagtgaaccttgtgatgtttccagcaatctgttgctgaggaaactttttaacctagaggcggctctggataagattcattcctggcagggacagacatcgaattcttggcaccttcaactgaggaactgccagaagaaggcggtgaagtcctctcggctttttctggatcgtccctactactacccacttcacctggccccgtattactccagctggctattggcagtccatcagcaaaagcgaaaccaagccgatatatacgtgcgtggcctagtgctcatccagcaactgagtggccactttgagatggttctccatccaaagaagccctgcaataaaggaatatgtccaagcttgcggatgcgactgaatgcaggagaaggtctgatctttaccacggatatctggagcctaagttatggtctggagaaaccccacggaaagctgacctccctggctagcattttcgagatagactggcagccgtagagtgttttagttagccgaaattgtatttacacacccaactagatacagacgaatcgaagcctaaagttatcgaaatttactgggagggaacagattcatcttaggcccggcggcacttggcctccaccaacttttgcagcgtgcccgtcaggctgttgatggcatcgatcttcatgcgctcaatccgctcctgctgcaccagtgacattttttggatctgcacctgttcgcgctgcaaactccgttgtagctctatcttctcccgctccacttccagttttctttcaaagtagtccttccaccagatgtcatcggggatgccagaagcttggtgcgagcccatgggtcgtgccagatcgtagagcttgccattaacttccagatgttggctgctatcgtttgtacgttcagcctccgcaacttgatcgccatcgtactccatcttgggttgacggactacctccgacatgctgttgctatcctcatcgaactcatcgttggacttgctgtccagattcatctgggcctgcagcaggacctgatccacaggtgtaatatacggctggctgtccttggccgcagtctggggtggaagttgcacctgcatttggggtgttcccggctttaggctcaccggagtaggttgaagctgtaaaggttgctggggaatacccggattcgggttttgcccattagccgaatgtggagcttgtggcgcatttgaagtctgttgtggcaactgcatatcaaagtcagccttcttgccctgcagatacttgaacatctcctcgaagaactcccagtgcacatagccggatacgtattttttgttcagattcttgttgtaggtgatgaggatgttatgccacttcttctgcacctttgcggcggagtagcgaaatcccagtcgctgtagttgccgggtgcagtgcagccaaagagcagtccgtttttgtctgtaagggagttacttttacaaagatgtctttacggtggaata

SEQ ID NO: 18779 - DNA, 1482 bp, DROSOPHILA
ccgaaccaaaaatgctttcaaaatcgcagctattactgctcgttgtcgggttctgcctggaatgcagccgtctcggctgacgtggactgcagcaagcggccatcgtttgtcaatcccaaaacctgttgtccaatgccggacttcgtgaccgccgagttgaagcaaaagtgcatcaagtttgacatgactccgccgccgccgccggatggggaagcaagtggatcctttgagagcaagcgtcgtcatcatcatccgcatcccccaccatgcttcttctcctgcatctttaacgagactggaatctatcaaaaccggaaactggatgaggcaaagctgaacgcctacttgcaggaggtcttcgaggacagttctgatctgcagaccacggccacccaggccttcaccacctgtgcaaccaaagtcgcggatttcgaggccaatttacctcctcgtccggctccatctccgccacccggattccccatgtgtcctcacgatgctggtcacctcatgggctgtgtgttccgcaatatgatgaagaattgcccagactcaatacggaatgattcccagcagtgcactgacatgaaagagttcttcaccaagtgcaagccacctcgtggtcctcctccttccgccgaagatattgacaccttttcttggtggctaagtgccctgggtcgattggtgctcatacagatccttccactctgggattggcggccctactatcatgccaagtgcctgataccacgcgatcaaagtgtccaagagcaggcaccatcattgggtaaagcggagaccttgcggcagaattgcgatctctgtgaaggtttggagggaataggcacggtttccaatgtaagctactcctccttggagtctgagcacctagaacgtgggcaaccagtgattataacagacactggactgcaaacggatgtttttagtctcctagagcaaatagagaagaagtcacctcagtggctaaccagtgaaccttgtgatgtttccagcaatctgttgctgaggaaactttttaacctagaggcggctctggataagattcattcctggcagggacagacatcgaattcttggcaccttcaactgaggaactgccagaagaaggcggtgaagtcctctcggctttttctggatcgtccctactactacccacttcacctggccccgtattactccagctggctattggcagtccatcagcaaaagcgaaaccaagccgatatatacgtgcgtggcctagtgctcatccagcaactgagtggccactttgagatggttctccatccaaagaagccctgcaataaaggaatatgtccaagcttgcggatgcgactgaatgcaggagaaggtctgatctttaccacggatatctggagcctaagttatggtctggagaaaccccacggaaagctgacctccctggctagcattttcgagatagactggcagccgtag

SEQ ID NO: 18780 - protein, 449 aa, DROSOPHILA
MPDFVTAELKQKCIKFDMTPPPPPDGEASGSFESKRRHHHPHPPPCFFSCIFNETGIYQNRKLDEAKLNAYLQEVFEDSSDLQTTATQAFTTCATKVADFEANLPPRPAPSPPPGFPMCPHDAGHLMGCVFRNMMKNCPDSIRNDSQQCTDMKEFFTKCKPPRGPPPSAEDIDTFSWWLSALGRLVLIQILPLWDWRPYYHAKCLIPRDQSVQEQAPSLGKAETLRQNCDLCEGLEGIGTVSNVSYSSLESEHLERGQPVIITDTGLQTDVFSLLEQIEKKSPQWLTSEPCDVSSNLLLRKLFNLEAALDKIHSWQGQTSNSWHLQLRNCQKKAVKSSRLFLDRPYYYPLHLAPYYSSWLLAVHQQKRNQADIYVRGLVLIQQLSGHFEMVLHPKKPCNKGICPSLRMRLNAGEGLIFTTDIWSLSYGLEKPHGKLTSLASIFEIDWQP

SEQ ID NO: 18781 - DNA, 6800 bp, DROSOPHILA
gactgtgcagaccaacacttgtgcactttccgggcaatcactcaattttctattatgatttcacaattgccaatcggcagacttacgttcattatcctcgacattatttccgttgctaggggcttgcccatttcctgcgttgagctgaacttgagccattgcggctatcagacttttgaagtccaatctgccttttctgccagaatatgagcaattttagacctttcgcctgtcaatagttttctcgtactaacaggacaattttcgggctgcagcttccaggcgccgtgaacgtgaacttcgagtgcgcctactctctcgcgccttctccgctcctctctcgctcgctcttagatctggaaaagatgggaggctgcggctagccgaggagtagtggtattagtttccaagaaatgggcctctagaatggcgtggttgggtggctgggcggtgcagtgggcgccggagtgcagcatctgcgcactttgcactctgacttcgcaggtctgttagccgcagccacagcctcactggaatggctttatgtgattggaaagtctaacctaaatagttctagtccggctggattggaaggctatttatgaaatatttgggaaatatcaagatctgaatgctaaatgcatgtgtcaagttatgattgaagggccacatgcgaacgtctatatttgaaacctataaaataggtttctaaacctattcgcgtgaaatatataccaatttaactgtaatgctacaataatagataaataatggggcgcacacgtgctttccatgtatattttatttgtataaatctataagcgatcatcagatctaagatgtcataccttgatttaagtaagatttagtaagctaaagaaaatgtataaagtactgtatcacaattttctaactggctttttaaaacaagaactatcgttttatcgatacaccttcggtgttaccagctgattgtcccggcattttattgtgctaggtggcaactccaacgccgcgaatttgcgcgtggaacagaatacatttgttattaaataattttttattgtagttgttaagagacagagcctagacaatgcctgcggtggaaaagagcgtgatgtgagtatcggcagtgcgacaatattgaatgactaaataaaatccttcgatttgccatgtagcaccgattggaagcgcctgtggccgatggtctcaggaatccactatgagacgccgcaggatactgtacgtgaggagctgatgaacgtggcttctgaattgcaggctggagtgctccaatttaagcccaagaatgcctccagcctcgagctgggcacgttgctcaaagagaaaaagcaggaaaagctgctgcccttcaccgaacgactgcaggatctgttggatctagaatccgcccagtgctgggaaatcctttgctactaccttacgcaggagtaccgtggatcggcgagtctccttacccaactaatctctaccgaaacgaatatggccaaactgcacgaagacatacggcattactactccctggaacgcatggttgtcctcaagattgttaagaatcttatcgtctttcaccaggtaccgaatcatccctatcaccgggagtatcgcgccgtggtcgaaaagataaccatcccccgccttagagattcatacctagaccaactggagagccttatttgcgaagtcccacccagaaagctaatggcgggagaatgcttccactctgcggaacgcttagttgcctggtcggagcgaaatgctcgtgagatcaacgaggtgctgcacatccttctggtgctagcggaacacctgcccatggggttggagcagataaagagaatatttgccgcctgcaagcaacactcctttggaaagatgcaaagttatctggatgacagccaaccttaccatcaggagattattcgaagcctttcttactcagagctaatgttagttttaaagtgcctcgactttgagaagcccgagaagcattccgatctaattgaaaagcttatagaggatctgcaggttgatattgccagcatgtaccacagaccagagcatggccctttgctcctagcgtggatgctgcttcgcttgcgaggcaccaacgatgccgacgatgcctccagcttgctccgctgtcggcagctgggcaagcgagccgtggatcttaagtgttttgtccaactgcacctaattgccagacattctatgtacgccgatgactctatgctgtcacggattgtgcgaagaaccatatacaaccaggttggatatctgtgcgacctcttcgacggcgatggcagctgcgctcggtatgagggcatttacgaattgctctgcgaacttgtctcatggccacacttagctaaagacttttgcagtcgggaaggtcagtatcatataatcaaaagagcttaaccgaaaaaattagtttagaacgaacaactttacatttatctagatgatggtccgtgttcgctgtacaaaactcttttagagaacttccctctagaattaacacatctgtccaaactggcactgtcactgacaaaagcgggacaaggcaactatgtaagccaatacttgtacactcaaaggcatcagttaaaattattttaacaatcttgcaggtcaagagccaactagaggctttgcccatattggctcttcgttacgacgaaagtcagcacaaactcagagaagtggacacaaatgaattcgagctcctggccagcgtgcaaccatttcagcaaattgattttaccatacccgcaggaactagttgcacagccatccaacatccgtccggctgctttatgcactttcgtttcccggtaaactactttgacgcgctgcaccacgaaattaactgcctgctacgcgagacgggtcacctgcatggtgactttgaatcgagcgaacgcatacgcaatgtagaagctggtttaagatttttggaaagtgccgttaagctcagtcaatcgatatccggcatcagcgccgaaatggtgcatcctaccgagatgtgcgttgatctgctgcacacgttcaaaagcgttcaatacccaccggttggacttttgtctagctgtctcaatgtttgcactgcgctgctgccgttggtagacgaggaaatcttttcgcggataagcaacctacacatcttgccaacagtaagcccgggatctcactacgacttcaagatgtatgccaatgccaatggagtgggctttgagtcgcgctttttaggctccgtcattgataatgtggagaagaaaagggagcgctacgaattcttgctttcatacattgggttcctgcgagcgtactccaacctgaaacggaatcgccaaatccagatggagattcccggccttatattcctgttaaaggatgttttcccgcacttgcacacctggcactttagctctcaagtggagagaaacaagatctacttcgagattcttagctttatatgcgacatcctggacttgtttaacactgctaaagaatctaattgcaagcaacgcgaacttttggtaaaggtgtgcgtctattcccttctaaatttggaaaatggtctgattcttttgaggtaagagctaccgtaactccaaccaagaataaatttaaataaaatgtatattttagatttgttggtgtgggcaatgcttatgtccagtacaccatggagctagagacaaattggatgcagcagcaacctcacggcttaatgatgttagtccgtctatccatgcgtatcctgatgcagttactgcgccttaaagaagaggtatatggaaacagtgagaccctttccccgctggaggcgttgatatacacacaacccaaacagcgtgatactctgcggatcatacctacagtatgcagttacatgagcaacatatttgatagatggctaccgattctgtcttgccgcctgctgaaaagaatcgctctccagttcaatatgtctctcttggcctgtctggacatggaggctgatcaaatccgattgacgtttatgcagaagttgcctgatgagctagaaagtgattccataaagatagccatccttgagctggtggacgcatgcattgccaagcaaccgggtgttaccgaggcatttttcaaggttaactatgcccttgataaacgttcccggtcatttttcagtaaggattgtgttcccaatattggcgagagtattgtcacttatatgagagactttctggacgcccttcaagtggatccattaaccattcaacaggccttgcccgctaagatcatgaccatcttccactcaatgtggaaacataatctgcaaatgctagtggatgatctagtgaaggataaacagttttggaaaaaactctgttcgccgctcttttccgagctacagccaaatttacgaatctacactcagcttctaaatattatatccattgaagtctatacgggaaatggaaacaatgccgctttgcttgacgtcatgaataagttctttgaacagaagaactttggaccttggcttaattacgtctttaacatgcccaaggttccggctgtaaaaaatttgagttcttccgaccatttgcccgactggatctgttgcctgcaggcttttaaggatcttattgtaattttgctaaagaaacagccaaagttcgtgaccatacccgagtcgcagtttaagctaatggcgcagaagtgtctggttgtcctggttgatcgctcaaattatttggaggacatgcggccgttcatcatactggctgaactgtatgtattcatcttactggaatttaagcacgcgtacacagacagtttagaggaggaacagacactaatggacctactgttgcaactgatgaaccgcatctgtgcgtgctatgaggatcagcacgtaagggccaaagaggcatgcctggccattgtgaccaagtgcacacatctatacacagacctgctaatcagggactcgtccatagccttgcgttttctcaactcagtcgtaggcatcatttgcagcgaactgcagcacatggagaactcggtgagcctggagaaatcgcagggcctcaataattcggacagttcagacagcaagacatccaccaactcacttattctctgcctgaatttgctaaaggctgtcgctaccatattccacaacgacggtcccggaaactgggatctgccatttgtgtcggtgcgtttgtttcaacggctcgtgcgctgtgtgtctagaacccttccattgtttagcaaacaagttctaagtgtgcagctgctggatgtgctcattgtatttgccaagggccactgttcagttgagtttctgcattgcgatgtgggagaatacttgtggctgaaactgttgcctcccagagaacttttgcagtcaaaacacgagtttactaagacgacggctgcggatgcagaaggttggaccgtagagcagtggtggcctgtatacgccagaggtattgagcttgttaccatcatttacgagaagcacaagaagtgctttcttgaagatgcttttcaatttgtgggcattcatgctgttttcctggaggatgcattgttattgagcaaacaatccttggaaccgtcagccatgtacttaatcaaggctgctgttaacttagtcgccagtttgacggagcaccacaaagagtggaagcaagacagcgatctgtcgcttgctaacctaatggtgggttctgttttagttgttcaactaaataatattttaatcgcttaactgaaatccacagcgtgcagttcagagtttgctgtgccacacctcatctttgtttcaccagcaaaaaaacttaaagtgtcttctggctggtcgacgctcccagctagaaattctgcgcagcacagaggctctaatcgttgacgatgaacttatctccgcctgcaatgagtaagttaacttgaataatgttgttatactagactaaatatttccattttataacagcctcacggatataataatttcttgcgttaaagccttgcttagatttagtccggatttaatggaactactgtgctgcagtgcatatgagccctccaaacactcaatcttactagacgttaagtttggtgcacctaagttgaacgaagagaacttaacgctcacatttggaatcgtcctcaacttggtaaacatatacgtaaaggccttgaatatggtatgtatatgtggcattataagtgtgtccattctgttctaattattttcaaaacatcagcaaaatcatggcttcagtgaggtgccattaaactcactgcccaacgttgagcattccggggacaacgatgatccagaagtttgtgtaggcaaccaaaccaaccgcaccttctccaagcctctgtccaatgtctcgatttcaaccggaacctgtccagccagtgagctgctctccaacatggacggccagctttgtttgcttgcattggagcatctgctcatgctggtcgcttcgcaagccatctgtataattcgctcaccgaacctcgaaacgctctggaagcaaatcgtgcgtcgggacatcagcaacgagttgttaatcttcaacgagttcgtgcgccgcaaggtgatattagactacaaagagaaccgtagtccctggctacgacgaaaacacgggctctgtaagctgaagtgcgtggacccagtgaggagttcaagcagttcttcccgcagctcagaaattgtgcgccgcagcaacacaaataacgaactgcgagtt

SEQ ID NO: 18782 - DNA, 1522 bp, DROSOPHILA
gcaactccaacgccgcgaatttgcgcgtggaacagaatacatttgttattaaataattttttattgtagttgttaagagacagagcctagacaatgcctgcggtggaaaagagcgtgataattaacacatctgtccaaactggcactgtcactgacaaaagcgggacaaggcaactatcttctaaatattatatccattgaagtctatacgggaaatggaaacaatgccgctttgcttgacgtcatgaataagttctttgaacagaagaactttggaccttggcttaattacgtctttaacatgcccaaggttccggctgtaaaaaatttgagttcttccgaccatttgcccgactggatctgttgcctgcaggcttttaaggatcttattgtaattttgctaaagaaacagccaaagttcgtgaccatacccgagtcgcagtttaagctaatggcgcagaagtgtctggttgtcctggttgatcgctcaaattatttggaggacatgcggccgttcatcatactggctgaactgtatgtattcatcttactggaatttaagcacgcgtacacagacagtttagaggaggaacagacactaatggacctactgttgcaactgatgaaccgcatctgtgcgtgctatgaggatcagcacgtaagggccaaagaggcatgcctggccattgtgaccaagtgcacacatctatacacagacctgctaatcagggactcgtccatagccttgcgttttctcaactcagtcgtaggcatcatttgcagcgaactgcagcacatggagaactcggtgagcctggagaaatcgcagggcctcaataattcggacagttcagacagcaagacatccaccaactcacttattctctgcctgaatttgctaaaggctgtcgctaccatattccacaacgacggtcccggaaactgggatctgccatttgtgtcggtgcgtttgtttcaacggctcgtgcgctgtgtgtctagaacccttccattgtttagcaaacaagttctaagtgtgcagctgctggatgtgctcattgtatttgccaagggccactgttcagttgagtttctgcattgcgatgtgggagaatacttgtggctgaaactgttgcctcccagagaacttttgcagtcaaaacacgagtttactaagacgacggctgcggatgcagaaggttggaccgtagagcagtggtggcctgtatacgccagaggtattgagcttgttaccatcatttacgagaagcacaagaagtgctttcttgaagatgcttttcaatttgtgggcattcatgctgttttcctggaggatgcattgttattgagcaaacaatccttggaaccgtcagccatgtacttaatcaaggctgctgttaacttagtcgccagtttgacggagcaccacaaagagtggaagcaagacagcgatctgtcgcttgctaacctaatggtgggttctgttttagttgttcaactaaataatattttaatcgcttaa

SEQ ID NO: 18783 - protein, 35 aa, DROSOPHILA
MPAVEKSVIINTSVQTGTVTDKSGTRQLSSKYYIH

SEQ ID NO: 18784 - DNA, 10397 bp, DROSOPHILA
cgggacatcagcaacgagttgttaatcttcaacgagttcgtgcgccgcaaggtgatattagactacaaagagaaccgtagtccctggctacgacgaaaacacgggctctgtaagctgaagtgcgtggacccagtgaggagttcaagcagttcttcccgcagctcagaaattgtgcgccgcagcaacacaaataacgaactgcgagttaatgtcgtacgcagactgcatctgcagcaacagcagcgaactcctccaccgcaaaactttgacatgagcagcgatctgagtcccattgcggcagctcaaggtgcagccatgacgacgagcttggatggccgaaagcgtttgtatcccgctcaacaggcgggcgacgcgttcttggaggacgaactggccgccatcgaactgcaatactttcccccgcccactgagcctgggtattgtgaattgtcgcaggttcaagtggtggaggaggactaccttcagttgatgtcggccctctttaatgtaatgccccattgcgactgagctgctagcccttcggttgtaaagtaattcatggatttctaaataaagtatgtagacattaaataaaacagtgcgactattttttgttaacacatatagatccatttttaataaaaaaaaaaaagctaattgaacaaatatcttttcatgtaataaagtcaattccatgattcccagtgtagaaaaataatttgcacagttgtgctaatgacgtcactgggttagacgagcccccagcaacgtcatcaccgtctcttttctgagagaactaccaccattggaagtggtagtgtctcccccgccatgaaactcagtcccacagaaacagggagagagagagagcggctatttatgcttactcacaaccaaagaagtaatcaccgctgcttttgccgccgccaacgttttttgcggcagcgttgagctgattatgagctttctgcttttggcattttagtacccagcgattggtaaaagaggacgcatgtgcagacaacggagcggatacgcagcgtgaacgtgaacgaagacatcaagtacgagcattaaggtttacccctgttaggcatccgataatccgtgaatcagagagaccatcgtcgtcattagggcaaccaattagccaagtcagtgattgtgataatgcttaaaggtgttcccacgctagccggtcgaaaccttcgtctcctgacgacccaggcacaggtgctggtccatcaacgcgccaaagcgtccgccgccgagcccgtcgaggactttgaccaggagacggatcttttgaagcgcgccaagttcggacacacgggcaaacagctgcagcagaaaataatcaatgaggtaagtttctgcggagcatttcaaacgcggggaggttggccgaaaaacagctgactatgtaggtttttttggtcctaaatttcgctcgactattgattttccatgtgctatccccaaaagcgaacacataatgcgcacagatgcgcaaatactggcggagagcacaaatagttttgccgaaatccaaaaatagatctcgaaacttaaacaaaaaccgagatatggactctggcctggaagtgattttgggcacgtaagggcgtatgactttctttgcggtctgacaatgcagaatttttcgctgaagacgccgagcattagtttaattagataaatgccaggcgcagcgtgactgacgcaatatccagataacacacccactgtcctgcctctgcctaaaaaaaagaaaagataattgagtttatcttatcgcatctgtgattgcggcgactagactaccgagcgaattaattgtgaaattatcatgacaaattttcgggggctaggcgctaatcaggtgcaaatcaactgacacacactcatccttaatccccaaataccacatgtcacatgtgaaactcccaattcagcagcagcacactcgctgtcaacaagtttattatttaatgtcaaaaaatcagacgacggcgagacgctgaccgagacattgaaacaatgatggcgagattggaaatgggatggttgtaaaagtctgcttatttattaatctttggctcgtgaaacaatcgaacaaatatgtatatatattcgaatacactaagaaaatagcgtgttctgtatgagtttcatgttttgaaatatatggtttatttccggcaaaataatcttaatcttattcatttgaactaaaatcttatcaaaatgaaatgataatttatgtaactttgataggaaaaacttgtctgtgctatttttaaactctattgtactttgttatggaggctggttaaaattaggtactttcttatcggtagcttattattacaaacgtattatattttatttaaaaatttcttgtgcataactaagacattttcttgcagtgtatgtgattcacagactcttgaagtgttaaagtcacgcgaaactgtcacccgaaaataaatagtgtaaacgtgagcatggcaacacaaaaacacatttatgaacaaataaagtcggaggtggtggtaattcaagcggaaataattatggattggaataaagctggcgaagatttggcaaaagtccatcactagtcgaaatgtttgcgctgcttttgttgccatgggagaaaagaaatgaaagagcacacattcataaatatttagcataccgtgcgtacatatgtatatattaatattttagctgccacaacacaaaaacccctcactccccttgacgcactagaagctagcgaaaaagggagaagaggaaaataagagagttagtttgttcttaagcgagcaaatggatatttcatgaactttgcaaattgtattccaattctttaaggtatttcgcgatcaaaagaaatatgcagaaattagcaaggaagtttctagatcatatacatttttttctgggaaataacccattaggaataactgcgaccgataaaataggaaatacaatgtatattttatgctcgcgataaagagcgcttatcagtgacttaagggccttccgtaagcctcaatgagttcagtcctgttttattaagttatagtttattacaacaataacttatatttagaagatcgttgtacagtagttattattcctaaaatcagttttaaaatgactttactttaatgtaaccaatatattgaaagccaagctgcgtagaaaataaaagcgaagtttgtataagtaatttccttcatttcataacgcattgacataatcgatttttggggtgcacaagataggtttctcatattccctgaatacgtttccctcagataattataatctgcatttccgcgcaaattgtgcgtcaatgttccgtcggctttgtgatccaaattcgaaaggtgccaaagtcccacgctaaagtgacaggccccttgaacggaacttgtttgggcaatatcttattctttttatttttacggtgttgttcttattgaacgagatacatatgcgccacatgactttatttcgcttaaataagtgcttaataatatgcaaataagcagcgagtgcgaaaaacgcttaacaatgtaaacagattagggaggcaaagatttacccttttctgagatcaagaaacaaatttataacagggatttgggcacgtgcaaacaatttaagctgaatatttccacaagctgcgcaagctgcagttgcaatgaaaagtatataaagttgctggaatttttttaatcaatttaatttgaaaggaactaaagaaaagcacagagacatctgcttcgctgatgtcatgcggttaggtaatccaatcgaatagtacttaggatcgaaggcaggacactggaagtattcagttacgctaatgaatgatttcgatttctccattaacgaaaatagaaatgctatgggcaaaattagtaggctgtgcccaatatgtattccaaatcaataatgtgcaagaggttggcattgcaaatataaggcaaaaaaaaaaaaaaacagaagagcaaagaatcaaaggattgattatgatagctattaccatccttgtaagcaccaaaagtgttgccgattttcggggatctcataaatgtttggatagaccaaacccttctttctataaaaggtgctcgtgaatggcatacggccattatttccacttcgaaccagttgcggtatacactgggatatacctttgaaatatgctagtacgtgccataaagttccgtttttgtcataactgggaaaacgtgatgcgaacagagaatttccgatctaaacaacagctgtaatatacaacgaatattttgtacatttcagaaaaatctgcgcgctccaccgcttatgaacttggtgtttgccaatcggaagttgtccttctacgataccagttccactcccaagaccaaagaggataatgccaagctgtgagtacattatcgaaatatgacctctgaccctgtttattttcactgtcaattttacatcctacaccgcaaaacaatccagagcacatagcacatagcacaactgcatgaaatcgtccaattgggattgcaaaatatttggtccactcatttgcaccttgatcgtctgtgattgctgtaacttacccactatttcccacgtggtcataaccaaatgggtcaacagtttagctgctgccaggctgcactttatgtaccaatcatccatttttagatcggctgcagtttgcattgctattcttagttcggaaaatattgttttgaaaacaacaaccgaaatcgttgacacacacaattaacaatctgtacgccaaagtccaaagaaattgcgaaaaatattttgatggcactttttggggtaaacatttgcgagcgctttccttttgtttcaagtacaagcgggggagattagggggttggatgctccaagttgggtagtatctgccccgatagcacgcgctaattgccggcaatctcaggcgcataaaaataaattcacatacgtttattaaacgaagataaaaatcgaattcgctcgctcttttcgggtctgctgaatgattcacatacatacctcgtatgtattggcttttgatgtatgatgttggcgaactataaaaccattggccattcgccgactggtctcattttggcggtgacgggccgcaagtttgcacagtgaaagagcaggatataccttatcggaacgatgggcgatcgtagttggaacctgctgcagtatgccaccgagaaggcgccaataccactggacggctacaccgccgaggaggcggccgagttcaaggacagcatcaggcagaagatcgtagacgatctgaagtccatgacgggcgaggagctgatagagctggtcaagcagaatgctgccaaggtggaggaggagaaggtggagattccgcccacggaacccctatccggcaccgaggagggcaaggaacgagtgcaggatgatgcggatctcatagatgccggtatcatagccgaaatggtcgctggactgtgcaccaaaagccagaaggagacgttcatcaaggtgataacgaagtatatcaggtaaatgtgaatcacccggagacgtgcccacctccttatcggaatcaaagaaacggggttccgccgcgtgacgtccacctccttatcggtttcggagtggtgcccatgtgaatatctgttccatagaacgccagacaatggccagtgccagtgccattataatgctataaatccagtcatatctgctccgcggttgtatgtgctagtgcgggctgtgtttgtgtgtgtgtgtgtgtgtagagaaaaaggagttaattaatttattttattggcaataacatgatttagaaattagcacattccggccctgcgttgctctccgtggcccgaactctcccccaccgctaaccgaactctccgatctccggtcgtctatccgtatggctatctaagtgctcccgtcgctgggagcagcaaaaatcacactttccgctaatgtataaaatgccagcgcgcttactgttgttcccattaaacttgcaacagctcggcgctcaagtcaaggcgatccgagatccgaaatccagtatagaaaatacaatacgatacaaaacagtcaaaggcatcgaatatcacgtatacgccgtgatggtgcaaacaactgaaatggaggcgctgaagcgccagagtgaggatggggataccaaggagcgggaggagaactataggcggggcaaggagcaagagaccacggagacggcggccatcatagaggagattatcgagggcatctcgctgcagaatcgtcgcggcaccatagtgcgtactatttccgcgataatcaggtaaaaatagtgacggaaagtgcagaccaaacagacagtcaggggcagggacaaaatatatgcatagtatatccgagtggatcgtaaaaatagaatgtgcacattacacaccccatatctacatatatgacacacccacaaacccctatataagtatataactatgccaaaacgataattgcgtttgattgacgctcattacacgctcatttatggccaacatatggaaatctaactaacaattgctatctgatcatcctgtttatcactcttttagcagtcagagacgccactattcgatgcggccgtgagtaatcgattcaactgttctgttttctgtacactcccccagtagaatttgaatcagttgccatgctatatacaccataaaccataaacgatctcttaatcaagtccaactcaactaaattggagttgattgtggtctgcgcgaaatgatttcccgaattgatagttccgaaaaaaaggcccaattaatcaaatcggccaaccatggaggaagatctatatttagagatgtccaactggatctgtgcagttttttttttttttggccgcactgcattagatgtctgtgagccaattagcactttgacttcagcgccagttggccaaagacaaaccccccgctaaaattccgccttgcgcctctacaccccttagtagtagtagctgtattttgtatttgtgaattttgacttgcttttccacacacgcatgctaaaattcagtcggggatcgccgctcaattagcaggtgccctaaacccaattgcttttctgcggcttcgaaactatttcgctaatttccccccactaactaactgcttgtatttctattcacagccatcgcgagcaggagcagcgaaatgcggaggatgtgctattcgacatgttcgccagcgaggagacgggcctcatctcgatgggcaagttcctggccgggctaaagaccaccggaattcgccggaacgatccgcgagtgcgagaactgatggacaacttgaagaaagtgcacaagctaaataactacgagacgggttcttcggcggaaactcagcatctcaatcgagagaccttcaaggcgtaagttattgccttaatcattccaatcctagaattgtcattgtaatccctatcgtattcagtgtggttgcccccaatattgtgctgattgccaaggccttccggcagcagttcgttattcccgactttacgagtttcgtcaaggacatcgaggatatttacaatcgctgcaagaccaacactttgggcaagttggccgactacattccgcagctggctcgctataatcccgattcctggggcctgagcatctgcacgattgatggccagcgcttctccatcggcgatgtggatgtgcccttcacactccagagttgcagtaagccgctgacctacgccattgccctggagaaactgggtcccaaggtcgtgcactcttatgtgggccaggagccgagtggcaggaacttcaacgaacttgttctggatcagaacagtaagttggaaaccatctaattactatgatgtcctcaatgtgtatttattgcaattataaaattgtgtctcaacagaaaagccacacaatccgatgatcaacgctggtgccattctgacgtgctccctgatgaacgcccttgtcaagccggacatgacctccgctgagatcttcgactacaccatgtcttggttcaaacggctgtcgggcggagagtatatcggctttaataatgccgtattcctgtccgaacgcgaggctgccgatcggaactatgccctgggcttctacatgcgggagaacaagtgcttccccaagcgcaccaatctcaaggaggtgatggacttttacttccagtgctgctccatggagaccaactgcgaggcaatgtccgtaatcgcggccagtttggccaatggtggcatctgccccaccaccgaggagaaggtgttccggccggaggtaatccgggatgtgctctcgattatgcactcatgcggtacatacgactattccggacagttcgccttcaaggtgggtctgccagccaagtctggagtgagtggcggcatgatgctggtcatccccaacgtaatgggcatctttgcctggtctccgcccttggatcacttaggcaatacagtgagaggactacagttttgtgaggagctggtctccatgttcaatttccatcgctacgacaacctgaagcatctgtccaacaagaaggatccgcggaagcaccgctacgagaccaagggtctgtccatcgtgaatctactcttttcagctgccagcggcgatgttacagccttgcggcgtcatcgtctctccggaatggatatcactctggccgactacgatggtcgcactgccctccatttggctgcgtccgaaggacacttggagtgcgtcaagttcctgctggaacagtgtcatgtaccacacaaccccaaggatcgctggggaaatctgcccgtggatgaggcagagaacttcggccactgtcacgtggtggagttccttcgctcctgggcggagaaggccgaccagtccagcgaggagtgcaagcccgaggcggtgaccagcaagacacaagcggatgaggtcagttcaagttcaaactcaagttcaagtccaggttcaagtccaggttcaagtccaggttcaagtccaggttcaagtccaggttcaagtccaggttcaagtccaggctcaagtccatgtgcaagtttaacgacgggggaccttttggggcacaattccagaaatctatatgaaatgctcaagctgaattccaatttcaccttccaggaaatctgcagcacaagcgacctggagaccagtccgacaaccagtcccattcccactcccgtggaatccggatccagggcaggatcaggacggtccagcccggtgccatcggatgcgggcagcacggcgagcgccggaagcagcatcgatgacaaaaccaagccgggactataagcgtacagagatccaggatcccagccgaatctctctgactaaattattcgcacaacattttagtttatatatgatgtattagattaaagttaagagtacccaaaataccatcagttcacgctgcttggttagtcctatataatttgtagtagtcatcccacgtgcaagtcgtgatccttcgaggcggatccactgcacgagcggcatttgtacttgtacttggtagcgcttagttagccacaaaaattccatgttatcctacgaaacaatgacaataatcttaacggatatctaactttcccacataactggggtctgtgacctgcctaaatgtattgcattcgtacttgtcaattgatatttgtatgcgtttgaatgtgtattaagaatcccgtttaaaaagatcatatgtaagttcagatatacatatttgcttgatggcaattgaatatatacatgtttagctgaaaacgcacacaatatatggcatatcgttacttaatgggtcttttgaggttggaagattatacatgatatataagaataataaataaaagatgtttacttactaattttcttagagcaatcgtaattatacctttttaatcattaacatcaaaattttaaaatatgaactctatatttgcattcaatcctgttttaaatggtgtttgaataaatcaattaaattatattgatatttttaaacaaaccaggaaaattagaattgattcattggcaatcctttggggtttcaaaatcgatgtatttaattcaaacactttttcatcaatcaatttattctacatttcatgtaaataactcgttccccttctacacgtatgtgctataaactttgaaaaccgaacgtattttacacgaagccacaagacacgaagctggattatagcaccattatggcatgtcatcggttagttttcccagtgccgcatggctcagttcgttcgcagcattcgtggagttcggacgtgaatgtgtt

SEQ ID NO: 18785 - DNA, 2498 bp, DROSOPHILA
aaaagaggacgcatgtgcagacaacggagcggatacgcagcgtgaacgtgaacgaagacatcaagtacgagcattaaggtttacccctgttaggcatccgataatccgtgaatcagagagaccatcgtcgtcattagggcaaccaattagccaagtcagtgattgtgataatgcttaaaggtgttcccacgctagccggtcgaaaccttcgtctcctgacgacccaggcacaggtgctggtccatcaacgcgccaaagcgtccgccgccgagcccgtcgaggactttgaccaggagacggatcttttgaagcgcgccaagttcggacacacgggcaaacagctgcagcagaaaataatcaatgagaaaaatctgcgcgctccaccgcttatgaacttggtgtttgccaatcggaagttgtccttctacgataccagttccactcccaagaccaaagaggataatgccaagctccatcgcgagcaggagcagcgaaatgcggaggatgtgctattcgacatgttcgccagcgaggagacgggcctcatctcgatgggcaagttcctggccgggctaaagaccaccggaattcgccggaacgatccgcgagtgcgagaactgatggacaacttgaagaaagtgcacaagctaaataactacgagacgggttcttcggcggaaactcagcatctcaatcgagagaccttcaaggctgtggttgcccccaatattgtgctgattgccaaggccttccggcagcagttcgttattcccgactttacgagtttcgtcaaggacatcgaggatatttacaatcgctgcaagaccaacactttgggcaagttggccgactacattccgcagctggctcgctataatcccgattcctggggcctgagcatctgcacgattgatggccagcgcttctccatcggcgatgtggatgtgcccttcacactccagagttgcagtaagccgctgacctacgccattgccctggagaaactgggtcccaaggtcgtgcactcttatgtgggccaggagccgagtggcaggaacttcaacgaacttgttctggatcagaacaaaaagccacacaatccgatgatcaacgctggtgccattctgacgtgctccctgatgaacgcccttgtcaagccggacatgacctccgctgagatcttcgactacaccatgtcttggttcaaacggctgtcgggcggagagtatatcggctttaataatgccgtattcctgtccgaacgcgaggctgccgatcggaactatgccctgggcttctacatgcgggagaacaagtgcttccccaagcgcaccaatctcaaggaggtgatggacttttacttccagtgctgctccatggagaccaactgcgaggcaatgtccgtaatcgcggccagtttggccaatggtggcatctgccccaccaccgaggagaaggtgttccggccggaggtaatccgggatgtgctctcgattatgcactcatgcggtacatacgactattccggacagttcgccttcaaggtgggtctgccagccaagtctggagtgagtggcggcatgatgctggtcatccccaacgtaatgggcatctttgcctggtctccgcccttggatcacttaggcaatacagtgagaggactacagttttgtgaggagctggtctccatgttcaatttccatcgctacgacaacctgaagcatctgtccaacaagaaggatccgcggaagcaccgctacgagaccaagggtctgtccatcgtgaatctactcttttcagctgccagcggcgatgttacagccttgcggcgtcatcgtctctccggaatggatatcactctggccgactacgatggtcgcactgccctccatttggctgcgtccgaaggacacttggagtgcgtcaagttcctgctggaacagtgtcatgtaccacacaaccccaaggatcgctggggaaatctgcccgtggatgaggcagagaacttcggccactgtcacgtggtggagttccttcgctcctgggcggagaaggccgaccagtccagcgaggagtgcaagcccgaggcggtgaccagcaagacacaagcggatgaggtcagttcaagttcaaactcaagttcaagtccaggttcaagtccaggttcaagtccaggttcaagtccaggttcaagtccaggttcaagtccaggttcaagtccaggctcaagtccatgtgcaagtttaacgacgggggaccttttggggcacaattccagaaatctatatgaaatgctcaagctgaattccaatttcaccttccaggaaatctgcagcacaagcgacctggagaccagtccgacaaccagtcccattcccactcccgtggaatccggatccagggcaggatcaggacggtccagcccggtgccatcggatgcgggcagcacggcgagcgccggaagcagcatcgatgacaaaaccaagccgggactataa

SEQ ID NO: 18786 - protein, 775 aa, DROSOPHILA
MLKGVPTLAGRNLRLLTTQAQVLVHQRAKASAAEPVEDFDQETDLLKRAKFGHTGKQLQQKIINEKNLRAPPLMNLVFANRKLSFYDTSSTPKTKEDNAKLHREQEQRNAEDVLFDMFASEETGLISMGKFLAGLKTTGIRRNDPRVRELMDNLKKVHKLNNYETGSSAETQHLNRETFKAVVAPNIVLIAKAFRQQFVIPDFTSFVKDIEDIYNRCKTNTLGKLADYIPQLARYNPDSWGLSICTIDGQRFSIGDVDVPFTLQSCSKPLTYAIALEKLGPKVVHSYVGQEPSGRNFNELVLDQNKKPHNPMINAGAILTCSLMNALVKPDMTSAEIFDYTMSWFKRLSGGEYIGFNNAVFLSEREAADRNYALGFYMRENKCFPKRTNLKEVMDFYFQCCSMETNCEAMSVIAASLANGGICPTTEEKVFRPEVIRDVLSIMHSCGTYDYSGQFAFKVGLPAKSGVSGGMMLVIPNVMGIFAWSPPLDHLGNTVRGLQFCEELVSMFNFHRYDNLKHLSNKKDPRKHRYETKGLSIVNLLFSAASGDVTALRRHRLSGMDITLADYDGRTALHLAASEGHLECVKFLLEQCHVPHNPKDRWGNLPVDEAENFGHCHVVEFLRSWAEKADQSSEECKPEAVTSKTQADEVSSSSNSSSSPGSSPGSSPGSSPGSSPGSSPGSSPGSSPCASLTTGDLLGHNSRNLYEMLKLNSNFTFQEICSTSDLETSPTTSPIPTPVESGSRAGSGRSSPVPSDAGSTASAGSSIDDKTKPGL

SEQ ID NO: 18787 - DNA, 6066 bp, DROSOPHILA
gccaccccctccgccgttgttgttgtgattccgcgagcgtctggagcgtccactgtgttccgacttgacggattcgttttccattgcaattgggctagcgcgcgagagctatgcccgattccgaatctcctgctcgcgaagagacgtgccccaaatcaccttgcaacctggccgtgcagctattttagtgtctaactgtaattgcggcggcagcaggtttttcatacgcaggtatgcagggcgcagtgcatagcctataggcgatttagagctttatctgcggctaattctgcggcacattgtcactattcgtgtcttgcatggctatttcatacgctatttaactatttctcgcacatttttcgctttttattcactttttcgtggacttggcttcacccccgacgcagtgtgaccaccgcaacacaatcagcagcacggtcacattgcatttagtgttttcaaacactatcagtttggcaattcaaccgccaaactgatagtttaaattttaaagtaagtttattttgttggacaatatcatgaatttgcaataatagcggaaagtaattgtctggctctctggtcagttgggcttagcagtatggcgcgctgcaacaacttcatagaacaggttttgtctactgcactaaccgcctgactggcatatatagtggtcagtgcctcttcgctggccaagatgctaaatataaacaaattcagtctatcataatacaatgtatataaattcccaagtcttacctattttgttgcttagtgtgtcccagagtaagagttattcgacccatatttgaagtagccagtcgataggattggtcatcagagaaataatcaagaagaaactttagcacgacacttcgcagacttcgggaattgggaaacattcgtatgcgagtctgtagatagcacaacgctcttcgggcaccctcctaaacaaaatcatagtattacttttgtagaaccacaacattcaccacttttaacgaacatttatcaggatgtagtgagccgttaaataggatatgtcggcacaatactccttcttaaaggcgtacgcattcagctccgtcagtatcgtatggatcaacgcattatctctatgaagtatacctagggcaagggctgaaaacaacgcctgaatggggacctccttcaacaagacacttttggtgattataacgttagaaatgttgaatcaacaaaacaaatattgcgctaccaaccactgatagagtagggttttggtgtccgcttcgccctgaaagtcgtaaatcatggatgccatagccacgaggatggtagctgctttgtcatcgccatgatcaaccacgttgccgagaacggagttgtaaatagagtaggattcctgcaactgaccggctagataatatgcctgggccaggccaatgatcggcttaaatgtggcatgtgcaaccgtgtttagggcgtgtgccgcctgctccggctggtctatttttaagtacaggtatcccagattcgtgtagagcttgtcacgatccgctccaggttcgcacaacttacacgcccgagtgaaggcttcgattgcttggcgatacaggtttttccgggcgtagagaaatccctggaacgacagcgatgctggtgtcgcatccgtctcctcgttttgcacataccttaaatgtattgcaagtctttagttggttttagatagggcattactataatacttaccaattgatggcatccagcgcaagcacatcagcgtacatgtgttcgatggcatgctttatgcgcggcttgtcgaaagatccaggagtcgacagcatttcgcacacccaatgcgcaaatccaagcgccgcctccggatggtaatcgaactgctggcagtgacgaaacagatcaaaggcttcctcgcgatcgccaatcaactccgcaaccattgcttgtccaatccaagcgttggcgtacacgggacttgattgctgggctctcgtaaaggcctcgttggccaatcggacttcattcagtttaatatagagaactccgagattggtccacgctgtgtagcactttttttccagcactacagcctgaataaaacagtgctgtgccaatggcaagttctcattttcggagttcatattgataactccgagaagattccaattttgccatctgttgctacactccttaatggccattttgcacgccttagtcgccgtctctaagtggccgtttgcatcctcgggtatgagaatggcactgtagtagctggctaacgatagctcgtaccacaggtacgtattctgcttcagttttaaggcgcacaagtagaagcgctgagctagctgtagaagatccttgcgtgaaagatatgcaatgggttcttcgcgcttggctaggtttccagccacatccaagttggccaacgaatgcggcaactgggctgtctgaacgaaaatgttagctgagaggcgccatagccaaaccattccttgagcttcacgctgaaggaaggcgctgtaaggaatggataaaacttatcaacagatacacgaaatcgctggctgagctaatacctttgaaggtgttccagagccaattggaaatgcgctttggatcttccgtacaagttctggctcttcaaactattcgcaatgccaatatgcgcttcagcagcacctcgaagtccgggcaggtaagtaggattacgttgtagcagcgtatcgtaatcttcaatagattcagtgtacatgcgtattgtctattaaatggggtaaaaattatttatgttttcttgttaattttggaatgtggcaccgttttcactgaagctatttgaagcagggcataattattctccggagatagttcaaggatcttttgaaagactcgaatagccgagttgtacgagccgcgtcccgcataagcatcacccaatgactcccagtagctaatgcagcgggagtcattcttaatggcaatgcgaaagcattgtattgcctgcaataaaagtgttaaatcggattcatcaatgataatcaattgcttacactgtcccacttcttcacatgcgagaaatgcagacccagcttgtactgcaatcgaattgattcattgctacccaaatggctcaatgtgttcagcagcagggtctcgttcagttcctcctcgccctgttcttggtagataaagctcaaggcatccacagcttcctcagcgaggggattaaggcttatgcacttctcgtagcacttgcgggctcgtgagaagtccccagtggccagcgggtacagcttgcccagatagtcaaagcactcggcaaagtgtgggcgcagtcgagtggcctttaacacataatttagagcgtctgaatagtttttcagcgccatatgcagcttgccacaaagtaggtatgcctcaaaagtcttacagtcagcaatttcttgaagagcttcagatggagatctagtatagcagatggaaaaggtggattgacttctttaatttttggatttcctacttacaaaacaaattctgctttggtcagatcatccaagggcaaatctttcagcaagtgcagttcgcccagcttgaagtagcagctgcaaattaaataaactcttgttatgcattttattaaaccaaatactattgataaaaagctcaccgagccaaagacttaatattgccctcggagttttcaagcgtttgtaaaatcgtgacagcttctcttagttttgaaacgcctttttcgtgcgataagcatagagcataagcgtcgttttcctgtccaatttcctgccacagctgaagggccaacttgtatgcgcccagctccatgtggatacgagccagcaattccagcgttactttgtacgcaggttgacttttctgtgcctgcaatgccaactgcctggatgcgacgacctgcccctcagcgaaaagatccagggctttaaccaacaaagcaaggttagagttaggattaagctccagaagctgctcagcgtacacctgaatgggatgcctcagctcctgttgccaactaactatttcggattgctcgtggtgttcgcagtaggtcttgcatatccactcgaagccatagacatctttgggatgcgactcggtcatattgcaggcgtgccgcacgcaagtctcataatcctgcttcttgtaaagccacttcaggtatcgcttgtaaaccacgctccttgcactgggttcagagttctgcagcagagcttccatagtcgttttgtactgaaaaaagtgtaattagtcattacgcactaatttataataagaaattgagctatgaaagtgctcatatcaattataattctttatatttcaaaattatttttaataaataaattaataattatacggtaacttacaagctgagtatcttcgggcgcaatttcaaagtcgtttgaaacccaaatgcgtcccagatactcctgaattttcgtaaaatttccattctctgtgtcctgcactctctttttaagtacagtgaagcagaaaggagccacatttgagtcagaggccaagttgaaaagcttttcccaatagttcaaggattgttctctaaaaatgtaaagtaaagatcactttagtagtccttttatgacaaagtctagtatggatagtatggagtatggataatgaccagggagtcacgagcagattcttacggttgcaggtcagccaactgatcatagatttcaggcagttcgttgctgggcgcgcagttggcgagtccgaggagcgcggcaggggccggaccatccgtgcacttgatgcactgcctcaggtttttggccgcctccgccttgtcgatattctggtaggctgccccaagcaacaagtagcccatagcattttcaggctccgatttaagtaggcgctgcaataaaggcattaggatgatgcataactggtatgttctatggtgacgtcacttggcacttgggtatggcttccgcatgcttgcccagctttatggtctcccgaatgtccttgatcaaggcttttgactcttttacggcgctcattgtaaatatttatatttatttttcatctattccaaacaaacagtgatgggtaacttgattttgtataacgccagtgttggtcactgctgcataaggtgcaacagctgttaattaaattgtgtgctaattaagtgtcagtaaaaatgcacattatctgcaagtcgcagtgcggaaatcgcgctgctttgaaggtagttcataagttaaacagcccctaataaatcctaataatgttgtttgcccaaagcgacccaaaaccggcgatgccctgtgcaaggagtgcttcttcgcagccttcgaggcagagatccatcacacaatctcctccagcaacttgttccgacgtggcgagaaggtggccgtagcggccagtggaggcaaggactccacggtcctagcgcacgtgtatgtcgtaccattccccccatcgcacctctctaatccaagtgttctacagattaaaactgctaaacgaacgccataactacggtctggaactggtgctcctttccatagacgaaggcatcactggatatcgggatgacagtttggagacagtgaaacagaaccgtgacgactaccagatgccactaaagatcctgtcctacgaggagctctacggctggaccatggaccgcattgttgcccagatcggccgttctaacaactgcacattttgcggcgtcttccgccgacaggccttggatagaggggccaagctgttgggcgttgatagcatagccacaggccacaatgcagatgacattgcggagactgtcttgatgaacgtgctccgtggggacacggcgcgcctgcgacgctgcacgagcatccgcaccggcgggggcgaggataccattccccgagtgaagcccctcaagtacagctacgagaaagaaatcgtgatgtacgcccactacaaaaagctggtctacttctcaacggagtgcgtattcgcccccaatgcgtatcgcggccacgctcgagcgtttctcaagga

SEQ ID NO: 18788 - DNA, 3360 bp, DROSOPHILA
atgagcgccgtaaaagagtcaaaagccttgatcaaggacattcgggagaccataaagctgggcaagcatgcggaagccatacccaagtgccaacgcctacttaaatcggagcctgaaaatgctatgggctacttgttgcttggggcagcctaccagaatatcgacaaggcggaggcggccaaaaacctgaggcagtgcatcaagtgcacggatggtccggcccctgccgcgctcctcggactcgccaactgcgcgcccagcaacgaactgcctgaaatctatgatcagttggctgacctgcaaccagaacaatccttgaactattgggaaaagcttttcaacttggcctctgactcaaatgtggctcctttctgcttcactgtacttaaaaagagagtgcaggacacagagaatggaaattttacgaaaattcaggagtatctgggacgcatttgggtttcaaacgactttgaaattgcgcccgaagatactcagctttacaaaacgactatggaagctctgctgcagaactctgaacccagtgcaaggagcgtggtttacaagcgatacctgaagtggctttacaagaagcaggattatgagacttgcgtgcggcacgcctgcaatatgaccgagtcgcatcccaaagatgtctatggcttcgagtggatatgcaagacctactgcgaacaccacgagcaatccgaaatagttagttggcaacaggagctgaggcatcccattcaggtgtacgctgagcagcttctggagcttaatcctaactctaaccttgctttgttggttaaagccctggatcttttcgctgaggggcaggtcgtcgcatccaggcagttggcattgcaggcacagaaaagtcaacctgcgtacaaagtaacgctggaattgctggctcgtatccacatggagctgggcgcatacaagttggcccttcagctgtggcaggaaattggacaggaaaacgacgcttatgctctatgcttatcgcacgaaaaaggcgtttcaaaactaagagaagctgtcacgattttacaaacgcttgaaaactccgagggcaatattaagtctttggctcgctgctacttcaagctgggcgaactgcacttgctgaaagatttgcccttggatgatctgaccaaagcagaatttgttttatctccatctgaagctcttcaagaaattgctgactgtaagacttttgaggcatacctactttgtggcaagctgcatatggcgctgaaaaactattcagacgctctaaattatgtgttaaaggccactcgactgcgcccacactttgccgagtgctttgactatctgggcaagctgtacccgctggccactggggacttctcacgagcccgcaagtgctacgagaagtgcataagccttaatcccctcgctgaggaagctgtggatgccttgagctttatctaccaagaacagggcgaggaggaactgaacgagaccctgctgctgaacacattgagccatttgggtagcaatgaatcaattcgattgcagtacaagctgggtctgcatttctcgcatgtgaagaagtgggacagtgcaatacaatgctttcgcattgccattaagaatgactcccgctgcattagctactgggagtcattgggtgatgcttatgcgggacgcggctcgtacaactcggctattcgagtctttcaaaagatccttgaactatctccggagaataattatgccctgcttcaaatagcttcagtgaaaacgacaatacgcatgtacactgaatctattgaagattacgatacgctgctacaacgtaatcctacttacctgcccggacttcgaggtgctgctgaagcgcatattggcattgcgaatagtttgaagagccagaacttgtacggaagatccaaagcgcatttccaattggctctggaacaccttcaaagcgccttccttcagcgtgaagctcaaggaatggtttggctatggcgcctctcagctaacattttcgttcagacagcccagttgccgcattcgttggccaacttggatgtggctggaaacctagccaagcgcgaagaacccattgcatatctttcacgcaaggatcttctacagctagctcagcgcttctacttgtgcgccttaaaactgaagcagaatacgtacctgtggtacgagctatcgttagccagctactacagtgccattctcatacccgaggatgcaaacggccacttagagacggcgactaaggcgtgcaaaatggccattaaggagtgtagcaacagatggcaaaattggaatcttctcggagttatcaatatgaactccgaaaatgagaacttgccattggcacagcactgttttattcaggctgtagtgctggaaaaaaagtgctacacagcgtggaccaatctcggagttctctatattaaactgaatgaagtccgattggccaacgaggcctttacgagagcccagcaatcaagtcccgtgtacgccaacgcttggattggacaagcaatggttgcggagttgattggcgatcgcgaggaagcctttgatctgtttcgtcactgccagcagttcgattaccatccggaggcggcgcttggatttgcgcattgggtgtgcgaaatgctgtcgactcctggatctttcgacaagccgcgcataaagcatgccatcgaacacatgtacgctgatgtgcttgcgctggatgccatcaattggtatgtgcaaaacgaggagacggatgcgacaccagcatcgctgtcgttccagggatttctctacgcccggaaaaacctgtatcgccaagcaatcgaagccttcactcgggcgtgtaagttgtgcgaacctggagcggatcgtgacaagctctacacgaatctgggatacctgtacttaaaaatagaccagccggagcaggcggcacacgccctaaacacggttgcacatgccacatttaagccgatcattggcctggcccaggcatattatctagccggtcagttgcaggaatcctactctatttacaactccgttctcggcaacgtggttgatcatggcgatgacaaagcagctaccatcctcgtggctatggcatccatgatttacgactttcagggcgaagcggacaccaaaaccctactctatcagtgtgtcttgttgaaggaggtccccattcaggcgttgttttcagcccttgccctaggtatacttcatagagataatgcgttgatccatacgatactgacggagctgaatgcgtacgcctttaagaaggagtattgtgccgacatatcctatttaacggctcactacatcctgataaatgttcgttaa

SEQ ID NO: 18789 - protein, 1119 aa, DROSOPHILA
MSAVKESKALIKDIRETIKLGKHAEAIPKCQRLLKSEPENAMGYLLLGAAYQNIDKAEAAKNLRQCIKCTDGPAPAALLGLANCAPSNELPEIYDQLADLQPEQSLNYWEKLFNLASDSNVAPFCFTVLKKRVQDTENGNFTKIQEYLGRIWVSNDFEIAPEDTQLYKTTMEALLQNSEPSARSVVYKRYLKWLYKKQDYETCVRHACNMTESHPKDVYGFEWICKTYCEHHEQSEIVSWQQELRHPIQVYAEQLLELNPNSNLALLVKALDLFAEGQVVASRQLALQAQKSQPAYKVTLELLARIHMELGAYKLALQLWQEIGQENDAYALCLSHEKGVSKLREAVTILQTLENSEGNIKSLARCYFKLGELHLLKDLPLDDLTKAEFVLSPSEALQEIADCKTFEAYLLCGKLHMALKNYSDALNYVLKATRLRPHFAECFDYLGKLYPLATGDFSRARKCYEKCISLNPLAEEAVDALSFIYQEQGEEELNETLLLNTLSHLGSNESIRLQYKLGLHFSHVKKWDSAIQCFRIAIKNDSRCISYWESLGDAYAGRGSYNSAIRVFQKILELSPENNYALLQIASVKTTIRMYTESIEDYDTLLQRNPTYLPGLRGAAEAHIGIANSLKSQNLYGRSKAHFQLALEHLQSAFLQREAQGMVWLWRLSANIFVQTAQLPHSLANLDVAGNLAKREEPIAYLSRKDLLQLAQRFYLCALKLKQNTYLWYELSLASYYSAILIPEDANGHLETATKACKMAIKECSNRWQNWNLLGVINMNSENENLPLAQHCFIQAVVLEKKCYTAWTNLGVLYIKLNEVRLANEAFTRAQQSSPVYANAWIGQAMVAELIGDREEAFDLFRHCQQFDYHPEAALGFAHWVCEMLSTPGSFDKPRIKHAIEHMYADVLALDAINWYVQNEETDATPASLSFQGFLYARKNLYRQAIEAFTRACKLCEPGADRDKLYTNLGYLYLKIDQPEQAAHALNTVAHATFKPIIGLAQAYYLAGQLQESYSIYNSVLGNVVDHGDDKAATILVAMASMIYDFQGEADTKTLLYQCVLLKEVPIQALFSALALGILHRDNALIHTILTELNAYAFKKEYCADISYLTAHYILINVR

SEQ ID NO: 18790 - DNA, 7587 bp, DROSOPHILA
acgaagcttggtaagcttcaagtaattactggtatttttccttctcttcccgaggactcaaccttttcgccgcctcgttttcatttcattttcatttgatttccagtaatttttgggcgaggtgcccgcacaatacccacttggcttatgggctccaaggagccggaataatgacccaaagtcccagggtgtgtttgttgtctttgcggttaagtaggagtgggcatgttctatgaagtagatgaatgttgatgaggttccctatctaactcccgctccacggccaattgctgacccagtatttcgctgggaattagtggaagcttcgcttccataaatatttgattgattcaagctgctgctggcaggtgttttgattgatactcctatttgcttatttatttatagtcacggagtgttgttgacaagcaggtgtccactaattagtttctgcatgtagttagtagactatttctgtcaacttatatataattttaatgagctttaagatgaaaaaagtttttttcttatcacagtgccatttaattctgatgacagtttccagtcagatgattaactggtctatcttttatcttaactttatttgcccctaatctcaagagctcaagtagcagacctttagaccacagattgcataatacaaggtcgagtcggaaagaaaccgagctataaatctcgctaatttaaaaaagttaggtaaataattaacacacatctataaatttaaatttctgtttatggtttgcttccttgctgagctgctcggttgatgtctcggcgacatagatcctcgaatgggttcacttctctgctttcgcacaaaattggttcagttgcctgcttaaaagcttgggatcagttggtgtctctgctaaagtatcgttatgaagaatgcccataggatctaaaactcaggtcgactttttagctccagaaagcttcgagcagaaaattgaaataaattttcagttgtctctagctgatcgccgcgatctgatcgtcgttacacttcatttgatagtaaaatcagtgaatttaatttaggattttcgtgcggttgtttgtgttagtgcgactgttaacaaaaggagccatataaacaaaagcatagagaaattaaaacaaaaaaaaaactctcttatatttaaagtgctttgtttatgcccaacttgtgtgtgccacttttctaaaaatttttgggtgccttttacacgctacttgtggatcggccactttctttaactaaaaagtactttttcgcgttgttaggcgagcatcaaaatttgcatctacagaaacccgccttgattaaattcgatgtgaacctgcggccccttaaatgagcacatgaatagataacgaaccgaatccgtcactgttttgagatcgctttttggcctcgtgtgattgacaaattaacgcattcagctcgattagcatctgtatccaaactggaaaagttctattagcgattagcgatcccatagccagacttcggttctcaattgtctctcgattgtggcattttacagaaccgatatagaagcacaattacgcggaaaacgacctttagttgggccatcccagatatattgtatatacaccatatacacctatatagagccgatccgtgacgcaccgcccagcgattctacgtttagtgggtggcggtgacagcataagcaagaaaaacccaataaatttcggcccaaatagcaacacttgtctaaatgcgagatcgtcacttggccaaaatgccgcgtggaggaacgacaacatcgtaagtcccaaaaatcgaactaagaaaaccaccccccagggccagactttagacctaatataagcaaattgcgtgtcgttctcgagtgtatttatttaatttgaacaattgccgcttgtggagaaaagtacttcgatcgtacaagggtacatacatatgttaagtgatagtgtcaggttgttgtagcgcgaattcgattgtatctgcaagatacaatttcaagcacacatgcacatgtacatatgtatgtatgtatgtgtggtggttgagctcggattattggatcgtacccgcactccctttgagagatcgcttcaattaaacaagccgcgacatcgacgtcgtctctaaacaaatgccagacattgtactataaaataaccccccgcagcatcgaatcgtatcagatcggtttggatcagaccatgcatgccgtacgagtacttcgtcataatcaacccgcaggatacgcagaagtgtgttggagtgttcgagtgattttcagccatgcgtgcgacagcaaatgttttaatttgccgcgatccgcagacttttaattgtgcattccgcgtcagctcgttacttgttacatctgatggtttctttaattgaattgtgccctggcttcctgctaccaattctctgccactaggttttcccatatattcatcttttcagcggtagcattgctccacatttattactgccacaagtaaatcaagctataggcataattagcctggttatatagaggcctctggtttgccctatcatctgattagtacacttttttgtagatccactctcagttggacatcccgcagtcatggtcatcataatctccatcacatgaccgagataagatgttctctaattgtatcccactgtagtttctcgagaagagtttgcttatctgctgataagaaatgtaaaaggcttagacttgactaaacgcattttatctgtaaaatataatattattttaaacttgatgctcgcggaaagcaaatccaatttgcatatcttagatagaggagcccgattatatctcatagctgaaaagattttggtttagagatttttttacgcattggccaaagacatttttgggcagaattaaatcccataaattaagacatcaagttttactgttttccattaggcttttccaactacttgcattttataaaattaagaaaatgtactgtatgccaagtcataaataatccctgaatcaatcgtggttttctcgccttatatttgcacaaataatgcattaatttgcatttgctaaatgactgcaggaattggctgattacgctgcaaagccgatgcgctttctctgtttttcctacctcccatttgcagtgggtgccacctccaagtcaatagcctctcatccacgatgacccattagccatgtgtggctgcacctaggccaaaaacccggctcagagagtctggctcagactgaggctgaaactaaggttcaggttcagattcgaatacacaaaacaggtggcggccaagaaacgagttttccataaaacgaaaagccttaagcgaaaatttctcagcgcagcgggcaaatgaaaagtgaaagagatacaaatgtgcagctaaagatacagatacattcgcagacacaccgcacactggtgtgggcttgttttccaacaatctgcggcaagtgaaatgtgtgttaaagcaaacagccactgcacatccccttccccccttccacatcctcacccccttgcaatgtgttgatagctaaatgcctgccccaaccgcactaccaatcccaaacccataaccatacccataccaattcccaagcccaaacccagacgcagctgcagccacatcgacaaccacactcacgtccactgcggcggaggagtgcaacgtgtggcagacactcgttcattgacaccgccatcggatgcacagcaagaaacatgatcaatgatcgtcattaatctattttaaagtcacaaacattcgcctatgaacaaacagaactaatttcttatcttcaattaaaactatctcgatctaatcagtacattaataattcaatcatctttgatcttaaagtgtggaagaatatttgttagcaagctattttaacgctatggttatattgattgtaatcccttgaattggtttttaattataattgaatagtaaagcattgtatcgtattaatttttttattttacttatgaatataaatagcttaacaattcaatatatctaatgcatgacaactcatgtaactgacagcacatataaatcgcctttttatttttatttttgaaaatcttttaagaaaatgacatcaagaaatcaataagttaagtacttaagtactcaagtacaatataaactaagtttagaaggaaaacatttgaacccgaattagaatatcatataatttcctttcagactcaggttataaatatatatttcgtacaagtcccagttgagtccccacaatttttccgagtgcctccgatctttgggcactcagtgccacgccgatctcgctccgccgtgtccgatgcggcaagtccgttgcagttgcacttcgcggatagtgtcgcatgtaaattggagcagcatcgacggtgccccatggcattatcttcacaatgcagtgatgcaagtgtcgtgaaagcgagagcgatggctggtaattcgattcgcttttgctttcattatcacaacagggggctcgcactattaatttaaataatcgctttgtttacactcgattgttgcgccaatggatttcggaatttcgaacgaaaccaaggagctgcacttggcgatgattaggcggttggttggcggccagcaatgcgtctaattgcgctgagtgcacaatatgtatttctactccagtttgcctgcaggccgttaactttcgaaagatcaacagatggctttggtttggcaccccattgtgtttttctgggacttctcccactgcactgcacactgatggatgatggctcatacggatctctgtgctattcggctggatgagatcattgcgcccatcatgagccatcgaaattgtatgtcatacgatcgcacgacaagtgatgaaattgatatgacagacaggccgcaattgggtggaaacaatacacttttgactccattaccctttccccagctgtcaaaatcatgcgataggataaacttttttttcaaatcatctacaccaaatccaaactaaaaattccaggacaagtgaaccagcgcaactctacgcattgaagaaaattggatatttgctaggcaaattagataattgcgatttcgcttaagtccactgtaatcccacttgatccatctatccatctgttgtccatcaattaagccgattagcagcacattcaacccgcaattagcgtaatctcttgagaatctctggtagaatctccataattcgaaggcagaccctcggaatcatcataaattgtgttaaatgagggcaaacctacataccccagattgtagttgcacttgcgtctatcccaagaaatcagaatctgtaaatttgttgtatcctaaaaataaattatatatactgattatggtcttaaatacaaacacatcaaagtatgaaacccattgacggaccctttatagatgaattgaatcgcatgttctttcatcgacccaacttcatgaaaactcggattaaaaagtaattgtttcagtgctatttcatatgctatcatggattgtcctatgctcctatctcgttacaggcgctatgaggaggatccagataatgcctggaattgctgctcctggtgcgaatacttgctgatcgtcatcctgtccacgatcctgctggtgggcgtgctggtgctaaccctcttctgggtgatgttctaccgcgatggcttcgcctggtcggagagtcccaagcagcagttcaatctgcatcccatcctcatgattgctggcttcgtcacgctctccggattttgtaagtccatcccaattgtgcaaatgtaccaatcttaatcttatgtgatatactcgtacctcccccaattagccatcttgatctatcgtctgtgccgctgcgtgaagcaaatctatgtgaagctgatccacatgttcttccacgccgtggccattccgtgcatcgccctgggtttcatatccgtcttcgcttcccacgacgcgttgcataaggtcaacttctatagcctccactcgtggctgggcttcgtgacaatgggcatgttcgtgctccagtttgtgatcggcttcttcaggtgggtctccgcaactcggtgtcctaatccggcatattaatcaaaatcttctttagctttctggtaatgctgtgctgtgagaacaagacctacagctgccgctcggccatggtgcccatccacgccagcttgggactggccaacttctggctggccattgccacatccgtcacgggactgatcgagaaggagcgcgaaaccgtcaacgaggcgggcgtgaggtaagaatagttttaagtactacttttaggcattgatatcaatggttaattcgttcgtaatatctttacagcagtgagaacaagctggtggagcactacatcaccagtgccatcggcgtgaccctgatcttcattggcatcatcgtcaccttcgcggtgcggcgttccaatgcgcccgcctcggcgaaggtctacgtcacggagcgcatttagacggtccgtccggctcgtcagagtctccgccgccggaattggtccacggccaggagggtaagcgagtcgcagcaggtgtacccgaggattccggaactcggtgacttggactggacttggggaaacggaccggcggtgtcctttcgccaggcttagcgcacagagaccacgcttctgcaactctatccgaaccctttgtaaccttttatatgccaaattaaatccacatcatacacttagactactccatatggctataatcaaaacctttgcccactttcaatctctcagtaggtgtgtaggattaggaatctcagcagatgagcagaagaccaagcaagcaaatctaatcaaaattttgacgtgttcagccgaacttactgatgcatccaggcacttgcaagctagattagccagttttttggtactatagtagaattttgatatactcgtaagcccatgtaactagtgtatgtatgatcgtaccacgtaacgcattgaatgtacgcactcggactcaaaactgtcgcatttgatgtttttttgtaatcgtgcaagtatttgtattttcataatgcgctaagcaacctaagctgtaaaccaattttacaaacaaataaatacttttgccctgcctgagggctctcataataatcgcaattgtttatgcactttttaaatatttaaaaaacggtgagaactcggaaaataaacaaatcatattcccttgaaagggaaattaaacagaagtgatggggattgtcttattttctttgtgtgataatagtcgaggttatcagatggacttcagatatatatgtctaataggcattgtctatattcctacttcaaaactacttctactttcaaaatcatttgaaccatgtcatatcacatcatatcgtattatatcatatctttattctacacagtctttgccaaagtaatatccccactaaaagtatcaagatcgttattttgatagtccccaaagtttgtccacgtatagttccagaatctgggatcagctcgaggatcagctggt

SEQ ID NO: 18791 - DNA, 1088 bp, DROSOPHILA
ctgatcgccgcgatctgatcgtcgttacacttcatttgataaaccgatatagaagcacaattacgcggaaaacgacctttagttgggccatcccagatatattgtatatacaccatatacacctatatagagccgatccgtgacgcaccgcccagcgattctacgtttagtgggtggcggtgacagcataagcaagaaaaacccaataaatttcggcccaaatagcaacacttgtctaaatgcgagatcgtcacttggccaaaatgccgcgtggaggaacgacaacatcgcgctatgaggaggatccagataatgcctggaattgctgctcctggtgcgaatacttgctgatcgtcatcctgtccacgatcctgctggtgggcgtgctggtgctaaccctcttctgggtgatgttctaccgcgatggcttcgcctggtcggagagtcccaagcagcagttcaatctgcatcccatcctcatgattgctggcttcgtcacgctctccggattttccatcttgatctatcgtctgtgccgctgcgtgaagcaaatctatgtgaagctgatccacatgttcttccacgccgtggccattccgtgcatcgccctgggtttcatatccgtcttcgcttcccacgacgcgttgcataaggtcaacttctatagcctccactcgtggctgggcttcgtgacaatgggcatgttcgtgctccagtttgtgatcggcttcttcagctttctggtaatgctgtgctgtgagaacaagacctacagctgccgctcggccatggtgcccatccacgccagcttgggactggccaacttctggctggccattgccacatccgtcacgggactgatcgagaaggagcgcgaaaccgtcaacgaggcgggcgtgagcagtgagaacaagctggtggagcactacatcaccagtgccatcggcgtgaccctgatcttcattggcatcatcgtcaccttcgcggtgcggcgttccaatgcgcccgcctcggcgaaggtctacgtcacggagcgcatttagacggtccgtccggctcgtcagagtctccgccgccggaattggtcc

SEQ ID NO: 18792 - protein, 267 aa, DROSOPHILA
MRDRHLAKMPRGGTTTSRYEEDPDNAWNCCSWCEYLLIVILSTILLVGVLVLTLFWVMFYRDGFAWSESPKQQFNLHPILMIAGFVTLSGFSILIYRLCRCVKQIYVKLIHMFFHAVAIPCIALGFISVFASHDALHKVNFYSLHSWLGFVTMGMFVLQFVIGFFSFLVMLCCENKTYSCRSAMVPIHASLGLANFWLAIATSVTGLIEKERETVNEAGVSSENKLVEHYITSAIGVTLIFIGIIVTFAVRRSNAPASAKVYVTERI

SEQ ID NO: 18793 - DNA, 3028 bp, DROSOPHILA
cctttgtggtcttcacctcaaagtttttcgtttcctttggcttggcaactggaccagcggtggcctcctcctgcacaggtttttccttcttggaatcactgccattggcgctgcagcgaaactgaaggaacgtgcttggtcgcttccacggctgtagtttgaatgcctcgccgtcatgccgcctccaagggttcctgccgtcttgacgtaaggagcactggctaaaagcctttcccaagtgctggtgtcttcgctgcaggatctgcacgccgcgcaacagcatcctgcactggaaaggaatacatattaggcttatctcttccacacatatggtaatgcttacacggcgcgctgcgtcactatcgcactatagattccaatcagttcttttctattgtggggggtgctccgtggtttctcctctagcgcaaaactacgtcatgcgggccaaatggaacgggtgcaaaacgaattgcggttgtaactactccggatagggtcgctctgtggaatgctccaatcgttcctggggccacaatccttggagcgttgagggcgtacttgcaaatatgctttaaatatacattggcgattttttatactgaaaatttaaccatcaccggctggcgctttttgcctgtgctttggccgttgatgttgtggttttcttttcatgccgaaacagcttggtcacacttacagagcttatcaattgttctcactatgcagcattttgaagagtgggagacgcaaataaatacaaagatcgcaaatctaaaaattcgtaccatgaaagcatttattataattcttataaagcggcttatctttatatccatatacattgatattactattttatatatttggtcagaagaatgccgtaaaatgttaaagcagtgtgaacaaccgcggttattaaccgccttggtgtctttaatactgttatcgatagtggctttaagcttttgtcagcaccagcggcaacagctgttttctgccggtcgttttataatcagcttattgccttttcttgctttctttttatctgttttcaacgttaaaatgtcaatgttaataaaaagagcgtctggtttagctcgacagttagcccggccacttgttgcatcacgtaatttggcgtcggcagcgccctatggcgatggaactgaagttctcgtggagcgtttggatggagctcggcagggtatctcagttattggcctaaaccgaccagcagcaaagaattcctttagccggggaatggtggagaccttcaacgatgtcctggaagatataaagaaggataatggatcgagggtggttgtattgaggagtctgagccctggaatcttctgtgccggagcggatttgaaagagcgaaaaggttaatccttaaatattttacatccctgtgataaagctaacttatcttatacatatatcccaggcatgactcccgaggaagccaccgaatttgtaaaagagctcaggggactgcttattgccattgagcagctgcccatgccggtaatcgccgctgtggatggagctgctctcggcggaggtctggaaatggctctggcctgtgacatccggactgctgctagcgacacgaagatgggtctggtggagacaaggttagccatcataccaggagctggtggcacccaaagactgccccgcattctgtcccctgctctggccaaagaactcattttcacggcacgagtgtttaacggagcagaggcgaaagatctgggtctggttaaccatgtagtgaaacagaacgaaacccaggatgccgcctatcagcaggcacttaaattggcagaggaaattctcccgaatgggccagtgggcgtgcgaatggccaaactggccattgacaagggcatgcaggtggacctggccaccggctactccatcgaagagatctgctactcgcaggtgatacccactaaggatcgtttggagggactcgctgcctttgccgagaagcggaagcccgtctacaagggggagtaaatagatatcgtgccactcccctaacgttaagctgaaaattgcatttattatttaacctgttactgttgtagaaacacttaagcggcaaagtccagttcaattgtttttattaaaagcattcgatcctatcgagctgccaaataacttgaatgacgctaattgtagctaaacaatttttaatacctgtgatgacgcatctcaatttagacatgggtgggaatactaattacaggcattaaaaacgaccgatcgacatacactcctatttgcattacatgaattcgcccagcatagaactgcaaattagatgcaaggttcagcttgatagttctgtcgtcgaactatgcggaaatcggaatttcttgagaatcccagagttagaaactttctattgtcatgcgagctgagtgtgattgcatggcaaatcaacctacaagtggcagtttttattaccagatgagtgtgccttcgtttgtcatttgtaaaacaggtaatttgcatgctgcaaatatttgtattacagggcgtgccccgccacacttattgtgtttttggggcctgcccaaacaactgggttctgtcacctggagcaacaagacacaaaacaggcgctaaataaattcactttgtggagccgccgtttaagatttaaccggttagtcaaggaagttgtcacgcggatgactgggagcgcgcacccccactagcccagattttggttgcgaatctaaattgcgtcaccatctcacctccattcatgatcgaatttcgcgcctgtggccgttaaataaaaatgcgtcgcgggtgtttgacatcgggcaaggtcagtttcgttggcagaagctgtgtatatccgaaatgtaggaatctaaatccaaaatctcaaccggcaagctgcgcagtgtgcatattaattagtcaattaattaattactcagtgctcgatgcgtccatttcgtaccgagttgaccccaagacatgacgagaaggcagatccgga

SEQ ID NO: 18794 - DNA, 965 bp, DROSOPHILA
ccggtcgttttataatcagcttattgccttttcttgctttctttttatctgttttcaacgttaaaatgtcaatgttaataaaaagagcgtctggtttagctcgacagttagcccggccacttgttgcatcacgtaatttggcgtcggcagcgccctatggcgatggaactgaagttctcgtggagcgtttggatggagctcggcagggtatctcagttattggcctaaaccgaccagcagcaaagaattcctttagccggggaatggtggagaccttcaacgatgtcctggaagatataaagaaggataatggatcgagggtggttgtattgaggagtctgagccctggaatcttctgtgccggagcggatttgaaagagcgaaaaggcatgactcccgaggaagccaccgaatttgtaaaagagctcaggggactgcttattgccattgagcagctgcccatgccggtaatcgccgctgtggatggagctgctctcggcggaggtctggaaatggctctggcctgtgacatccggactgctgctagcgacacgaagatgggtctggtggagacaaggttagccatcataccaggagctggtggcacccaaagactgccccgcattctgtcccctgctctggccaaagaactcattttcacggcacgagtgtttaacggagcagaggcgaaagatctgggtctggttaaccatgtagtgaaacagaacgaaacccaggatgccgcctatcagcaggcacttaaattggcagaggaaattctcccgaatgggccagtgggcgtgcgaatggccaaactggccattgacaagggcatgcaggtggacctggccaccggctactccatcgaagagatctgctactcgcaggtgatacccactaaggatcgtttggagggactcgctgcctttgccgagaagcggaagcccgtctacaagggggagtaa

SEQ ID NO: 18795 - protein, 233 aa, DROSOPHILA
MVETFNDVLEDIKKDNGSRVVVLRSLSPGIFCAGADLKERKGMTPEEATEFVKELRGLLIAIEQLPMPVIAAVDGAALGGGLEMALACDIRTAASDTKMGLVETRLAIIPGAGGTQRLPRILSPALAKELIFTARVFNGAEAKDLGLVNHVVKQNETQDAAYQQALKLAEEILPNGPVGVRMAKLAIDKGMQVDLATGYSIEEICYSQVIPTKDRLEGLAAFAEKRKPVYKGE

SEQ ID NO: 18796 - DNA, 9171 bp, DROSOPHILA
ctatggagctcaaaaagagctgcatggtgtcgcgcattcttgagctgcctatcggggacttataactttattacacttataaaattattaagttattacttttgatataattctaataatagtcacttaaattcctataattggcttttgttggctaattacaaaataataataccactagttcctttctcagaacttgtaaaagttcttagtttcaaaagattgatctttaagtgcaattgttcttgtgttctgaacttcattataaagcatatattccattaagcttttttgtgcagcttagctgctgcagttgattgatagatatcgttatctgtgaagaatacagggtgattcgatttccttaacaattaagagtaatcagcgtagaggcgatcgcccccaaaagtatgcctaaactctggacggggacttgggaattttcccgaaatggaatggaatcagataagcagtatgtgttcgtaagccaaacaaatccaattcgacaaagtagcacccacatacagcagataagaatcccgctcctaacaacataatatattgcgcttgcactctgggcacccagttatcctcatccgtcgaatacaccgatcctcctccacctcctccgcggccacacggcgtatgagtaatggagcgaggcagacttgtctggccgtcggatgcccaatgctgtgtgatctgtagaaagcacccatacccacagcgcatatatatgtatttgttaacctttttgagagagaggccgacttcgccccacctgcgtcacggtaacgtttattgtccattgcgctaattgcacgaaccaaagccaaaacgccttcgtctccgagcttcgctgggatgtgggaacacacaaacgcacaatatctctgtgtgtgtctggccgggtttatagccgctctggcgacgccaccggagcaacaaattaaagcacaaacattggcttaatatcagtcactaagcgatcgtccgacagttaacaacaaatcgtcagcgatcagggattaaaatcaaaaacgaagagagcgcgcgcgaatttcgtaaatccttgcaacacccgagcaggtgttaaaaattaaataattaaacaagcaaatggttaaacagtgttgattgctactgcaaattctggccttataatcgcaccgccgagcacatccgtcattaacgcgactgtgtgaaaaactcactttttcggcgtcaatgtcgaggagaaacgattggatcgggcaattaatataatttctctataatttcgcatcaaagttcgcagcgaactaaatcggtccaaaaggtaatattattgtgctttgggcaaatgatttgtttgtttacacggcgcttttcgtgttaatgtgccccaattatttataattaatgcccgcacatcaaatgagttatcaggcatatttatcggatgcatgtgacaataaaaggaagtggctttaacttagaaatcttcgatcggagaacccccatttagtttcaattggcccattgtgagtgggaaaaatcattgtgccccctatttttttgttgcggtgataagcgtcaaattggatgtcataaaagattattggctcagttttatcttgacggctaccttacagttccactactcacggtacaataaaccgggcgtttaattcagattctcgaaataaaaataaacaaaaaaaaaaacaccttttgacaacccgcccaaacagttgtcatttcaagtccgcacattatcacatcatcgttaatatataatatggttaatgcccgaaagttgaataatcagatagatagctgcaagttcagcactacaaagctgtcgagctgtcccatcaattatgccactcaggctcatacgttttgcatatcgaaagtgggtgcgataaggtcgtgggaggcagtttccagccaatccaccttacaacgcgagatcgcctgacactgggctcctttcccagctcgcaactcccccgggtactgaaagaaatttgtgaagttgaagttgtatcttttaagttacgcaaatttaggaaacatttatataaacagataataaattaggatccaattaggataactttaacttaagaaactgtttaaaagttaatgatcttatattcgaaattagttttagaaaacttgaaaaaacattacaaaaaaatgcaaactactttgcaattgttgcttaactgttacttcctttagtaattaaactgatctgtgataattcaataagcttcaaatttattataaaatgggctacagatatttctctcagtgtttttggggcctaatgaatgatattgacagtctgtcaggacggtcaacgcttttgctcactgcctcttcttgcggcacgtgaagcgaacgcacaagcaaaacaaaagcagcaaaaaagcgaaacaaagacgaagcaaaacaaaactgaaaactggtaacaaaacggcaacaaaaaggctgtcttggctttaatggaatgcattgacccaaaagagatcccactcgaaatgccattcaaaaagtcggcatccaattaaaggtacttaaggcggtgctcgagaattggcagggagaaattcctatagccacgaaatacccacccatttcaggtgtacgcagttttttgcggtttatgcaacagatgggaaggccgtttgcttatggaagcaggtcagggtataatgcagttaatactggagtatacagcttcgataaggcaaaaccggagataaaggtcgtgttttgtaagccataaaccttgctgagaaggaataatacacagggcaatctgctcgatcaaaacagcatctttttttgaaaattctccaacgaattcaggtcaacatccgaaaagccgcacctaccgcacatggcttttatcgtttgacgtagtatttttcaattaagattgtataaatctcaatataattgtttgtgtaaacatttgcatccaaatctttcgtgttccgtttcgctcattaggagaaaacccccaaaacccaagaagttagttgctgtgccagggcaccaaatctttcttaatggccaattaacacccaaatcgaagactaaatacatacatacgaactgcgatgacgcacttgatgcgatcctttattaaattatagttcaaatggcgtaactaattaatgtaattggccataaagcgaatatggcgacagttttgggatcgactaggaaaaataatcaatgtccgaatgtcccgatatgattgatatgatgatatgaaatggggccccccagtaactggaacccaattagaagtcgatcataaagatttagcgtttcgatttatcgatttgtgcgccccacataaaaggcaatcgtattgggtaaacaacaaataatgtccgatcaaaagatatttagggccttccaagtcgcaaatcaacgggttgctctctttatataagaattaaagctatggtatactaagtattactgaccgctaatcttatcggtacacagataatattgataataataacgcgttccttcacgattagtggtcattaaacgtaattatttgatttcctagatcgtaattagccatcaagggtctatagatatagattcgcataatagctaattactatcatttgaaacgagctgccttaaatcaatgaactagtacatcattgataggcagagcactcttgatttcagttccaattccctcgtggtcagcaaatcagttaactggattgagttctagtctctcggattcccgatgggttcggttcttttcggcttggttcggtcgcgataaggtggttatcagttgataattgattttaaaggcagcttcaggtttttttttatttatttctattggctgtgaatgtggcatgctgcgggcatttgttgtttattgattgttgtagcctgtcttgctttaagtcgttatcatatctggacattattattatttcgacgcttaccgacacttttcggcgccgtagcccccgagcccagaaacctttcccattggcctggccaaccgatcgttcagttgcttttggccagaggacgagttcggtcctcctttgctccgaataactttttcgatccgaatatcctagctgaaatgtaagtagccggaaacgtgatgttacgtatatacttatcgcgtctttgaaaccaatcaagggattacgagtttttcaagcaaagagaacctgttgtttaattataaatattgtacactaatttaaacgtttcgtcaaaaatgcatgactaagtacgatgtgttgttctgtataatttctaccaacttgaagttaaacttcattaactttgcgggaaaaatcgaaaacaatgatactggcacaatttggaaaattttccattcctctaagactttatgatcgatcgaagttaagaatgccattcgaatggagatagtaatcacagtagtatcttatttaattacggatgaattaattcatttgattaagactaagtagttcaattttaaccaaatttgattagctaagaattcaagcatgtgacccctcgtttattggttgttaaacattccattgtcaaccaatttgtggccttcaataccattagtattttcatagtgctacaataaaagtttcataaattttaaagaagacggtgcgcgccataaatacaaataaatcgaagattaagctaatctaggttcaaagaatacgctcgaagtggatcagctgccgcgaaagaacgtcaagtatttcccaaaggaatgaatcagctcaataggaaaaataggtggtgactactatatggacgctgatttagggtccgattatatggccgaattacaagcgcttttagggcaccataaagctgcattttatgaacgaagtgccattgttgtttatttgctcgaccccactcccagctccattcttagccagttgcgataacgatcggccagtgccagaaatctctttgctaaggcaattctaatactcgaatgtttccaagagacgataagatacgcctggcttgtgcctagcaacccttgaacggatcaacccaagccttaaatggccaacgcaagcgaatctcgtgcttcctttcgccgataaagcccgttcgtgtggggccgatcaatcaagtgtgctaatttcattaaacaccaatcgatccacgattatttacgcttccagatggcagataacaagggatttacccccgatggacaggaatccctgccatcggcgccaacagtcgagaacccgcctccatacaccaacgcaattaatgacttcaactcgaagtgagtacgcccagctttatgttcgcatttgattgaatttgacccatattaagttatttttttttaaactttacttacatttgaaagtccctaaaacgtacaaatggtcctcctttcatttaacaaatatcattaatggataacttaatagatgataaaacaacattattcccgttctatatagtaaatttaaataagtaatttttgattttatgtttattgttcgagactcttaagtttaattcagataacaattttataacaagcttatcattgtccttttaaataaggtataatgaaggaaatatgtaaaaaggaaaacaggacataaaattaataaagttttcaaattctttcacagtaaatgaatataaaattatttaacaccatagaaatggatgtgaatttaatacatttctggaaaaaatataaatatagatatatgtttgatagaatgcatagttaatactttctcacctttttttttcgcagagccaacttgacggaaaaagagctttccctcacggatgatccctaccatcccttcgagcaccgcgatcccaatggagccagtgccggcggcgctttggcgcacttgctcaagagttccttgggcacgggcattctggccatgcccatggcattccacaatgccggtctggcctttggaatggccatgacgctgatcgttggattcctctgcacccattgcgtgcatatattggtaagctaagtggccacaaatttagcacctgattttcgttgttgactcaagcaatttacgacagacagcagccagaccaggtgagccgcataatccacggctgacgtatgtagttccctgagtcttaagtagttcaaggtgcccaatcaatggagccaatgaatcaatcgtacctagtgcccagataagcgtactgcaacggccagtccaatcgttgcacgtgtctcaaaaaccaagtccagtcccacttgttcttatcgccgaagatacaatgtgcgattgttgtagctttacgacttccatttccgatcctcgcgaatccctaaaaacgtaatttcccagaattagctgcactccaaatttccagacatcagggatcgcgtgccaaaacattgcgtaaatcaagcaaatgtttctcggaaagtccaagtcaccgatcatccattggttataaataaaaaatgctagcgtactctataatttagccactcgagttagcagatttatggcatttggattttgacagtcattttggaacttctcaagtgcttagctgcgatcatttagatttactattttttgatatatattcctagttaaaaatgttcttaatttgataagccggctacttcctcacttcaacttcatttgatttacaattaacatatgatgacgtaatactttataatcgctttccgcttagggaataataaactgcatcctcataagctttagattatctctaaagtggaagtcaagtctctaagattaatactatatcttaattttgaagtagtattatttatttagacttaaaacttagtgataaccttagcctatttgtttaaactgcaataaatttctatttgattaatggagtagaagcttagagttcaataaattgctgtctatattataaatcacctttttcaatgctttaatgaatcctattaactaacgacgttccaacattttttattcattcttgcaggttaaaacttcgcatgacatttgcagggatgccaaggtttcggctctgggatttgctgagacagctgagaaggtcttcgagtacggacccaagggaatgcgaccctactcgaatttcgccaagtgagtaaagcttacaggagatgatccctaatgctaatctatttaaaaatctccaggcaatttgtggatatcggactgatggccacctactatgctgcggcatgtgtatatatcgtatttattgcgacatccttccacgatgtcattaactatgatttgaagatcaactgggatgtgcgtatttacattgccctaaccgtgatcccctgtctgcttatcggtcagatccgtgacctgaagtggctggtgccattctccatgatggccaacatcttcattgtggtcacattcgcgatcacgctgtattacatgttcgacgagccgctggtttactccgacaagccactgatcgccaaggctgcccatattccactctttttcgccaccgtgatctttgcgatggagggcatcggtgttgtgatgcccgtggaaaactcgatgaggaagccccagcatttcttgggatgccccggcgtgcttaacattgctatggtcactgtggtctcgctctatgccatcatcggattctttggatatgtgcgatttggcgaccaggtgcgaggcagcatcacgctgaatctgccggaaggcgcctggctgggcgatacggccaagctcctgatggccgtggccatcctgttcacctttggcctgcagttctatgtgcccaacgagatcctctggcgcaagatcagtcacaagttcagtcccgagaagcacaatattacacagattctgctgcgcagcggcattatcctgcttagcggtggtgtagctgctgctatccccaacctggaacccttcatcagtctggtgggtgccgtgttcttctcgctgctgggcatctttgtgcccagtttcgtggagaccgtctatctgtggcccgaccgcctgggcgtgtgcaagtggaagctggtcaagaacatcttcctgggcgtgttctccattcttgccctggttgctggtgccgtcgccagcatcaacgagatcatcgaaatgtatagcgacgacgactaaggattcgatatgtatgggttcaaccttcaaacagagacgtagtattacactagatgcaggtagctccaacaatggaagcgcgatgaaagacaagtatgagttcaaaaagcaggcgaagcccacattcacatcagacccaacttatggccatgttgaacatggtcaagcggctcggatgccaaattgccgatgccgttgactgcatgaacaagatgatattaagtttaagtgccctgttacacaaactaagcagcaattcatagaatttatatatgttattacgttaagttgctcagcattccaaaacataaagcgaacagtaccaaaacattcaatatgtcgccttttacttacggggaatccacctctgaatataaagtgaaacaatctgtatgctgtgttgatttatataaatataatgattatagtcttagaacacaatacaattatttggaatagaatacagcggcacgcaatagtaatgtagtcggatgtgtaggcgggtgtttaaaaaaacttcagattttgggggtggggttggtgtgatattgcttccggcgtgagatatgaactattaactatatagagtaaaatatgtttaagtaatcgcttgtcttaactatttaactgcctagtgctgagtgtagagccgaatctcagaaaaatatctgtttgctttgtcgctttacttcttcttctttttcgagttggaactggttgccaccacctcgctcttccgcttttgactggccttcggttggggcgcgggtgctggagtgttcgagctggcacttccacttccagcggacacgctgccctttggtgcctttttctttttctcggcgcgttctttctcttccagctcaatgttttcacgttcaataagggtaatcaacgtgttgcagcgacgctgtagctccaaagcggttctagatttgatgaaccagtcaaagcggaattgcggagaagctctgtaagagaacggaaatgtataaggggt

SEQ ID NO: 18797 - DNA, 1749 bp, DROSOPHILA
ttaacaacaaatcgtcagcgatcagggattaaaatcaaaaacgaagagagcgcgcgcgaatttcgtaaatccttgcaacacccgagcaggtgttaaaaattaaataattaaacaagcaaatggttaaacagtgttgattgctactgcaaattctggccttataatcgcaccgccgagcacatccgtcattaacgcgactgtgtgaaaaactcactttttcggcgtcaatgtcgaggagaaacgattggatcgggcaattaatataatttctctataatttcgcatcaaagttcgcagcgaactaaatcggtccaaaagatggcagataacaagggatttacccccgatggacaggaatccctgccatcggcgccaacagtcgagaacccgcctccatacaccaacgcaattaatgacttcaactcgaaagccaacttgacggaaaaagagctttccctcacggatgatccctaccatcccttcgagcaccgcgatcccaatggagccagtgccggcggcgctttggcgcacttgctcaagagttccttgggcacgggcattctggccatgcccatggcattccacaatgccggtctggcctttggaatggccatgacgctgatcgttggattcctctgcacccattgcgtgcatatattggtaagcgttaaaacttcgcatgacatttgcagggatgccaaggtttcggctctgggatttgctgagacagctgagaaggtcttcgagtacggacccaagggaatgcgaccctactcgaatttcgccaagcaatttgtggatatcggactgatggccacctactatgctgcggcatgtgtatatatcgtatttattgcgacatccttccacgatgtcattaactatgatttgaagatcaactgggatgtgcgtatttacattgccctaaccgtgatcccctgtctgcttatcggtcagatccgtgacctgaagtggctggtgccattctccatgatggccaacatcttcattgtggtcacattcgcgatcacgctgtattacatgttcgacgagccgctggtttactccgacaagccactgatcgccaaggctgcccatattccactctttttcgccaccgtgatctttgcgatggagggcatcggtgttgtgatgcccgtggaaaactcgatgaggaagccccagcatttcttgggatgccccggcgtgcttaacattgctatggtcactgtggtctcgctctatgccatcatcggattctttggatatgtgcgatttggcgaccaggtgcgaggcagcatcacgctgaatctgccggaaggcgcctggctgggcgatacggccaagctcctgatggccgtggccatcctgttcacctttggcctgcagttctatgtgcccaacgagatcctctggcgcaagatcagtcacaagttcagtcccgagaagcacaatattacacagattctgctgcgcagcggcattatcctgcttagcggtggtgtagctgctgctatccccaacctggaacccttcatcagtctggtgggtgccgtgttcttctcgctgctgggcatctttgtgcccagtttcgtggagaccgtctatctgtggcccgaccgcctgggcgtgtgcaagtggaagctggtcaagaacatcttcctgggcgtgttctccattcttgccctggttgctggtgccgtcgccagcatcaacgagatcatcgaaatgtatagcgacgacgactaa

SEQ ID NO: 18798 - protein, 312 aa, DROSOPHILA
MATYYAAACVYIVFIATSFHDVINYDLKINWDVRIYIALTVIPCLLIGQIRDLKWLVPFSMMANIFIVVTFAITLYYMFDEPLVYSDKPLIAKAAHIPLFFATVIFAMEGIGVVMPVENSMRKPQHFLGCPGVLNIAMVTVVSLYAIIGFFGYVRFGDQVRGSITLNLPEGAWLGDTAKLLMAVAILFTFGLQFYVPNEILWRKISHKFSPEKHNITQILLRSGIILLSGGVAAAIPNLEPFISLVGAVFFSLLGIFVPSFVETVYLWPDRLGVCKWKLVKNIFLGVFSILALVAGAVASINEIIEMYSDDD

SEQ ID NO: 18799 - DNA, 10438 bp, DROSOPHILA
acgaggctccggaagtcaagaaaaaatatttttaaaaatgtaaaatcacattttgtgtgacttgcttaaaattaaacgtgatagttttgtggctcaataggtcatagaagatattgtaggcaggtgatcgcattgtcgactgcggtaaatggagaatcccgcagtctacttaaccgaacctcacaatgtagatattggaattagaaactgaaacaatttgttattaaaatatacatgaataaatttaacaaaaagggggcgtgttttgtaagcttgaccgagagatattattcttaaaaatacatatgtacactcagttatctatagactaatacacttgaaagcgagtttctaaaagaatttgtttttttttatttcagcgccaggaatccgaagccgaaaggatagagagggaggagtacgagaaatatcagaatgaaaacgcccagtactcgttcaattcgagtgtggatgataagatcaacgatggacaaatctcacgtaatgaggagcgcgaaggaggcactgttcgtggttcctacagctacttcgatggtttcgtgaagcgccgtgttgagtacatcgccgataaggacggctacagggtgctcaaggacgagatcgaggatgtcggcaatggtccttcgttcaatcccgatggcatagccaacgtggagggctctatgatcggcaaatactccatcaaactggataaggccgacgatgacaagcactacaaggacattcatgcctagggcaaaatgaactgaggatttctaacatttagaaacggactgaatactttgtagacccccaaaatagagtaaaacacaatctgaacaaaaagtgtatttcttcttctcccaaataaaatattgaaaaaactttaaacaaatgaaaatgaattccactaaatagcaaatatcgcaagtccggttccacttcttcgtattactttcttattttcaaatttatttgtaataatgtttatgtattggttaattttgcggtgagtgcatttaggagcaaaatgttcttcgtttaagttttgtttttgaatttagtttagatcgccatcgcttcttgctgttgctgttgatttactggcaataatttgtgtagtttcctcataacgtgtttggtttttcgttcgtatgatgtatctcttttataattttcattgtatttttgtatttatcaacagttattagcttaacatatagggtctcgtttagaaatcaattacgtgtattacagttacgtttatacgctacatgctaaagaaatgtgggcatgaagagtcttagatcgtttgggtggataatactaaacttaaagaattacaaattatagcctaagcgctgggccaaagcgttttcaaaatacattatgaatatttcataaattacacggtaaacttaagtatgcttaactaataataagtattgatccagttcgcgtaatcaaaatcgaaccaatcaaatcacgcatatacagcgattaaattataaaaatatagtcatccgacgtgagtgagtccatatgctaacctaacctcgcacgtacttcataatgtatataaattacatttaaaacataaatatttacattagaaatagttctttagttttccattgttttcctatgccttttcttcgatcatatttgctttgctgtattttaaatgatatccatatcaagttctattatttttttacgtgcttgtgatatccttaaacaatcacaaaaaataacgagtatcttaagggatatgcaacaagcacaaaatagacaacactagcttgcattttaggcttaaccgatcctatctttatacaaaaagtgttacgaattgccagtgttcttagtttacatgaattgcaaatgaatttaattacatttatgtattgttgccattgctgtgtctgtgcgtaagcctctgcacgtccattgttttaatttgtttgttgtacacttggtttttgctatttctctttgattgctatagttcacaatttaaacatttggttggtacctctctactgggatcgactaaaagtacgggtctctaagtaactacaaaacgttatccacctcatctaatcacacaggcgacacacagcttggccgcaccgatgcagtcgtcgtggcaaaaggctccgcactgttggcagatcaccatcgcattgagtgagcaggcgcagttgttcgccgtggccgtagcttcattgcccggcggagtgttctccccggtttgatgcaattgcagcaatggatgctgatgctgagtcccagttggttgcgattggggctgctggttgatcggcgaaggtgctgcagttggtgacgcgttggtcgtcactatgtagttgttgccagcttccataagcgcgacggccgatgagttggtattgctgccgtcaatgtaggcgatgttgggtcctagatggaaagcaaattcattttttaacaaaatgtatatggcaggaaacagcgactctttggttaaatacttacaaataaattaactaatctattaaatataaacatgtttattaacaaggtgtttagcagtagccgtgcctactatacaatttgtaacccaactttttgtaggtcattacttttaccaaagtttacaaacaatttgaattttgcattttatgaacattaaatttaaaacgaaaatcaaatacaaatcatatatgtacagtataaattcggaaattgtaaaaactgaagtaatatcggttctttctatttaatttaggggcattgacatcccacattaaaatttcatgcagctaggctagataatatatgtagaaagtataaaagaaatgcgatcacgtaggttaatctaacaaatctaagcaacaaactaatgactgcgtgccaattatggtaacatgaccaatgatgaatttgtgggtggtgatttaaaagacgtacctcgctaaccactaataatacaccaatttacctgcagcgatattgcgccgcacaatattcgcggctgcgcctacattgcccagcggctgcggctgctgatgttgctgctgctgctgcatttcgtggtgatgatgatgcaacgcatctgtggcggaaattggtggtgctataacgttgccgctgccagccgttgtgtccaccgatgctggacgcccgcgtccacccataggaatgccgtttatgctgtgcagcggattctgaacagtaacgaactaaatggcacaaatattagtatgcaactaactaattgttgaaactaaacattttaagtcacctggttttgatgcattggcggggcactggaggctctaggcgcttgattgtcagctgcacccacattcgcccgatgaacgagaacatattgtccattgccattttggtgtatcaactgctccggtgctggctgctgaggattttgtacaggcactggcgaagtcgtcgactggtgatgctgctgaagcatttgcaattgctgagcggtggctgtagctcctccaggtccgggactaaacacatgccggatgagcgttgtgggtgacggcttccgttggacatatttctttcttgggaaaccactcatacgcggtccaataacctagaataccagaacattaagaagtaatgaccagtaaaataaatttgttacactaccttgtatactcccggacgtccgacacccatgacattcggcggcaatccagcgggcagagctccagcaccaactgctccactgaccaacagctcctcttgctttaatacattttgtgggggtgctgctgcgactgcagctgccatgctacccgtggccgtcgttatgttggacatgggtgtggcagccaccgttgatacattcaaggtcacagggtttataggtgctggcgcagtggttgtcgtcggctgatgttggttgagaatcgccgcaggcggtcgcaactgagccttgagattctcgcggtttggactattctggataacagcctggcagatttgatagctacgctccagatttactgcacccggtggtaacctattgctggttgctttgcgcccttttcccgttggcatttttggctgcaatctttgctgggcaatggtggttggcactcccgatggtggcagagttttcatagtcagcacgttgggtaactgctgcatattactgttgtgatttgccaactgttgttgttggactgtctgctgctgaggggcaggtactggcggagattgctgctgttgcgcgcccgtcacagcaacaacattggcataggcggacggaatagatgcggtatttgccgtcgttgctgctgtggtaggtgatgcattggcaggacgcgtcattgagatgatatttagtggctttgctatgaatttagcctgtgttgttggtagtgcaacattttgctgctgttgttgctgctgttgtagcagattgttgttggcggcctgggcgagaagttgtcgctggtgtagttgcgcctgctgcaaggcaaactgctgaatctgctgatgcttttgttgtgccgtagcctgctgttgatgttgctccagttgttgctgctgctgctgctgatgttgctgtgcgatcaggttaggagacaagaactgttgggttccgttgcggagagccactggtaatgtcttgcccaaggaattgctacttgttgcttgctgttgctgctgctgctgttgctggtgctgttgttgttgttgctgctgctgctgtgctgccgccgcctgcagcgtgaactgttgtagtagttgctgttgctgttgttggcgttgctgctgaagcaaaaagttgccaattatctgaccattggaatccaccaatatctgtctttgctgctgtgcattggactgagcgttctgttgcggctgttgcgatgcttggtgcggcatttgattaatggtaagactgttggtgctgctgcataggcttatgttgttgctgctgtcgttgctattgctactattggttatcaccgtgctggacacttccatttcggcagcagacattggtacagcatcacagagcatttcctggccgatctagaaatgggtgttaaaacaaaaatgtatgttaaaactgcattttggtaatgttttcattgtctggactcacatcatttccaaattcactatgggcctgcggcataaacgaatgctgagccaattggacgacatcctggatatgcaactgttgatgatgctgctgctgattttgttgctgctgatgctgctgcagtttgtccactatttcacggacagcttcgctgtcttcatcaattaactgctgttcctccgtcatacattctaccacttcatcgtcttcatcctcctcttgatcaccctcatcttcgtcaccgagaacatcgtggcacacatcattgtgcataatgtcgtcgatgacgtcggcatcttgcactacatccatcagatcgattgcttcatggcttagattacgctgctgatctccgcttgactgcgaactgcttaacttaatgtcgccaaagttccaatcgtgctgcacatgctggtacatttcattggagttcaactccacgggtaactcctgttgctgctgctgtaacttggccacagttgaaagcatggcttggacatttgccaacgtagtttcagctgctgctgccagcgtcagtggagccgttggtgctccggccgacgatgaagttgtgggcgcggtcgtcgtcgagccggaattgctactggagcacgaagatgacattgaggcggaggaagatgaggacgatgtgcagctggtcgatgtaatcgaactggccggcgtcgacccagaaattgagcttgcaatggggagcggtgagtcctccggcttatcactatgctcttccagtttattagctgcagttgtcgccgctgcaaagaaaacgtgtcattttacattctttcaatgcataaaaataactctgattactgttggacgatgaagatgaagtgaagaagttgtgattgatagtggattgatgttcttgaaaataggctgcttaaaaccaaaaaacaagaaacattagttacttattctggcaattatactagacgaacataccgtgatcgatagtatctgagaaaacgaaatcatggctatttgttcctgtcgttatatctgcctcgtttgaattgtccaaaggcgctttggtttctgcaataatagtaatgccaatttaaataagccatttatatgggtggagtactcttaatatagctaatgcaatgctatctatattgttcgctctgaatagctcttacttaccagctgctagttcgacgttttgtaagtagcttacaaattggttagccacatccggatttggtgctaacgcttccggctttggtgtatgtggggtaacggcagcaattgctggcatggcagccgccgatgcaatggagtccacatcttccttagaatccacttgtttcatggcaacgatcatctccttactgcattcagatggctcaattttatcacaggtactgttgataagtggctgatgttgtcgctgatgctgttgctcgtccttgattttcatttcgactgcagagtgatccacaacatcaaccattggagctgcgacaacattccctgacgcattaggaacaatttcgtccatcttcggctgcttgctgtcctttgatgtgctgggcagctcgtcgagatcatcgtccaaattaatggtcgctatcgttgtgggtgcctgcttgcgctgcgaaggactgctcgatggacgtttgaggacacggcgttgctgttcgttaagcacattattctggctgccagtgggtggaaacgtgcttgatttatctgctactgccactgctactgtagttttagctgatgtcgtttcgcactttgtgctctgcaagtttttcaataatataactgggatataaataatggggaatatttggtaacttaccaaatcaaattttaattcagtctcattatcacatgttgcttgttgcagtggtttttgttgcgatgtcgctggtggtttgggctcactcttaatgcttgccgaaagcttctgattcttgcaatcgctttctaacttatccttatccttccccctagaattcttctcgccccagaagggctcaaagtgtttcagcttccagggatccaacttgttcttttcgcgctctgcttccgttttaagtttcagctggttttcgggtgtaaactcgccttcgcttagtcgttcccgccactccaagcaggctcgggcaaaaaactcgttgtttagacaggaggcacttagccttatagcctccgatggactgcctccacttgcgctactgctaggttgctctagttcgctggcctcgcgatccacgctgggcagcagttgtatgagattgtattgatagagcggtggcaaaagcgagaacgtttgcttgttcaacagcgctcttaagttggtggaggccagtatggagtcgggggtctccaggtcgatctttccgtcttttgtttgctcaatctgcgctgctgtcgtcagcttcttattgctcctccgacggggcttaacactaaaaccgggtatggaggccaggacctcccgcatggtcgaagcttgagaggtgcccgccttgctgccgggtgagatggcggatggatagctggaggtggcttgggcttgtgctgcggccgctgctgctgctgctgccgccgctgctgccgccgccgctgctgctgccgctttgacctgttgctgttgctgaatgcgtcggctgcatattaaacgcgtgggcggggcaggagcagtactgacggcagcctcttcgctgggcgccatcggtttcttctcaggtggtattggtttcacgataatgcgtggcaggtggcgtctggaataaaattagtatagaaatttagagattctcgtggcgctcgggtaaatcgttttagaactaacctgagactgtgtgtgtgcttggtagacggtgacacttccagttgctccagcgcaagaggatccttctcgtcgtcgtccaccagattcacatgctccattatcatcgtaggcggtggagcggccaacagggattgctgctgcagcatcggctggtgatgctgatccgcttgtggaatgagaagttgttggtgctgcgacgacgtcgtcgtcgtcgtatccggcgtaatggttttcattgttaatcgctctgcctaatctatttacagcgaacttttgatccatgcacccatgtcaagcaagtttcttccgcacacactggaaatgttgagaaatagataatttaatattatttttttgttaacaatgaaatagttttgttatgtgatggtttatttggatataaattaaaaacagagcattaattctttactttaaattgcttggcaacttgacaatgatcatatacaaatgcaaaatgatgtgtaacaaaaatgaatgtaacttcttatagttttcaaatttaaatttgtttatttgatttatccgtgttggggttcagccaatattgcttgtttttaacattttcaagcttcccagtcgattttagatgccatattagatggcaaaactagtttttggttaatactatagtgcacgaaattaatcctgatcggctgcactaacgaattgtccattttaaggcaaaaagtgtctgtataattttaacgttgcgccctttgtatatgtatgtacgtcatctgtgtgcatgtatgtgcgcatatatttcgttagaagtgtgtgcgtgtgttttatttttttatatgtaatgaaattgcggctatacggagatttttccgtttgttatgccttagttttaattattgtttttgttttcctcacgacttttctcacttgccagcagtaattttaaacaaatcaacaatgtaacagcagtaacaacaacaaatacgaacgacctgcaaagttggttatatttttttctcacgcacgcatacacatacacacaaacacacacaaatgcacactagcacatcggagaagtagaaaaatgacttttgttcctatttaagtaactaattgcgggtattttacctatttatggtacggatttagatctgtactagagcactatcttttgcataatgccgatttccgcctcgttaatggctcactaaattaaatattgaatgggggaaatgtgaatgccaaacacacaaacaaagcagctacaaaatgattcttttctagccaactatgccggtccctttctggcgcacgcgttttcccgtatcgggcgcagcgcccgtttctctctcacactcactatgcagaaaagctgcgtttaattgaatgaaattgtttaagttactacaacgcaaacactagtcactaatcacaccaactagttaatgttttttcgtggccagttttaaacgcaaaacgctcgaatttctggctgccctgccaagtccgatggggttgttgatgtcgcatccgatacatcggataggagcggatgtatttgcgcagtcactgctcccgcaccagggctgccaactatcgattgaacgatcaggtcaagaagtagctagaaataagctggcaaatatgaagcgttacgtacgtagcggttatttgattttaagttatgttacatttacgtacatatataatataattgtataacgtgtgcatacaaaataattgttataaaaatatacaagctctaagaccaaaatgcactataaataatttctaaatgtttagactcgtaacttatgcaaatacgtaacatacgtatcattttacatgttcagataaaaaaatatagcttttatttggtcaaatacattttgcaagatattaactaacgaaatacttaaaaaccgctaaaacaaaaagcaagacaaaaatcaagccaatatggtattccacccactaaaacggcgaacaagttttcacatccaatgagcgataactttgcacccacaatcgatagttccgcagctgctgtgtgtgttgggccggcaaattgttaaactggctgaaattgttaataatgttttaagaaattgcgacaccaattaaaccaccgcaatgttttcgatgtgcaagcagacgcactccgccacggcggtggagttttcgatagcatgccgcttctttaacaatctggatgagaacctggtggtggcgggcgccaatgtactaaaggtgtaccggatagcgcccaacgtggaggcgagccagcgtcaaaagctgaatcccagcgagatgcgtctggcgcccaaaatgcgactggaatgcctagccacatatacgctctacggcaatgtgatgtcgctgcagtgcgtctcattggcgggtgccatgcgggatgcgctgttgattagtttcaaggacgcgaaattgtccgtactgcagcacgatcccgatacgtttgcgctgaaaac

SEQ ID NO: 18800 - DNA, 6545 bp, DROSOPHILA
gaaattcgagcgttttgcgtttaaaactggccacgaaaaaacattaactagttggtgtgattagtgactagtgtttgcgttgtagtaacttaaacaatttcattcaattaaacgcagcttttctgcatagtgagtgtgagagagaaacgggcgctgcgcccgatacgggaaaacgcgtgcgccagaaagggaccggcatagttggctagaaaagaatcattttgtagctgctttgtttgtgtgtttggcattcacatttcccccattcaatatttaatttagtgagccattaacgaggcggaaatcggcattatgcaaaagatagtgctctagtacagatctaaatccgtaccataaatagtgtgtgcggaagaaacttgcttgacatgggtgcatggatcaaaagttcgctgtaaatagattaggcagagcgattaacaatgaaaaccattacgccggatacgacgacgacgacgtcgtcgcagcaccaacaacttctcattccacaagcggatcagcatcaccagccgatgctgcagcagcaatccctgttggccgctccaccgcctacgatgataatggagcatgtgaatctggtggacgacgacgagaaggatcctcttgcgctggagcaactggaagtgtcaccgtctaccaagcacacacacagtctcagacgccacctgccacgcattatcgtgaaaccaataccacctgagaagaaaccgatggcgcccagcgaagaggctgccgtcagtactgctcctgccccgcccacgcgtttaatatgcagccgacgcattcagcaacagcaacaggtcaaagcggcagcagcagcggcggcggcagcagcggcggcagcagcagcagcagcggccgcagcacaagcccaagccacctccagctatccatccgccatctcacccggcagcaaggcgggcacctctcaagcttcgaccatgcgggaggtcctggcctccatacccggttttagtgttaagccccgtcggaggagcaataagaagctgacgacagcagcgcagattgagcaaacaaaagacggaaagatcgacctggagacccccgactccatactggcctccaccaacttaagagcgctgttgaacaagcaaacgttctcgcttttgccaccgctctatcaatacaatctcatacaactgctgcccagcgtggatcgcgaggccagcgaactagagcaacctagcagtagcgcaagtggaggcagtccatcggaggctataaggctaagtgcctcctgtctaaacaacgagttttttgcccgagcctgcttggagtggcgggaacgactaagcgaaggcgagtttacacccgaaaaccagctgaaacttaaaacggaagcagagcgcgaaaagaacaagttggatccctggaagctgaaacactttgagcccttctggggcgagaagaattctagggggaaggataaggataagttagaaagcgattgcaagaatcagaagctttcggcaagcattaagagtgagcccaaaccaccagcgacatcgcaacaaaaaccactgcaacaagcaacatgtgataatgagactgaattaaaatttgatttgagcacaaagtgcgaaacgacatcagctaaaactacagtagcagtggcagtagcagataaatcaagcacgtttccacccactggcagccagaataatgtgcttaacgaacagcaacgccgtgtcctcaaacgtccatcgagcagtccttcgcagcgcaagcaggcacccacaacgatagcgaccattaatttggacgatgatctcgacgagctgcccagcacatcaaaggacagcaagcagccgaagatggacgaaattgttcctaatgcgtcagggaatgttgtcgcagctccaatggttgatgttgtggatcactctgcagtcgaaatgaaaatcaaggacgagcaacagcatcagcgacaacatcagccacttatcaacagtacctgtgataaaattgagccatctgaatgcagtaaggagatgatcgttgccatgaaacaagtggattctaaggaagatgtggactccattgcatcggcggctgccatgccagcaattgctgccgttaccccacatacaccaaagccggaagcgttagcaccaaatccggatgtggctaaccaatttgtaagctacttacaaaacgtcgaactagcagctgaaaccaaagcgcctttggacaattcaaacgaggcagatataacgacaggaacaaatagccatgatttcgttttctcagatactatcgatcacgcctattttcaagaacatcaatccactatcaatcacaacttcttcacttcatcttcatcgtccaacacggcgacaactgcagctaataaactggaagagcatagtgataagccggaggactcaccgctccccattgcaagctcaatttctgggtcgacgccggccagttcgattacatcgaccagctgcacatcgtcctcatcttcctccgcctcaatgtcatcttcgtgctccagtagcaattccggctcgacgacgaccgcgcccacaacttcatcgtcggccggagcaccaacggctccactgacgctggcagcagcagctgaaactacgttggcaaatgtccaagccatgctttcaactgtggccaagttacagcagcagcaacaggagttacccgtggagttgaactccaatgaaatgtaccagcatgtgcagcacgattggaactttggcgacattaagttaagcagttcgcagtcaagcggagatcagcagcgtaatctaagccatgaagcaatcgatctgatggatgtagtgcaagatgccgacgtcatcgacgacattatgcacaatgatgtgtgccacgatgttctcggtgacgaagatgagggtgatcaagaggaggatgaagacgatgaagtggtagaatgtatgacggaggaacagcagttaattgatgaagacagcgaagctgtccgtgaaatagtggacaaactgcagcagcatcagcagcaacaaaatcagcagcagcatcatcaacagttgcatatccaggatgtcgtccaattggctcagcattcgtttatgccgcaggcccatagtgaatttggaaatgatatcggccaggaaatgctctgtgatgctgtaccaatgtctgctgccgaaatggaagtgtccagcacggtgataaccaatagtagcaatagcaacgacagcagcaacaacataagcctatgcagcagcaccaacagtcttaccattaatcaaatgccgcaccaagcatcgcaacagccgcaacagaacgctcagtccaatgcacagcagcaaagacagatattggtggattccaatggtcagataattggcaactttttgcttcagcagcaacgccaacaacagcaacagcaactactacaacagttcacgctgcaggcggcggcagcacagcagcagcagcaacaacaacaacagcaccagcaacagcagcagcagcaacagcaagcaacaagtagcaattccttgggcaagacattaccagtggctctccgcaacggaacccaacagttcttgtctcctaacctgatcgcacagcaacatcagcagcagcagcagcaacaactggagcaacatcaacagcaggctacggcacaacaaaagcatcagcagattcagcagtttgccttgcagcaggcgcaactacaccagcgacaacttctcgcccaggccgccaacaacaatctgctacaacagcagcaacaacagcagcaaaatgttgcactaccaacaacacaggctaaattcatagcaaagccactaaatatcatctcaatgacgcgtcctgccaatgcatcacctaccacagcagcaacgacggcaaataccgcatctattccgtccgcctatgccaatgttgttgctgtgacgggcgcgcaacagcagcaatctccgccagtacctgcccctcagcagcagacagtccaacaacaacagttggcaaatcacaacagtaatatgcagcagttacccaacgtgctgactatgaaaactctgccaccatcgggagtgccaaccaccattgcccagcaaagattgcagccaaaaatgccaacgggaaaagggcgcaaagcaaccagcaataggttaccaccgggtgcagtaaatctggagcgtagctatcaaatctgccaggctgttatccagaatagtccaaaccgcgagaatctcaaggctcagttgcgaccgcctgcggcgattctcaaccaacatcagccgacgacaaccactgcgccagcacctataaaccctgtgaccttgaatgtatcaacggtggctgccacacccatgtccaacataacgacggccacgggtagcatggcagctgcagtcgcagcagcacccccacaaaatgtattaaagcaagaggagctgttggtcagtggagcagttggtgctggagctctgcccgctggattgccgccgaatgtcatgggtgtcggacgtccgggagtatacaaggttattggaccgcgtatgagtggtttcccaagaaagaaatatgtccaacggaagccgtcacccacaacgctcatccggcatgtgtttagtcccggacctggaggagctacagccaccgctcagcaattgcaaatgcttcagcagcatcaccagtcgacgacttcgccagtgcctgtacaaaatcctcagcagccagcaccggagcagttgatacaccaaaatggcaatggacaatatgttctcgttcatcgggcgaatgtgggtgcagctgacaatcaagcgcctagagcctccagtgccccgccaatgcatcaaaaccagttcgttactgttcagaatccgctgcacagcataaacggcattcctatgggtggacgcgggcgtccagcatcggtggacacaacggctggcagcggcaacgttatagcaccaccaatttccgccacagatgcgttgcatcatcatcaccacgaaatgcagcagcagcagcaacatcagcagccgcagccgctgggcaatgtaggcgcagccgcgaatattgtgcggcgcaatatcgctgcaggacccaacatcgcctacattgacggcagcaataccaactcatcggccgtcgcgcttatggaagctggcaacaactacatagtgacgaccaacgcgtcaccaactgcagcaccttcgccgatcaaccagcagccccaatcgcaaccaactgggactcagcatcagcatccattgctgcaattgcatcaaaccggggagaacactccgccgggcaatgaagctacggccacggcgaacaactgcgcctgctcactcaatgcgatggtgatctgccaacagtgcggagccttttgccacgacgactgcatcggtgcggccaagctgtgtgtcgcctgtgtgattagatgaggtggataacgttttgtagttacttagagacccgtacttttagtcgatcccagtagagaggtaccaaccaaatgtttaaattgtgaactatagcaatcaaagagaaatagcaaaaaccaagtgtacaacaaacaaattaaaacaatggacgtgcagaggcttacgcacagacacagcaatggcaacaatacataaatgtaattaaattcatttgcaattcatgtaaactaagaacactggcaattcgtaacactttttgtataaagataggatcggttaagcctaaaatgcaagctagtgttgtctattttgtgcttgttgcatatcccttaagatactcgttattttttgtgattgtttaaggatatcacaagcacgtaaaaaaataatagaacttgatatggatatcatttaaaatacagcaaagcaaatatgatcgaagaaaaggcataggaaaacaatggaaaactaaagaactatttctaatgtaaatatttatgttttaaatgtaatttatatacattatgaagtacgtgcgaggttaggttagcatatggactcactcacgtcggatgactatatttttataatttaatcgctgtatatgcgtgatttgattggttcgattttgattacgcgaactggatcaatacttattattagttaagcatacttaagtttaccgtgtaatttatgaaatattcataatgtattttgaaaacgctttggcccagcgcttaggctataatttgtaattctttaagtttagtattatccacccaaacgatctaagactcttcatgcccacatttctttagcatgtagcgtataaacgtaactgtaatacacgtaattgatttctaaacgagaccctatatgttaagctaataactgttgataaatacaaaaatacaatgaaaattataaaagagatacatcatacgaacgaaaaaccaaacacgttatgaggaaactacacaaattattgccagtaaatcaacagcaacagcaagaagcgatggcgatctaaactaaattcaaaaacaaaacttaaacgaagaacattttgctcctaaatgcactcaccgcaaaatt

SEQ ID NO: 18801 - protein, 1669 aa, DROSOPHILA
MKTITPDTTTTTSSQHQQLLIPQADQHHQPMLQQQSLLAAPPPTMIMEHVNLVDDDEKDPLALEQLEVSPSTKHTHSLRRHLPRIIVKPIPPEKKPMAPSEEAAVSTAPAPPTRLICSRRIQQQQQVKAAAAAAAAAAAAAAAAAAAAQAQATSSYPSAISPGSKAGTSQASTMREVLASIPGFSVKPRRRSNKKLTTAAQIEQTKDGKIDLETPDSILASTNLRALLNKQTFSLLPPLYQYNLIQLLPSVDREASELEQPSSSASGGSPSEAIRLSASCLNNEFFARACLEWRERLSEGEFTPENQLKLKTEAEREKNKLDPWKLKHFEPFWGEKNSRGKDKDKLESDCKNQKLSASIKSEPKPPATSQQKPLQQATCDNETELKFDLSTKCETTSAKTTVAVAVADKSSTFPPTGSQNNVLNEQQRRVLKRPSSSPSQRKQAPTTIATINLDDDLDELPSTSKDSKQPKMDEIVPNASGNVVAAPMVDVVDHSAVEMKIKDEQQHQRQHQPLINSTCDKIEPSECSKEMIVAMKQVDSKEDVDSIASAAAMPAIAAVTPHTPKPEALAPNPDVANQFVSYLQNVELAAETKAPLDNSNEADITTGTNSHDFVFSDTIDHAYFQEHQSTINHNFFTSSSSSNTATTAANKLEEHSDKPEDSPLPIASSISGSTPASSITSTSCTSSSSSSASMSSSCSSSNSGSTTTAPTTSSSAGAPTAPLTLAAAAETTLANVQAMLSTVAKLQQQQQELPVELNSNEMYQHVQHDWNFGDIKLSSSQSSGDQQRNLSHEAIDLMDVVQDADVIDDIMHNDVCHDVLGDEDEGDQEEDEDDEVVECMTEEQQLIDEDSEAVREIVDKLQQHQQQQNQQQHHQQLHIQDVVQLAQHSFMPQAHSEFGNDIGQEMLCDAVPMSAAEMEVSSTVITNSSNSNDSSNNISLCSSTNSLTINQMPHQASQQPQQNAQSNAQQQRQILVDSNGQIIGNFLLQQQRQQQQQQLLQQFTLQAAAAQQQQQQQQQHQQQQQQQQQATSSNSLGKTLPVALRNGTQQFLSPNLIAQQHQQQQQQQLEQHQQQATAQQKHQQIQQFALQQAQLHQRQLLAQAANNNLLQQQQQQQQNVALPTTQAKFIAKPLNIISMTRPANASPTTAATTANTASIPSAYANVVAVTGAQQQQSPPVPAPQQQTVQQQQLANHNSNMQQLPNVLTMKTLPPSGVPTTIAQQRLQPKMPTGKGRKATSNRLPPGAVNLERSYQICQAVIQNSPNRENLKAQLRPPAAILNQHQPTTTTAPAPINPVTLNVSTVAATPMSNITTATGSMAAAVAAAPPQNVLKQEELLVSGAVGAGALPAGLPPNVMGVGRPGVYKVIGPRMSGFPRKKYVQRKPSPTTLIRHVFSPGPGGATATAQQLQMLQQHHQSTTSPVPVQNPQQPAPEQLIHQNGNGQYVLVHRANVGAADNQAPRASSAPPMHQNQFVTVQNPLHSINGIPMGGRGRPASVDTTAGSGNVIAPPISATDALHHHHHEMQQQQQHQQPQPLGNVGAAANIVRRNIAAGPNIAYIDGSNTNSSAVALMEAGNNYIVTTNASPTAAPSPINQQPQSQPTGTQHQHPLLQLHQTGENTPPGNEATATANNCACSLNAMVICQQCGAFCHDDCIGAAKLCVACVIR

SEQ ID NO: 18802 - DNA, 2587 bp, DROSOPHILA
tgcctgccctgttgcacaaaaaggaccgaggcaggcagacagaggcccaggccgaacgaaaggttcgagcctacggagagcgcgaagtccacgacactgtcttgggtgcagaggctctgctcaaggactctaagactattgacatagagagcgaagacgatacggactcaaacgatggtgaatgggttaacgtggcgcacagtgatggtgagggtggtggagcggacgatgatgaagaagacgaagatgaggatgaggacgatgatgacgaagacgaagacgaagagaacagtaatgacgaggagaatgaggatgaagataattccgacgaaggcgtggaaagtggcgaagagtccgcaaaggccaagaaggaaaagaaagatatgaggatccttaaccaaaaggaggctgcacaggaactggctcttactcgcatattcacggacgaagatttcaagcgcatcaacgcggctaatcttaagaagaccgtaaccagtgcccgcaagagaccacttgaacaggatcgcgccgagttcgtcaagctgaacagcatcgagatgatctacaagaagcgcaagcacgacaaggagtcgcggctggagactgtgcaggcgggccggcaggatcgcgagcgctttggctggaaggatgggcgcgtgaacgagcactgttccaagacgaaccgcgagaagcgcaaaaccaagaactttggcatgctgcgacacaaggctcgctccaaggttaagaagagcttcaaggacaagcagcaggcgctgagaaaacatctgctgcatcagaaaaagatgaagtagtaccttcttgcgtttcaaacctcgtagtgctttaaatgaataccaatataagatatataattctaaccaattgattgtataaagggtagttggtagagttatctgatttatttcaattcatatagactttgtacggttgcctattcattaaactattttaaaaaattattcttggggctgggagtcgtttatctgcgacgcttttcggactttttaacgcgcttcggtcccttaacgaagcaccagtcaacctgaatggtctgtcccattatttcggcaccgttcagggcctctttggcggcgagcgcctgcttgtgggtctcgtactcgacgagagcgtatccctttgagaacccagtacgccggtcgaggttcaggtgaatgttcttgatttctccgtaatcgcagaacttttcctgaatctcgtcctcctgcgcctcctcatggatagaggtgacaaacagtatccagccctcgacggacctttgtggaccaggttccagctcatcgtcgtcctcgttgcgcacacgctcgtagctgtggatcgcctctcgggtgttactgtcgcttccaaatccgcgtcccttgcggtgcttcgccttttccttcaggcgcacaatgccctctgttttgagcgtagggtgcacggcgcggcgtgggagaaaatagaaagcataagaccggtggattacaaagcctgccgcagctacttacggtcaccgtcctcgtccacctcgaactcctccgcattgtcaatgtccaacacatcggccattttctttttctgtgtctaaaaagcagaatgaatgggtttatttttatttcgttttcgttccgcgtctggccagttgcaaaaactctgctggagatggcattatcgtcagtgttggttaattccgttaggaatactatcgcctggatgtttggaaaataatacttacattggccacaaatgttccgaaaatgtacaatgtttaattaattagcttggctttaataaaatatgttgaagttaagggtaaattgtatcagccaaaatcaccttagcaaaataataagatccggaggattggactttcaaaatacttaagttctcccgttcttttttattctgtaaccatctaaagtagacttattaggtgcgttttatccaaatatgtatttttcaaattaatactctagctttataggttataggcattgaaaattctttaacatatatttaacacatttaacatagaacatttaaagacggagctaaaaattgtgtgcttaatcggtcggtaaaatatttttgtaaaacataatttgagggcaccattaatttttattaacagctgacattcagcgtatattttaaaaataataagttcggtccagtaccatttgaaaagcgtgcattattacactgcagacgctgtttgtcccaaacctaatatttttattttttttatccaatccttttagtcactcgattttcagtattttatttatcatatacaaatattaatgtatttgaatagaatgtcgaaaaagtcgactcgatgtatgcgatttaagattcatgtatgcatctacatattcatttcagttaccaaaatctgaaataataagggtatgcaaatgcatcataacccacaattacaatgccgcatttaattccttctgcgagattatatgttactttgctcatattttcaacaaacataggtctttatataaaacaatccacaaatagtggttacttgcagcctataagtcaaaaacccattctc

SEQ ID NO: 18803 - DNA, 498 bp, DROSOPHILA
atggccgatgtgttggacattgacaatgcggaggagttcgaggtggacgaggacggtgaccagggcattgtgcgcctgaaggaaaaggcgaagcaccgcaagggacgcggatttggaagcgacagtaacacccgagaggcgatccacagctacgagcgtgtgcgcaacgaggacgacgatgagctggaacctggtccacaaaggtccgtcgagggctggatactgtttgtcacctctatccatgaggaggcgcaggaggacgagattcaggaaaagttctgcgattacggagaaatcaagaacattcacctgaacctcgaccggcgtactgggttctcaaagggatacgctctcgtcgagtacgagacccacaagcaggcgctcgccgccaaagaggccctgaacggtgccgaaataatgggacagaccattcaggttgactggtgcttcgttaagggaccgaagcgcgttaaaaagtccgaaaagcgtcgcagataa

SEQ ID NO: 18804 - protein, 165 aa, DROSOPHILA
MADVLDIDNAEEFEVDEDGDQGIVRLKEKAKHRKGRGFGSDSNTREAIHSYERVRNEDDDELEPGPQRSVEGWILFVTSIHEEAQEDEIQEKFCDYGEIKNIHLNLDRRTGFSKGYALVEYETHKQALAAKEALNGAEIMGQTIQVDWCFVKGPKRVKKSEKRRR

SEQ ID NO: 18805 - DNA, 5508 bp, DROSOPHILA
gacatgatggatgacattgccgagcagcaggacgtggcccgcgagatttccgatgccatttcgaacccagtggcattcggcgccgatctggatgatgaggatctcgagcgggaactcgacgagctggagcaggagaactttgataaggaaatcattggcatacccgagccgacgcccacattgccagaagcacccacagaagatttgcccgagaaggccaaagaaaagaaaaaggcgacaaccacgactgccgtggaggatgatggtgagttcagtcactgcatgtggatctacgtttggtaattaacgattaacttgcgttacagatgatccagacatgaagcagcttttatcctggtccaactaaatcagagagctattgaaatctccttactgttctgaagatacaccctatcgtttttgtttaatttaataatcaatactgctgttaattaagcaaaattttagttcgaagcgagggagagaatacaaggcattaattcctttggcaattcaacaaatggtacataaactaggaatgtgattttaaaataaacgaaataagcatagtcaggcctcacatgagcaaaagtaggtatcaacgtagtttcatatttgatttgtttattttgaataacgctgattggccatcaggtgtatgcagatctaatattccaacaaagaaatgtagctttttgataaaaacccaaatatgttttgtggcactcatctttccgcagtcttagctttgtatcgagcgattcaaacgaaaataaaaacatgaagcctctcgactgcaggtaactcagtagccgcgagaggcgcaaaaaaacatcaactaaaatattttatttatatacacttgttccttacaagcaggttctgaataaaaccccccaaatgtatctttctttgtcttatcaacgcgcggataagagaacatcttatcttacgaaaaacccacaataccactattttaatcacgatacacctttaagttgaatgcattcttgtgtatacttttattgcaaatcgatcgggtgtacatcaatgtgattttaactatggcttgggcaatctatctactacggactttgctagttgggggtagtcaagtaggatggaggcgctcaggtctgctgcctcagaccctttacatatcgcaccggaacctctggcaggtaaacgcagacgaagaacatcagtggtccgaacgcaatcatgcagatcagccagtagatcaagcccaggattgtgatggcgtccatatagaaggaggaggagaagggatcgatcggacagcacgtacaatgaatgtcttgtgtaaaatcgtaaataaataactagtatcactaaacaccggactcgtccaatggagatggtgcaacaaggcaaaaggcggttgttgccagtgacaacgctccgatgttcctaatagggtatcagatatatatatatagctgcaggtcactttagacacggatcaggactcatccgactggtgctccgatccacaatcatctgttaatcttcaagcgcgccaccttaaacgaaatgaaacgagagttgttattgcatcaattgtggtatggcaattgctaacgcgatcgcgaatcttacagcgtgctgagagaatgcccaatggtaactgcccagctgctccactgaatcacgcacttatgtacacaccacctggcaagtcccacgcccagattggttattttcggggctatccccggacactaacattccccgatcgtggcttactcagctgttcgcagcgccagttaattcgcaactgattcttaactggttatgcagttccagaccagatccccccaaaatatcaatatcgcccacctcgctcagagctcagagccaacctggccgagcgatctacgttcaaggtgagccaacgaatgaatctatgaccgcacaaactggtttgccagaacatcggctagagaacggcggctacgctcctctggcatttaattaatcccactgatcgagcttaacccctgttcattcgaaaattgcaggcattgaacggctatctggtcggaaattactgcaccctccgaagccatttactcatgggctactacgtctgataaggcggttgcaagataatcaaaatattccctgtgccaagtaaacagggccataaactacataggaactgctccaaaaacgtgatagaaatggagaaactagggaatacgaagggaaaaggtaccctgtgtgctactagactggtttatataacaacattggggtcattgatcgagctatttgaccagattatccactatatatactttatactttccatatatgtatatgtatataagtaagatacaagtaagttactctctgaggctacgtaactatgtgggaaacctgcttcaatgatataaaagattaaaaggatcatttcaatcttatcttgattacaatttcttattcattcatcccttgaatacaaagatcttttgattaacaagctaatctactatgaatcattctaattagtgcttaactatttattttctgagtagtggtatctattcttatttccaatttggaactgcccaacgggaacacaaataaagatgtcagtcaactcaaattcctcctatctaatctggcccttaaaagaggtttactccaaccaactcacatgatgtagaagtagttgtcactgtccttgcgcttcgcatcgcacggattggcgctcttgctagagaccgagctggtggctcctggctcgggatccgtgtgctgggagctggtgctccagctgcgaccccagcggccggcgactgaggagccgggcacattggcctgcctgttgctggacaggctgccatccttggtggagccggcgaagaacgacttgacgctatccatggtgcgaccctcgctacaaatctggttccgattggccgtctgagtgtatgtgcgtcgagcctccgcaaaaacggccgaaattgataaagctaaaaatatatatgcgaagacaccataatttatttattttgtctgaaatcttgtttttttcggtgggctcgtgcccctctagctgtttccaagtgcggggatcttctcctccggccgtcgtacgatccaaattgaatttatttaaggtgcggttggaaaacaagtcgggctattgataagctcttggtatacatctattattatcgtatctgctccaggtggagtggccatcttggagcttcatacttgtttttttttttcaccgatggaggctctttgtgcttcatccggaggggagtatgtgtgaagagtaggctgatcaaacaggctttgggaaaacggcaactaagtggcaaatgcgacgcagtttcaactcgaatctaaatatgtaagtatacacatacgtatgtacatatgtaggtgttgccgcatacatattatcaattagcagttcagaacagttcactggctaagcagatcgctgataacgtggtcgagaatcggcgcaaacacgcgccgccctcgggagccatgggaaatagttaagttgtttgggactccgccgggccttctgggctccgatcaatgggttagtcggacgtggccagataagcgggctgcggaccttgaagagcaccaaatgcaaagtgaaccgagactaataaccgggcgaggtcaacccattgtagccaaccatccaactgacctaccttaaatgcttagttcactcgacttcgaaagggacgtgactcctggggcttcactccaactccagttgctgcgcttgctctgtttttttttagtgcactcaaacgaaaaaaactcgatcacctgcagtcgcgaggagagaactgtgaaccgttttgcacaatgtctgcgatcgcactgaaaacgaaacaaggcacggcgtcggcatcgagtgtttttagttttaatcaattttaaatgcgaaggcgtcgtgttttgccgctgtgtgagtggctaccacgcagcacacacacatgggaaagccgctcgtgcactggaagaaatggcacggatctgaaatggatttaggtacaagtttcctattcattcagttaatatatccagaaaacataaatactaaatgctactgcttaactttgggtacattaaattcaattccttgtaatgaaataactaggtacatacgcattgtttggaatgtgcttgtttctccaagtgtacgtcatatgtgcggtgtagcaatgagtagtatttccaagagtttcttggggtgctgccatagtctggaaagcgtctggtttctacatctgtggtacactggtaccaaacatttgtttgttttgatcgccgtttcttttagttgctttcatacatatgttttggactgttttggctaaatctgtgcggtggatacacttaccttctacctggtgttcatcgcagatcagccttgtcctcgccgcacttccgccctcgctctttgtcactcttctcggtcttgcctagtcttcctttccacttttgcctttttattgtgctccgatgcatgttgattgtcgtggactttgcaccctcagttttccgctgttgtaatgctcgttttacgcatttacaggaatatagtcgactaggaaagcactctttacccgtttaatctggatttgtcagccgataattcagtggaattaattctgttgaattcataaataaatagataaattgtatgattcattaacctatttattaattggttgatagctttgggatagtgattaaactcaagcaattcaccgatgcaatctattgtcttgaaatgataagaattgaaagaatgttgctatgaatttaaaaatctttaatgagtggctgccactttaatctaattccacgtaatcttaactttctgaaggtgctggaaacccatgacactttaattttcagaacattcaacctaactataaattcaaatcgagtggcagctccgataacggtcacagctgctaagaccagggcggcacactgtgtgctgtcgcccgataacttctttgttttgaactcacgggaaagcaaccctgcgtgtgctctcgccaattggaactgcgaatatactgcctgtgtatatatgtaaatgtttataattagcaatttttctacgaaacaaacgattaaataatgcagttttctgcctactaaatgccaaatacaacacacagacttcgagccacgaacggtgatgtgatcagagtactagagtaatccaacgaaaaacgcgagtccattttaaagcgaagtataaagtgccaaacaaagggagcagtcgaacccagtccaaatccaatcattatactcggtccgtgacctgccgacgagccagcgagtacggcaataagcatgggcaacgccagctcctccgtgcacatgcaacgcgagcgccacaagtcgaccgacttgtccacgccgagctctcccgcacatttccgcgattcgattggtggaggaggagcgggacagggcggg

SEQ ID NO: 18806 - DNA, 1291 bp, DROSOPHILA
ggaaaggaagactaggcaagaccgagaagagtgacaaagagcgagggcggaagtgcggcgaggacaaggctgatctgcgatgaacaccaggtagaagatccgtgccatttcttccagtgcacgagcggctttcccatgtgtgtgtgctgcgtggtagccactcacacagcggcaaaacacgacgccttcgcatttaaaattgattaaaactaaaaacactcgatgccgacgccgtgccttgtttcgttttcagtgcgatcgcagacattgtgcaaaacggttcacagttctctcctcgcgactgcaggtgatcgagtttttttcgtttgagtgcactaaaaaaaaacagagcaagcgcagcaactggagttggagtgaagccccaggagtcacgtccctttcgaagtcgagtgaactaagcatttaagctttatcaatttcggccgtttttgcggaggctcgacgcacatacactcagacggccaatcggaaccagatttgtagcgagggtcgcaccatggatagcgtcaagtcgttcttcgccggctccaccaaggatggcagcctgtccagcaacaggcaggccaatgtgcccggctcctcagtcgccggccgctggggtcgcagctggagcaccagctcccagcacacggatcccgagccaggagccaccagctcggtctctagcaagagcgccaatccgtgcgatgcgaagcgcaaggacagtgacaactacttctacatcatgtggcgcgcttgaagattaacagatgattgtggatcggagcaccagtcggatgagtcctgatccgtgtctaaagtgacctgcagctatatatatatatctgataccctattaggaacatcggagcgttgtcactggcaacaaccgccttttgccttgttgcaccatctccattggacgagtccggtgtttagtgatactagttatttatttacgattttacacaagacattcattgtacgtgctgtccgatcgatcccttctcctcctccttctatatggacgccatcacaatcctgggcttgatctactggctgatctgcatgattgcgttcggaccactgatgttcttcgtctgcgtttacctgccagaggttccggtgcgatatgtaaagggtctgaggcagcagacctgagcgcctccatcctacttgactacccccaactagcaaagtccgtagtagatagattgcccaagccatagttaaaatcacattgatgtacacccgatcgatttgcaataaaagtatacacaagaatgcattc

SEQ ID NO: 18807 - protein, 80 aa, DROSOPHILA
MDSVKSFFAGSTKDGSLSSNRQANVPGSSVAGRWGRSWSTSSQHTDPEPGATSSVSSKSANPCDAKRKDSDNYFYIMWRA

SEQ ID NO: 18808 - DNA, 5632 bp, DROSOPHILA
taattcagaagggctggaacaatggctgctaaatagcaggcaacaatatgtggaatgtgttaggtaaaattggtcgcatttagtgtaaatttgttgatttcaatgcctaaatagcatcatgcagagctgtttcgcctcagtcttttcagtgctggaaaactcgctgtcggtatcgctgtaggtatcgattgttgtctcatcggcgggttattcgaattactcgacattttacatttcgaatgtaaaaagggtataagttttgtctgtaatttacaatggcaataaaatagaatcaaaattaattcctcttatacttaaatattgacaatattaattctcttgcttgaattttggtgctttatttgggtcacatataaacgaaagaaataaaaaagtaaaaaatgcaatatttagcaaataaataaaatgtgtgaaaggagcaatggccaccaacttatgtttttttctgtacccaaagggagataagtgcccattagtttattttcatcacaagttttatcaccttttattgacttagtctttttttcgttgcgtcttcaataatatttgccaaatgtgaggaaatgtgtcaggcatattaatgatcttccaaacatcggcttatcttcgcgcctacctggccgagaaccccagacggattggaaacatcagacgcgactaagccgatctcgcattaaaaataaataatgctcgagtttatcgaccatttctctcggcgacattaagtcgtttggtcactcgattagcgttgggcacgtcgaggggcagatagcccaagtcactctaaaaaaaatgccgagaagttttatatgattcatagcttattacttattttttatagtttaaatatatttatatttcattatcgtttgctcgtatgtctccagagatttcaatatcagaacaaattgggtttagggaaatagtgaacaaaataaagcaaacaagtgtgtttccagatcagccatgaacatattgcatgcatattcgattttttctcagtgcattattgccggccgattctcgggcagttcctctgctcttggctataaaactcgcacaatcttactcgagcgttctcagttttagttcagaccgctggcgaaccggtcacgttcgattggttgggaaatatcgccggacagaacgtaagtttctctttcgaattttgagaacttgaaacaagtcattcgctttagggcaattaacggattttcaaatagcctttagtagcctttaattggggtagttaacaattacttttatgacataattacttggcgaactgtttcgcgattagtgccttttttaatatttactataaatgttcaattttaccagtcactataatcccttgataatcttatcaaaatcgtgtagtacacaccacggatctattgtgtttttcacagtcatttcggtggacatggtcgtaaattcaagaaatatctgaaacacttctgcggtggttagtcgatctaatcgatgttatttacgatctatgaccataaattgttagtttatttaatactgtgtaccaaaagcgactgttatttgcttaggttgcacttacgatcgtttctgtccatatagatgttagataaaataaaagtcgtagtttgttaagcaaaagaacatataattgattacctgaaagtactctcttctgaaaattgattttgtaacagatcgaaccaaccataacgagtatcttatcttattggtcggtttgttcagttgaagtgacttccagagtattatcaatattgtgggcaatcacttgagatacatactgatatatagtatagtataaagcgtttcgatctgaccccagagtcatccgaaaatgcgacattttaatcaattacgcgagagcgttctcctcatcagatacgtcatcgagttgacataacaacataaagcagaactggatcgtgtgtaatcgaaattcaaaaaaaaaaaaaaaaaaaacaaaatgcttactatattttccaggcgcgaaagtagttgatcaacatgagactgtttctgctagccctgctggctactttggcggtaacccaagcgctggtcaaggaggagatacaggccaaggagtatctggagaatctgaacaaggagctggccaagcgaaccaacgtggaaaccgaagctgcctgggcctatggctccaacatcaccgacgagaacgaaaagaaaaagaatgagatatccgccgagttggccaagttcatgaaggaggtggccagtgataccaccaagttccaatggcgctcgtaccaatcggaggatctcaagcgccagttcaaggctctaaccaaactgggctatgctgctctacctgaagacgactatgccgaactgctggacacactctccgccatggagtcgaatttcgccaaggtcaaggtgtgcgactacaaggatagcaccaagtgcgacctagccctcgacccggagatcgaggaggtcatcagcaagagccgtgaccacgaggagctcgcctactactggcgcgagttctacgacaaggccggaaccgccgtgcgatctcaattcgaacgctacgtggagctcaacaccaaggcagccaaactgaatagtaagtagaaacattattgcaattttaaatgatttattgaggcgattgaataagtctttcaatcacaaaagatgtttcagaaatctgtttattcagtagaaaatcttaagcaaggataaatagggataaaaagatactataataaaaaataaaatatttttaaaatatttttcctactatataacaagagacgtgagtttttacctacgtaaagtgcaatttgtcacaaaatccattagcttagcaaaaaatagcttttgtagattagattcaagttaatgaaattttaggcagcagaacgttataatttcagtgctatttgtcattttagtaattaatataattatgataaatacaaattaaattgttaaaagtgaagtgtaaagtacttgtttataatataaaaacgtaattttttgcttccagactttacttctggtgccgaggcctggttggatgagtacgaggacgacaccttcgagcagcagctggaggacatcttcgcggatattcgtccgctttaccagcagatccatggctatgtgcgtttccgcctgaggaaacactatggtgacgcggtggtctccgagacaggacccattcccatgcacctattgggcaacatgtgggcacagcagtggtcagagattgcggacatcgtatccccctttccggagaagcctctggtggatgtgagcgctgagatggaaaagcagggctacacgccactcaaaatgttccaaatgggcgacgacttcttcacgtctatgaatcttaccaagctgccacagtaagtactacaaatatacgattaattaaatgtcgatctattaatttgtgtgaatttcaagggacttctgggacaagtcgatcattgagaagcccaccgatggtcgtgatctggtttgccatgccagcgcctgggacttttatctcaccgacgatgtgcgcatcaagcagtgcacccgggttacacaggatcagctcttcaccgttcatcacgaactgggacacattcagtatttcctgcagtatcaacaccaacccttcgtctatcgcactggtgccaatcccggtttccacgaagctgtcggtgatgtgctctccctgtccgtatcgacacccaaacatctcgagaagattggcctgttgaaggattatgtgcgcgatgacgaggctcgcatcaaccagctcttcctcaccgccctggataagatcgttttcctgcccttcgccttcaccatggacaagtatcgctggtcgctgttccgcggtgaagtcgacaaggccaactggaactgtgccttctggaagttgagggacgagtactccggcattgagccgccagttgtgcgaagcgaaaaggactttgatgccccggccaagtatcacatttccgccgatgtcgagtatctgaggtgggtacctgctagcttactcgagaatatctgatttattttggtgatttcttgcagatacttggtctccttcatcattcagttccagttctacaagtccgcctgcatcaaggctggccaatatgatcccgacaatgtggagttgcctctggataattgcgatatctacggaagtgctgcagctggtgctgctttccagtaagttttgggaacttatataaatttgcctaaatacatatgtttgtgttttttgataatcctatagcaacatgctgtccatgggcgcctcgaagccatggcccgatgcactggaggccttcaacggcgagcgcatcatgtccggaaaggccatcgccgaatactttgagccactgcgcgtttggctggaggcggagaacattaagaacaatgtccacattggctggactacttcaaatagtaagttttcaccttcttcaaattgaaggataactgtgtctaaatgtgtgttttcttatttcagaatgcgtctcatcataattcaaatgattttagtgttctcacacacagttcattgctcaataaagtttaacaatatcttaactataaaaatgttatacttccttataacaaagtacttgggcttgaatattaagacttttatataatattattatagtttattacctgttatacaaaccttaaacttctaaaatgatagaaacaggtaattttatggttgtgtaagtaaatgttcattatatataaaattccccatccaaaaacaaagtgctggacataattgtctcagtaaacaagttgtagatattgccaagtgaagtcgtagttgtattttctaagtggaacacattataattacaaatggccaactgggcgctcagttggtcaccagactcactccactggccatggattcatggattgtcgtcggcccaagtcagttgacttcgagagctgcgccggcgcagaacgttgaccaaaagtgtcgggaatttcaatgagctaataaattgagttgcgaaagtgagtttagtagaaagtgtgggaatatgtggatatttgcggttttggtgagccaaattgatagggtaatcaatcgcaattccctaagatccttctgttttagctcctggtgggattaacccaggctggatctcagcctgatgccacattggaaagatttctgaatgaaaccaatcagcaactggctgttatttacgatcaggctgtattggcacagttgttgaatgaactgcgcggcccgaatgatttggtggctctcctggagatcgaggtcaccgatgataagcttgtgaagtatgtgaggaccctaacgactcgcaaggccaagttcaagcgtttgggattgggtgactcccggcagcggagactactcgacaaaataccccaattgggctatgaggctctcagtggcagagatttgaagctggtctacgcattggcctccagcatgagcgataattaccacaatgtcaagctgtgtgcctacaaacagccggggaactgcactctaagactcatacccgaggttcagtccatagttcaaggaagccgagatctagacgagatc

SEQ ID NO: 18809 - DNA, 2089 bp, DROSOPHILA
atgcatattcgattttttctcagtgcattattgccggccgattctcgggcagttcctctgctcttggctataaaactcgcacaatcttactcgagcgttctcagttttagttcagaccgctggcgaaccggtcacgttcgattggttgggaaatatcgccggacagaacatgagactgtttctgctagccctgctggctactttggcggtaacccaagcgctggtcaaggaggagatacaggccaaggagtatctggagaatctgaacaaggagctggccaagcgaaccaacgtggaaaccgaagctgcctgggcctatggctccaacatcaccgacgagaacgaaaagaaaaagaatgagatatccgccgagttggccaagttcatgaaggaggtggccagtgataccaccaagttccaatggcgctcgtaccaatcggaggatctcaagcgccagttcaaggctctaaccaaactgggctatgctgctctacctgaagacgactatgccgaactgctggacacactctccgccatggagtcgaatttcgccaaggtcaaggtgtgcgactacaaggatagcaccaagtgcgacctagccctcgacccggagatcgaggaggtcatcagcaagagccgtgaccacgaggagctcgcctactactggcgcgagttctacgacaaggccggaaccgccgtgcgatctcaattcgaacgctacgtggagctcaacaccaaggcagccaaactgaataactttacttctggtgccgaggcctggttggatgagtacgaggacgacaccttcgagcagcagctggaggacatcttcgcggatattcgtccgctttaccagcagatccatggctatgtgcgtttccgcctgaggaaacactatggtgacgcggtggtctccgagacaggacccattcccatgcacctattgggcaacatgtgggcacagcagtggtcagagattgcggacatcgtatccccctttccggagaagcctctggtggatgtgagcgctgagatggaaaagcagggctacacgccactcaaaatgttccaaatgggcgacgacttcttcacgtctatgaatcttaccaagctgccacaggacttctgggacaagtcgatcattgagaagcccaccgatggtcgtgatctggtttgccatgccagcgcctgggacttttatctcaccgacgatgtgcgcatcaagcagtgcacccgggttacacaggatcagctcttcaccgttcatcacgaactgggacacattcagtatttcctgcagtatcaacaccaacccttcgtctatcgcactggtgccaatcccggtttccacgaagctgtcggtgatgtgctctccctgtccgtatcgacacccaaacatctcgagaagattggcctgttgaaggattatgtgcgcgatgacgaggctcgcatcaaccagctcttcctcaccgccctggataagatcgttttcctgcccttcgccttcaccatggacaagtatcgctggtcgctgttccgcggtgaagtcgacaaggccaactggaactgtgccttctggaagttgagggacgagtactccggcattgagccgccagttgtgcgaagcgaaaaggactttgatgccccggccaagtatcacatttccgccgatgtcgagtatctgagatacttggtctccttcatcattcagttccagttctacaagtccgcctgcatcaaggctggccaatatgatcccgacaatgtggagttgcctctggataattgcgatatctacggaagtgctgcagctggtgctgctttccacaacatgctgtccatgggcgcctcgaagccatggcccgatgcactggaggccttcaacggcgagcgcatcatgtccggaaaggccatcgccgaatactttgagccactgcgcgtttggctggaggcggagaacattaagaacaatgtccacattggctggactacttcaaataaatgcgtctcatcataattcaaatgattttagtgttctcacacacagttcattgctcaataaagtttaacaatatcttaactataaaaa

SEQ ID NO: 18810 - protein, 615 aa, DROSOPHILA
MRLFLLALLATLAVTQALVKEEIQAKEYLENLNKELAKRTNVETEAAWAYGSNITDENEKKKNEISAELAKFMKEVASDTTKFQWRSYQSEDLKRQFKALTKLGYAALPEDDYAELLDTLSAMESNFAKVKVCDYKDSTKCDLALDPEIEEVISKSRDHEELAYYWREFYDKAGTAVRSQFERYVELNTKAAKLNNFTSGAEAWLDEYEDDTFEQQLEDIFADIRPLYQQIHGYVRFRLRKHYGDAVVSETGPIPMHLLGNMWAQQWSEIADIVSPFPEKPLVDVSAEMEKQGYTPLKMFQMGDDFFTSMNLTKLPQDFWDKSIIEKPTDGRDLVCHASAWDFYLTDDVRIKQCTRVTQDQLFTVHHELGHIQYFLQYQHQPFVYRTGANPGFHEAVGDVLSLSVSTPKHLEKIGLLKDYVRDDEARINQLFLTALDKIVFLPFAFTMDKYRWSLFRGEVDKANWNCAFWKLRDEYSGIEPPVVRSEKDFDAPAKYHISADVEYLRYLVSFIIQFQFYKSACIKAGQYDPDNVELPLDNCDIYGSAAAGAAFHNMLSMGASKPWPDALEAFNGERIMSGKAIAEYFEPLRVWLEAENIKNNVHIGWTTSNKCVSS

SEQ ID NO: 18811 - DNA, 5338 bp, DROSOPHILA
aagttacgcgcaatcaaatgaccctttagaaacatatatatatattcaatatattgagaaaatttaactatattatatatacataagcttaccctatatgggcaactgtggtttacattagtccactccgtcaaatggctaatagcgtatttttgcagaaaattactttgcgttttattctttaacaattggcaaacatcaaatttaaatttaacggcgaagggcttgtacaaattcgaagaatccttgtagaacacttctactgacatctgaaaatttccattattattgtaatacttaaattaatgaaacttctcaccttaatatcagttaatgcctcctttatgtcaccatccatgttcaataccgatcgagtccagtttacaggcttcagaatgcaagagacattgctgaaatatgctccgtttgctatgcactcagtttttctgattttgaaaaagtatccattggaatagaactaaaaactaaaatatttttgaaatctgtatttatacgggcttatttacgcacaatggtatttggaaggcataataaaacgcccaagtacacacaagagacagcaagccactttgccatcattgaaacaaataaacataacttcaaccgaacaacttaaagcatacgctaactacattttaataactttgtacacttgataaaaaggtatcacggttgaatgaacaaacagctttcaaataaataatcgatacgccacgatacacttatctacactttagccaaaaaatcggcttaacgtaaattaatttttgttaaaaatgcactatcgctcggaagtaaaaaagcgtaaaatgaaaaggtcgattgcttgttttgattttacagcctaattctattggttatttacacaatgctaattgttgttaaatgctaaccgtttgccaatgtaatgtaagacaatcggttaatcgaccccctgatgagataacggctacgcccctggcgatcagctgttacgcggttgttttgggtgtggaacagggaagcacaaaagtacggacaagaaagaacggtaataacagctacagccgagctccgttaatcttttaccgctaggatcgttggaatagaactcgccatgtcctcctcctcgacatccagtcccacggacaacagctcgcacggatcggtggcgctgtcctcggcccttaatccatctttaaacccggtctccggcacgaataccagcagccaaaagcctttttcgctttccgagcgcctgaactttgagatctaccgttactccagctactcgccaaactatctgcctgagtaagtactaatctggaaaagaaaatggatgcctcgcatatcgtaattgttaaacgggcatctttttaatttccattcgtagaaacgtcctggtggactgtcccaacgaccaaacatctaggtggtccgcctacacgaacagcccgccgcaatttctcaccttgaagctgcgccgtcccgccattgtgaagaaaatcaagtttggcaagttcgagaaatcgcatgtgtgcaacatcaagaaattccgtgtttacggcggcttggacgatgagcacatggttttgctgctggaggggtaggtcattcagctggttttctgaaatgcattatttaatataactcaaatatttttcccagtggcctaaaaaacgataacgtgccagaagtattcaacctgcgctgcctgaccgaagacggttcggaaaatctaccaatactgtacctcaagatcgtgcccctgctctcctggggtccgtcgttcaacttcagcatttggtacgtggagctgcacggccaggacgaccccatgtacaccagtgctcgcatgaagaactacaactcgctgcgcgaggtggagatcatcaagctgtgtctgaagcacttccgccagcagggctatttgagtgcctttggggcgctccaggagcaaacgaatgtgcaactggagcacccgctgatcagcgaactgcataagtgtctggtaagaaaggaatccccagcatagatcatgctataaacctttgaagtttggtattaaattcataaaaaaaactggttcttaggttttgcagggcgactttgagaaggctgaacgctttatagtcgagtgcatagacgagggcctaatggatgagtatttacataagcaggactacaagcacagctggcatatgaagcataccgaaagcgacataaagcctggtaactatttttgcctccaaatagcaatcattagcagttaacttcctctatttcaggcaatcgcggtggtcaccagctggtggtggatgccaaaaggagacttatttatctctacggcggctgggatggctaccaggacttgagcgacctttgggtattcaatatcgaagatgatcagtggacgctactgtgcgaaaggtcagagctttccaatggacccacaccgcgatcctgtcacaaaatggtctttgatcccatcagcgaaaatgtattcatgcttggtcgttacctggataactcgatacgaacttcggattatataaagagcgacttttacctttacgatacgagggctggcaactggatgcaaatatgcgatgacaccagccaagtgggtggtcctcagcttgtctatgatcaccagatgtgcatggataccgataagcgtacaatttacgttttcggaggcaaaatactcacgcctcgcagtgtcaatgccacgggagcgatagaaccagaatattcggggctgttctcctatcacatagcaacgaacacctgggctcagattctggtggactgccaccatgccagcgcttccctggcagatgtgatgtccatcaagtccaggatcacacactgcatggttttccataacgtaggttaattatactctataagctatgtatacagatatatgtatttgtacgcgctattatagaaacatcgaaaactttacatatacggcggacaacgagggaaggaggatctggatgagtttcttagctacgatgtagacacccaggccatatcggttctcaacaaggagcacccgcatcacggaaccatcgctggcaacgaagccaaattcgaaccttcctccggttatactttacgtgccaccattgactgtgaacgtgatgaaatttatattttttctgtaggtagttctgacattatttcggcgttcgtatttaacttcttcgtttttagagcctaagtaaggtgaaggatcgtcgtgatatacagcatattgatgcatcaaactccttttgggtttattccttgcgcaatcacaagtggtcgaggatatattactgtcgccacagtggccaggatgccaactcaattaacaacatgaatattttgggcgctagcaagggtgatggaaccttagagccgtgccctcgctatgcccaccagctggtctatgatgatgtgaccaatacccattatttgtttggcggaaatcctggaatctgccagcagcagcagctgagacttgatgatttttggcttttatgtctggaaaagtatgtaatttactagctgaatgtaatcgatgataattttattatattttagacccaaacgagaggagatcctgaagcattgtcggtttttggtgcgtaaactgcgctatgaggagatgacgcgccaagatcccttaaaggcaatgcaatacttacggcatcatatagccgatgtcattgatcacagcgatgcggagcagttgaataatgtatgtctaaaaaaagaacttcaatttttgtagctttcttatatctgagttgattattttagttccacaagcttgcgtctttactcttcaaaaaccatgatggtaaccttgacagagaatgcaacacacctgcgttgtgtgctgatgcagacgatctcgaaacggattccgatgtatcggcaaagatcaaaggttttattagtcaataatgaattcgtattggataattcaacttgtatctttacagaggaactggctgatggacccgctaccgagaacctctccctggagtcgaacgaaagcatgatctcttctggcatctcggagactgcatctagtccgagctcctcctcctgcaccaaaagggcgcggacggattgcacacccgagctgaagaataagcgagctttcctgttcaataaactggtgcaattgatgccaccgagcatggtccaacctgaacgcaaccttagcgactttgtggtcatgtaaatgttaacgtgccaaaaccgattcaatacgagcccccatccaagattatatttagcttattaagtgtgtgagagttttgttttaaactgttgatcatgatgtgatgtttaattcgcttgtttgcccatataaggttctacggttaatgcaaagcatgacatatatatgattttattgtgatagttcacgtgtactgaaaccccggctaaaagcagctggattcatagttagtgcgtttaggctgaataagaacagtatgtaaaccgagttatatttaatggattgtatatgtaaacataagattgaaataaaaaacagttttttaacgtccaaaagcaacaaggcgcatttaatatacatcagtttataatataatagcaaacttataaataattaaaaagttattttctgttttacatacatttatttccctatttttaaaatatgatacacaaaggttgttactcatcaatatgatttaaatagacattttgtagaaatcgaggtcacagcaaattagtttcacttaaatgcaattccagaattgtgtccttgacagcagtgaacacgaacttaatattttcagtatctacaaaaccaaaaaacacttttttagttattgagtgtaaagcgtccttagtttttatgttgagacacaataaaacacaagcaaggaattcaaaaagatgtgtttttttcaaaaatcagaatataaagttgacttacttgtagcaacggtgaaatgaggatagatgcacttgtaaggatcaggattcacgctagtaaacatgtacaatatgaattctcgggccgccttagcatccttctttggacctggttaataggatgtcgaataaaatcctttatatgacatgtacatacgtttgattgatgtcaacttaccattatattcaggaaaatagtctgccaaatgcgttgacaatattttctttttaaataaatcctccttgtttagaaacagaataacggacgagtgttgaaaccatgaaaacgatattatattgtgaaataaagctttagattccttcatacgattctgaaataaggaatttggttattcattggaagaaa

SEQ ID NO: 18812 - DNA, 2771 bp, DROSOPHILA
ttgttttgggtgtggaacagggaagcacaaaagtacggacaagaaagaacggtaataacagctacagccgagctccgttaatcttttaccgctaggatcgttggaatagaactcgccatgtcctcctcctcgacatccagtcccacggacaacagctcgcacggatcggtggcgctgtcctcggcccttaatccatctttaaacccggtctccggcacgaataccagcagccaaaagcctttttcgctttccgagcgcctgaactttgagatctaccgttactccagctactcgccaaactatctgcctgaaaacgtcctggtggactgtcccaacgaccaaacatctaggtggtccgcctacacgaacagcccgccgcaatttctcaccttgaagctgcgccgtcccgccattgtgaagaaaatcaagtttggcaagttcgagaaatcgcatgtgtgcaacatcaagaaattccgtgtttacggcggcttggacgatgagcacatggttttgctgctggagggtggcctaaaaaacgataacgtgccagaagtattcaacctgcgctgcctgaccgaagacggttcggaaaatctaccaatactgtacctcaagatcgtgcccctgctctcctggggtccgtcgttcaacttcagcatttggtacgtggagctgcacggccaggacgaccccatgtacaccagtgctcgcatgaagaactacaactcgctgcgcgaggtggagatcatcaagctgtgtctgaagcacttccgccagcagggctatttgagtgcctttggggcgctccaggagcaaacgaatgtgcaactggagcacccgctgatcagcgaactgcataagtgtctggttttgcagggcgactttgagaaggctgaacgctttatagtcgagtgcatagacgagggcctaatggatgagtatttacataagcaggactacaagcacagctggcatatgaagcataccgaaagcgacataaagcctggcaatcgcggtggtcaccagctggtggtggatgccaaaaggagacttatttatctctacggcggctgggatggctaccaggacttgagcgacctttgggtattcaatatcgaagatgatcagtggacgctactgtgcgaaaggtcagagctttccaatggacccacaccgcgatcctgtcacaaaatggtctttgatcccatcagcgaaaatgtattcatgcttggtcgttacctggataactcgatacgaacttcggattatataaagagcgacttttacctttacgatacgagggctggcaactggatgcaaatatgcgatgacaccagccaagtgggtggtcctcagcttgtctatgatcaccagatgtgcatggataccgataagcgtacaatttacgttttcggaggcaaaatactcacgcctcgcagtgtcaatgccacgggagcgatagaaccagaatattcggggctgttctcctatcacatagcaacgaacacctgggctcagattctggtggactgccaccatgccagcgcttccctggcagatgtgatgtccatcaagtccaggatcacacactgcatggttttccataacaaacatcgaaaactttacatatacggcggacaacgagggaaggaggatctggatgagtttcttagctacgatgtagacacccaggccatatcggttctcaacaaggagcacccgcatcacggaaccatcgctggcaacgaagccaaattcgaaccttcctccggttatactttacgtgccaccattgactgtgaacgtgatgaaatttatattttttctagcctaagtaaggtgaaggatcgtcgtgatatacagcatattgatgcatcaaactccttttgggtttattccttgcgcaatcacaagtggtcgaggatatattactgtcgccacagtggccaggatgccaactcaattaacaacatgaatattttgggcgctagcaagggtgatggaaccttagagccgtgccctcgctatgcccaccagctggtctatgatgatgtgaccaatacccattatttgtttggcggaaatcctggaatctgccagcagcagcagctgagacttgatgatttttggcttttatgtctggaaaaacccaaacgagaggagatcctgaagcattgtcggtttttggtgcgtaaactgcgctatgaggagatgacgcgccaagatcccttaaaggcaatgcaatacttacggcatcatatagccgatgtcattgatcacagcgatgcggagcagttgaataatttccacaagcttgcgtctttactcttcaaaaaccatgatggtaaccttgacagagaatgcaacacacctgcgttgtgtgctgatgcagacgatctcgaaacggattccgatgtatcggcaaagatcaaagaggaactggctgatggacccgctaccgagaacctctccctggagtcgaacgaaagcatgatctcttctggcatctcggagactgcatctagtccgagctcctcctcctgcaccaaaagggcgcggacggattgcacacccgagctgaagaataagcgagctttcctgttcaataaactggtgcaattgatgccaccgagcatggtccaacctgaacgcaaccttagcgactttgtggtcatgtaaatgttaacgtgccaaaaccgattcaatacgagcccccatccaagattatatttagcttattaagtgtgtgagagttttgttttaaactgttg

SEQ ID NO: 18813 - protein, 853 aa, DROSOPHILA
MSSSSTSSPTDNSSHGSVALSSALNPSLNPVSGTNTSSQKPFSLSERLNFEIYRYSSYSPNYLPENVLVDCPNDQTSRWSAYTNSPPQFLTLKLRRPAIVKKIKFGKFEKSHVCNIKKFRVYGGLDDEHMVLLLEGGLKNDNVPEVFNLRCLTEDGSENLPILYLKIVPLLSWGPSFNFSIWYVELHGQDDPMYTSARMKNYNSLREVEIIKLCLKHFRQQGYLSAFGALQEQTNVQLEHPLISELHKCLVLQGDFEKAERFIVECIDEGLMDEYLHKQDYKHSWHMKHTESDIKPGNRGGHQLVVDAKRRLIYLYGGWDGYQDLSDLWVFNIEDDQWTLLCERSELSNGPTPRSCHKMVFDPISENVFMLGRYLDNSIRTSDYIKSDFYLYDTRAGNWMQICDDTSQVGGPQLVYDHQMCMDTDKRTIYVFGGKILTPRSVNATGAIEPEYSGLFSYHIATNTWAQILVDCHHASASLADVMSIKSRITHCMVFHNKHRKLYIYGGQRGKEDLDEFLSYDVDTQAISVLNKEHPHHGTIAGNEAKFEPSSGYTLRATIDCERDEIYIFSSLSKVKDRRDIQHIDASNSFWVYSLRNHKWSRIYYCRHSGQDANSINNMNILGASKGDGTLEPCPRYAHQLVYDDVTNTHYLFGGNPGICQQQQLRLDDFWLLCLEKPKREEILKHCRFLVRKLRYEEMTRQDPLKAMQYLRHHIADVIDHSDAEQLNNFHKLASLLFKNHDGNLDRECNTPALCADADDLETDSDVSAKIKEELADGPATENLSLESNESMISSGISETASSPSSSSCTKRARTDCTPELKNKRAFLFNKLVQLMPPSMVQPERNLSDFVVM

SEQ ID NO: 18814 - DNA, 19529 bp, DROSOPHILA
agttttccgtttgcgggaaactttaaatgcacgataaacaaccgagtgtgttgtgtttatgtttcaaaaacaaaccaaacaatatcggccccacacacttgttaacggtattatgtatattattttacggccccgataatttttttggcaatgcgacttctgcgggcgcgtcgaattcgctcggaatattcaaaacaaatggcacaagtagtcgacggacgaacggagaagaaaaggcgacgaatgtgcgtggaagacgacggtgataaacgagagaacgcgacttcagctgcggcagagcatgcagtgtgactgtgcgaacgaaataccagcgcactaggatccccaaaaacccgatgcgtggaaaactttactagcgatagcagtgttccaaaccttttcaccaagccaatcttattttaaaactttatcaaaacatttgaacgaagctatatggaagttcaaaaaaaaaatggaagtattcagtttctttttggaacgcatcatacaaaattttttctcctgtacctattacctataccacttgcctacacttttatttcatttctacaagcactcaaatatgaagttctttctttaaggaacgtttgatcttttctacatattactacatttacatatgaatgaaagacaataaaatgttattgtattctgagaaacacacttctcttattttcgtttatttcaataagcaagattttaaacacaatcacagctgagaaacacattgtagcctatattaatttgtatttatatcttaattttctaactaaacaaaattatgaaatacctaaatatatatgttgaagtacaagactacaaagctttaagcatttcccttttttgaacttatattatattgaccgcaattgtaactgctgccttggatgcgataacgtggaatcgaatgtaatcgaaatcgaaatgaaatatcagctctgaagaccacccacgtcatatcgatgtccactgcccgatagacgccgcacacaaaccgagttgggatttcgttgtaattgctggtcatttttcacggctgtgcgactaattaaatttaacaagagagccttaataaataagtgctaaagaccagacgcagcgcgcagtaattcaaatcatctagaagatctcgtaaaacaaaatgtaaagtcctggcgtggggttgatcataacgcatacatatacccatgtgtacgtgtgtgtttccattgtaatctaaagcacgagtgaatttacgtgcgttaaatttaaacgaaaatttaaaaaaatatttcgagatattgcaacaaaggcagtattaaatcgatttctggtgcatgtgcttgtgtgcagaatgtttgcatgtgtttgttgcaaatgtaagaagaagtagccactcacgcgctactctcttcctttctctctctctccgccccctccccattagctctacaagcagctgaaagttgtagccgcactacattcaaaagtttccaaaagtctgcttgctggcagtagtaagaaataaagacttaaaaacaaaaacatcacttagtaatatcaggtatgtatagaaaaataaaagtgcgcgctcttgtgagcatgtcgagtgtttgtgtgtgtgtgtgtgtgtgagtgagtgggtgcacagaataagttcgtacctaacctcaatttcccccaactgattacgctaggcggcaccacaacttccagtggtattaatcattttaaaataatgcatttgctgcctttttcctattaaatattttccttgggggataggatattaagttttcaagctgaatcttggattaaaattttgcggttgtgtatatttatggaaattgctcttatcgccgttttgtatatgtacattaaaaacaaggttccgccatctgttggcacgtgtacttgtgtggctgaacatatttaattatctttgctttgataaaataaacttaaaaaaaaagaaagaagtgcctcagaaaataaataaaaataagaaagcaaggtattgagaacagcaacaacaatgacgcagtcacgcacaccacgaaggcaataaagcagctatgtgtgtggctgtctgaaagaggcagagcgcgtttgccgcgctcaccttttgttattgttgcgttcaatcgctctagaactgccaacttgttaggatgttgaaattttatgccagaataactttgtacgcaaaaccattcttttttcatagttatttcttgttttgtataaaaaaatggaaaatttatttaatgtgaaaaaggttaataaaaattatgcagtcaaaaataatacaaaaaataccgcatcaataaatattgaaataatttttttaaactcaaatttcgcttttaaaatcagttggcagctcaatgtacccttttggtgctcgcgtatgtgtgattgtgcacaaggtgagcgagacagcagtttcagccttcaatttgcgggtttacgttgattctaattaaataattcgttgaaatcgggctcactgcttctgtgaggtccaattgtaatgcacacacacaaacacgttctcagtgctttcctcaaattttctttgtgaagcgcctcaagtttcgactggcttttaagtctggtttggttttggctgtttgaaaacttgaaaaacaagttacttctgaactcaaactccccagttttggcagtctctccacacttctctcgatctttctcccgagaaaaaaaaaacacttgccgcgtcgccaaccaattgtttgcaattcgcaattgtattttagccagaggccaacgaacaagtctcttgaacttgatggtcggaacgaagttgaagtgtattagacgttgaacacttttacacatatttagttgtaactttttcaagccttcatcattatattattaaaacttgagtgttaaactgtatgtttaaatatactatgttatcatttcaataagtattgaattagtaaacaacactgaagccgttgtgttcaatcgtgtaagcctattcccaaatttataatcgttattttaatttaaaaaccttttaattgctcttaattttgatccaacacgcattttggctcaccggtaaatttgtgtataatcttttacataaagaagagggttctctaatccttaaatggatttatagttttgatgagaattaatactaaagttaaatattttatagtaaagttttccatttactgtgttgtcaattttttaggacaaacaaacaataaataacaaaaagtttttatcacattaaatatcatgtgactcaagagagttaaaaacatctgataatttgcagaacacgtacgaatatcaaactaattagttttttttatagaaatgggtccgtgtgacaggaacctctttaccacatttcagatatcacttgatcagcgtcagttaatatttcctagtgccgcattccatgacagatctgaaattagcacaggaataattagaacatgctagaccacctggctttattatcaatagaaaaaagcatcaataatacccaatgggagggcaaacaaaccttcctgcggcgcctggaagtcggagagtttggtttgtgccatttttttgtttggtccagggactttggtgcacctcggacatgcgctgcacccagtagctagttagttgcatgtgaactttgaactttcgagctggaaagtggaaggcggatttgcatttcctatcgctgcaggtgtctcacaaagagagaggctctctcgtatcctccgcccccgctgcatttttttcattgcgcaatgagcgagacgaatcgataactgcaaggtttccatgttttagcagctcaacttttgcgcgtatacagattttttgtctgtattattttattttgtgaaggagctggccgccgaattcagttcgattcgagatgggaacatgtgtttttatggttccgccattgtcatggtgagatgcacttgcttttttttgtcttcatatttttacttcctctctccgcacgcacgcgtctgtgtgtgagtgcgctggcgagtgaggtggtggaggagtacatgagtgtgtaaagtgtagccgtggcagagttgtagctcgctagtggtccgtttggtttctgattttcggtttcgtcgatttcacatatgtactgcaatggtcggctaaaacgctctgccgacgtcgctatctgctgtatactcgttgcgcttgtgtgggtgcgctgctctcacacccgctctctctctttggctcaaacagggtgtcttacccagatgttctgatcatcgtttccaccacatggctgggtgacaatggtacaccctgttttctaaacaacttgttttctctcttcccagcgttgttgttggtcctcgcacttacgtaagcctcacgtatttcgtttcttatccaaattctaagcgccattttgcgactatttgcatgcggtaccgctcaccgctaataaaaataaccactgattgtgattatttgctaataggtaatgaatggtatataaactatttttgccgtcagctactgatgtgttttcaacgcgctcgacggaggattttagttgttgcgccgttgagttgccaccctgttttagctgcggcagcagaataaaatgaattccaaagcaacactgcgcgcgcgctctcacgctctccgttttacactcatttcgctctctctgctgactccaaatgactggccgtcgcgtttcgctgttttaatcgaaaatgtttgcggcggcgttgagatgtacgaaaacgttctctcgccaaaaatttgtgaatagaatagcagtagcaatctatcgagaagaaaatgtcttaaattcgagccgtgtgatctagttaaggtcttagagccaagtgcaaattgattgaaataagcgttaaacttaaactgaactggagaacgaagccccagctactgaaagaaaagaaaacggtgaaaataaagatttcggtgtgccagtgagtgcgaatatagtagttgcatgtgcaaaatactgcgtaaaacgtgaaagtttccaataacaccacaaaaccaacggcagttttgtagtaaatatacatacgcgccccgtacatatatacatacatttcgaatatacatacacacagccgaatatcaaccgacgaagctaactgcttattgctgatgtaagtgtaatatgggcggtgggcggttgtggggggcgtgaaaattgcagagtagcattatccttcaagtgcacttggagtgcggattcgagttcaaacaatattttcgttcgtgccactgaaaacttgtgaaaatacaacatttttaggttaggtcaatttcaattggtttatatacacacgcacgcacaaactcacacacacacaaacaacaatggcatagcgaatacatatagaaggcgcacagacaaaaagtcgtcgacggggacgtggttgttgtttgtgttgctgctgctgctgcctctacagtttctgctctcctcacacacagttgaacacagttgtggagaggagagccacactcatacatacgctttgaaccattgcttttggttcgcttatgaactgactgtattttttcaacgtagtgtcgttttattttcgttgttgattcgttctttgctcagttcgtgcgcttatcttgacttttgctttgatgcgccattcgcatgtactggcgagagcagcctagtgtgagtgtgcatttaaatggctccccaatgagagcatcattttgtggccctctttttgttcagatcttccttttgctcctcttcttcatgctccccagcccatccgtcgtttgttgttcttgctccgcctgttttttttcattcggttttgaatttacacaaaacgtttgccgttgcttcttcatgctgaaatagtatatatgtatgtgaatatattgtacatatttctctacacatccatatgttttatttgcaaaatttattaatagcgcagcgccactccgcggctgtgttagtgcgccagagtgagaaagtaacagtaaaaaactaaatattaattcgcgttgattccgattcgtattgcagttgttcaaaaccgagtgctagtgatatttgcaaaaaatttaacatattttccgctggctgccttttgtgttgcgtattctgctgtgctgtgtatacacataacaaaacagataagataacattatacgtgtgcacgtaatagagcgggctgaatcaaaaaaaaaaaaaaagaaaaaatggagggaaaatttgcccacatgtctccccaaagcacacacacgcacacaacgccccaatttggagcctctctcgtcaaacactcacacacaccagcaagcgagtaaatgtgtttggtatgcactaatggcggatccaaaaatacaataacaacaaagacagttgggagagctcaaaagagcgaacttgttttaccttcatttattaaaggatagttggtggtggcagagacaggagagagaacgagggctaaagcttttgtgcggctgtactgtgctccaatatttgtttacaaatgctaaaagggggcagctgttggttcgatggggtgtttcaattagttggagcaggatgatcctctaggcggtttccattcacctaatatttgctcgcggtctttggtttgcgcagcgttgcgctctcttcatttttgccgctctctctctcgaatgcccgccaaatgcttgctgtgtccgtgtgtgagtttggccccaaacgggtgaaatacctttttgaaaaaaaaaaaatcatccatatactgcgcctcaacaacaaatgcggctctctctggttctctctgtggctgcaccaccaccaccgtatcgccaccaccacctttgcattgttgcgtttgctgctgctgttacctctgactcttcttcttcttattcttgtaagttgtagatacagaacatgtaccagcagctctcacacaccacccgcccgcccccttggcggtatcgatatataaatattttctatgtgtgcgtctgaattctatgcaagccgatgtcgtgcatggggcatttggcaccttccacattcacaaatactgatatgtacacacatacacacacactcggaggtgtacacagaaagctcgcttaggaagtttttactgtaccgctgaaagcaataacaaagcgcgcgcccaattccggttgaacgtacacacactaaagtgaattacgcgctcctccttatgccttgcactcactctcctccaagactcaacttccactccacgatctccttcccgtctatatgtatcaatctctggttgctgttgttgttattggtcacagctccactgcttcattccattcctattgtccctcatctcactcttctcccccgaatccagaacacccaatacagagacaccgttctccactctgtagtttttgtgatacggctaaaagaagaattcccccgtggctttttagttcaccttttttcttgttgaaatatgcaatcgttccgatatctgtgaagatatagaccgaattgatcaatcagctgtgctatactagctaacatgttttgggaaaattagcaagactcgtggtctttaatatatggaaaagtatatttggcatatttgtcctttcatttcagtgtcagtgaataaattctagtattaatgtgtaagattgttccagtaatgcagaatttaatgatgactaacttcattaaaaatagacccaaacctaattcttgggggtttttatacatttaatgtcgacattattgtatgaccgtttcccttctcttgctttgcttgcagtgatattcagaaagaactccaaacgctacgtggcagaggcgaatcaccggcgcagcaacaccagcagcagataaccagccgtcagtccaatttctctaccttagaactcgagcgcatttgccgcttgcggggcgaccaaatgcatagacaacatatgtcgcattcacgagcagtccaagatcaagagttgcgaccccgaccgtttgttgcatattacatacgctcatagagggcggccactcacctagagcagccagagtccttgcacttgggcagggatccagggagcaacaaagtgcttagaaagaagaagcagcagcacaggattatacgctccgccgaggacagagcaacaaaaaagatgatgaaacgcactcgcgtagacgaggtgcaatttggcacacgacccgttcctcagacctccggaggtgtgggcgttggtgtcgtcggcgtaactggaggtgggccaacatccggcggcggtggcactgctactgtgggcgtcaatacgacgggcgttaccattggtaccgtcgtgcccagtgctcataacgccaccatcagcgggatcggttccattcaccatcgcatccttactccacagcatggaggagcacaaaccattgcctatttgccgtccaccacgccgacggctacgaatttgaagaccacaacctcgattgtggatagcactaccgctggaggaccagtaggagcaggagcacaggtggccgtaggagttggctctgcagccggcggaggaggcgtggtggtctccacagggagcacgggaacgcaaacattacagtatacaacatgtaagtaatctatttcaaactctgatgaaatacgtttgacattcaaatgatttattttcttgatcatatagcttatagtgtggcttcgatacaggctggtggaactctgaaagccaacacagcggatggcgcgaacacggtacagattcatgtcacaggaggaggagctgcaaacaatcctgccagtgcacagactgtttccagcagctcacaaacgggcacaatccgtcagcgtacaatcagcggcacccagacagtggccactgcagtgggtaatctagccacgatttcccagcaacaaccggttcaacaatcacctttgggcaaggcccaaacgcctccatcgtccgtggttgccaacagtatcccagtgggtggaaccaccccaccacaaggacagtcgggaaatgccacgccacgcttaaaagtggaggatgcgttgagctacctggaccaagtaaagtaccagtatgcagaccagccgcaaatctacaacaacttcctcgacataatgaaggaattcaagtcgcactgcatcgacacacccggagtgattgagcgagtctccacactcttcaaggggcacacagagctgatatacggcttcaacatgttcttaccgccgggttacaagatcgaaattcattcggatgctcttggctgttcggtgccggtggtttcgatgccctcaccaccgggagcgccaacgagcacaggaacggtgcatatgctcaccggaaatagttcgatgtccggtgccggacatatcgccatcaagacgaccaatgctgcgactttaacaccggcagcaggggctggagcagcggccgcagcagcagctgtggctcagattcaatccgctggagctgtaaatctaatgacccacggcggagcctcgcttacccagaccactattcatgcattgcaacaggcgacgcctcctcaatcacaatctccaggcggaggtcatgtccacgtgagtgtaacaaactctacggcagcaaacgccgtagtgcccggacagccaggcatctccgtatcggcgcacaatgtaccgcagaactactcgagagatcgagaaagggccaccataacacctactgggcaagtggctggagcagcggcaaacgtgaatgcgtctgctagtatagttgtcggtggacctccaacgcccaattctctaagtgagcttagccctcatggaggagcaggaggtgggccaggtgcgggagcggcgcagcacaatctgcatcacatccagcaggcgcatcaatcgattttgcttggggagacgggacagcagaatcagccggtggagttcaatcacgccataacctatgtaaataagatcaaggtaacgtctactcaacatcattcaaaactatgtaggttacttataatcttttcttcttttttcacgaacagaatcgtttccaaaaccagccggccaagtacaagaaattcctcgaaattctgcacgattatcagagggagcaaaaggtgatgaaggagggcagcctgaaccagggtaaaatgctcaccgagcaggaggtatacacgcaggtggctaagctttttggccaggatgaggatttgcttagagagtttggccagtttcttcctgatgccaccaaccaccagtccgggcagtacatgtccaagtcagcgtctgtgcacaatgaccatggcaagcgtcccacggctactttaagcggtggagctcacataaccatgtcatctgcttcgccagcgccaagtggatcccctctgcatttgggtgcaacgactcttccgcagatcgacaaaagcgcccatgcagcggccataggaaacctttcggcggtgaacactagtgtcagcattaagacgtacaataataatcagcaacagcagaatcatgtgatcggttcagggctgaatgcgacgcggaacgatattctctttgagaaggactatcacgcgggtctgcagcagcaagcgcatcagcgaggagctggagttggaggccatcatcatttggccgggactgcagcgggcgccaatatcggacggcctggagtgggagccagcgtgatggtgtcgtacgataaagagcatcgaaataatcatcatgtacaaaagtacgttggccacgcgccaaaccagaatctaacgcatggtcataacgcaaagaaatcaccaagttatggcattccttcggtgattggttccatgccgcacatttcggacaattcgctcgaccgcagttcaccgggaattagttacgccacgccaccattgccctctggtccacatggacagcataactctggttcagctacgaggaggccgggtgatgacagtttagtcggacactatgctagtggagcgccgcctgctaagcgaccgaagccttattgtcgtgatgtcagcttttccgaagcatcgagcaagtgcaccatctccgacgccgcgttctttgacaaggtgcgaaaggcgttgagaagtccagaggtctacgacaacttcctgcgatgcctgaccctttttaaccaggaaattgtctccaaaacggaacttcttggtctggtatcaccgttcttgatgaagttccccgacctgctgagatggttcaccgactttctgggaccgccctctggtcaacctgctggaggattgattgacggcatgcccttagccgcaacgcaacgtcagggaggtggaagcagtaatagttcccatgatcgaggtaccagtcaccagagtgccgccgagtatgtccaggatgtggatctgtcttcttgcaagcggctgggtgcatcctattgtgctttgccgcagtccacagtacctaagaagtgcagcggacggacggctctctgccgggaagtgctcaacgacaaatgggtatcgttcccgacgtgggccagcgaggactccacttttgttacatcgcgaaaaactcagttcgaggagacaatttacaggtaagaaatattcctttaaccttttcacttaacagttccactttaaataagtcacgagtaaaatcaatactacttctttattggtacttttgtttcctttccgttttcatttgagtctaatatgtgcggttaaccttttaagaaatttgtttttaaaaaacaaaaaaattgtaattcttcatttgttacaaaagaaaaatttgttccatgtttttttttttttgtaaccgcatatattttatactctcaacttacacatctgtcgtttgttttggatcttctgtttctttggctttcgtttatttcaattaaccaatgcgcacgctctaaacaaaaggaatattcacagaacggaggacgagcgattcgagctggacctggtcatcgaggttaatagtgccacgattcgagtgctggagaacttacagaagaaaatgtcacgaatgtccaccgaggaattgagcaaattccatctggacgatcatctgggcggcacatctcaaacgatacaccagcgggccattcatcgcatctacggcgacaagtcgggagagataatcacgggaatgaagaaaaatccgtttgtggcggtgcctattgtactgaagcgactgaaagtcaaggaggaggagtggcgagaagcgcaaaaggtaagtgaactctctcattgctttacatttatgtaaattaaatgaacccttcttttttcagaccttcaataagcaatggcgggaacagaacgagaagtactacctcaagtctctcgatcaccaggccatcaactttaagcccaacgacatgaaagccctgcgctcaaagagtctgtttaacgaaatcgagacgctgtacgatgagcggcacgaccaagaggacgacgccatggaaccgtttgggccgcatctggtgctgccgtacaaggataaaaccattctggacgatgccgccaacctgctgattcatcatgtgaagcgtcagactggcatccagaagcaggagaagcaaaagattaagcagatcatccgacaatttgtgcctgaccttttcttcgcgccgcgacagccactaagcgatgacgaacgcgatgacggtaagttctcgtggtcaaaattcctaaaaccatcatcagttcactgtcaattaacctccaacatatttaatttttcggttgcgctaacactattctttaatttagtagcttctaaaactaactaatattttcaagatctctttaagagttgacttaaaactcatcatcatcagtactcatactaacaatatttatattcatttttttttattaaggagtagtgctttgtgattttgaaacgttaactagtcatgtaaaaaaatttacttctcgatagaaatttgcatgactatttttctttcaatacataaagtttctccctaataacttttgcccgattgtattttttaacatagtgtatgttttttgtttctttttctccattttttttttgcaattaataacaaaaacaacataaacaaataaaaacaaaattttgtaacgtaatcaaaatgctattaaataaaataaaaccaaaactggactgcaatgcaccaacacccacacactgacccctgaactgcatcgaatatccgaacatatgtgttgtgcacaccgtttctctatatagcctttccatttttggtagatgacaatacgaaaatggacgtggactcgccactgggtcgcacggagtcttcgactcgaaatgccaagagtacgcccagtgaaagtgcctctccggcgcgtagcaatgcaagcactagcagcgtaacaccagcgggaattaagaaagagactgatgactcgaaagcgacgacaggatcttttgcaccagcgtcctcggcaacggcatcttcagcgacgcctgtggacgatgctacgccatcaacatcctcagcagcggcggcagcatcagcggcatcgtcatcaactgtttcaggaaccgaaggcaagccaaaggatgaccccctatcgtcgcacaaggaagaaggagccggtagcaccagctctggagttgccacgagtcccaggcaagcccaagacactgcaggagcaggcgtcgatgtggaaatcaaactggaacatcctgcggacttttccaatccaaagcttctaccgccgcacgcgcacgggcaacgcgaagtacgttaaacaacgcttttaaatataatatgtattaaatatgggttttttatcataaacaggacgaatcctacacgctgttcttcgctaacaacaattggtatttattcctgcggctacatgcgattctctgcgaccgtctgcatgttatgtatgaaagagcgcgtttgctggccatcgaggaggagcgctgtagggtgaatcgaagggagagcacagccacggcgctgcggctaaagcccaaaccggagattcaagttgaagactactaccccaccttccttgatatgctcaagaacgtcctagacggcaacatggactcgaatacgttcgaggacacgatgcgtgaaatgtttggcatttatgcctacatctctttcacgctggataaggtgagtgttaaaattttattcaaaaagttgatatctattttttctaaaaacctttccttttgaatataataaactaaacttttcgcatttgttcatcttcaggttgtctccaatgctgttcgccagctgcaatattgtgtcacagaacgagccgcactggattgtgtagagctgtttgcaacggagcaaaggcgtggctgcaccggaggattctgtcgagatgcgcacaagacatttgacagggagatgtcgtatcagcggaaagctgagagcattctcaacgaggagaattgcttcaaagtgtacattgtaagttttagaatgcagcaccgttaaagaaattaactaacaaaaactacatttgcagtacaaaatcgattgccgtgtaaccatagagctgcttgattcggagcccgaggaagtcgataagccggctgcgttgaaggcccagaagttcagcaagtatgtagagcggttggcgaatcctgcgctcggcggtggtggcaatactggccgctccgattcggcgctcggcaatgacagcgttgtagatgggtccgatatcaagacggaggcggacgaagatactgccgaggtaagtgtcataaggcagcgatgagatgctccggagccggagcagctatgtgtggtgtgtgcttgaagagtggttaaccatgttgtttgtgtatttcgttgttcatttcgattatgtttacgtttacgtttttgattccctgttctactcatgagttgtgttttcggtacttccactgtacatacaaacctgtcacctgatttagacgatggacaagacattccacatcctaccgtactatattctgtatatacatatatatatataaatatatcttagttttctgttatctatctgttgttacctatcgacttttttcactgcactttctattatttaaatcccttagtttcgccagcttgtaactttatttctattattgtatgttttcgttttggtatcatttatcaacatgccgccaacttattaatcgcccacatttcgtatgcatacaaaagaatacgctgcttgcatacgagcaaagaaagtacataaaaaaggacaagaaaatattcactaattaatgcttttttgcattcttttctctcattttttccaatttattttttcgtaccaggtcaataccaaggcttgaaataacatagttttgataatttcattgaataagaagaagaaaaagtcatattgcaaaatgaaatagtaataaatgaatttgttttttgattaccaaaaccggaataagagaaattgaaacaccaaaccctttcacccaccaccaccaccaccaccaccactactactactactactactactaccacgctcaacacccaccaccgccacccactcacacacattaaatgtaatgcattattttctcagagacaccaaacaataacctgcagaaccaacgaagaaacagaacccaaagtacacactttaattaaatgtagtattccatccacgaacatgaacatgcataaaaaccgacattatgtaaaatagtagatgatgataacaataacgtaggcacgcgcttgttgcattcccttctgatttcgttatgccttgagttacccaagagttatctatagcgatatagacagtttcatatatcgggtgatcgaagatccggcacctaggatgtgatgatgtgaggttgaacatgaagatgaagatgatgcatacaaagatggtaatggtgttgtggattggggtgtggtgtgtgtgagtggtgcttctgatgttaataagactattgcgtttaactataggcctaaattacacctcacacaattgtatatagtaattaacgtgttttaactgtacataacgtaatgctaatgctaatggtaatcggtcaatgtatgtattattatgtgtaaaacgtgtagtagctaattttgtaaaggaagcagacaaatgtcttttaaattcggtaaacatttttatatctaggcataagaaaacacacacacaccactccacacactcaataattgtaaattaaatagcacacacaatcacaacagtggacattactggagagtgaaaatgagaaatatatctggagcagcccattaaaaatacatgttcaaagttattgaaacagtgggaatgggatggtcttgagggggtttgggggttttcctttttccgggctagagccacaatcgaactcagtaattgccacacagacttaagtttaagcaaggtaagtcatcatcgcattgttcaactctttgtttcacttagattaagcttaatatttgttatatttattttctttgtgttttgattgtatttgtagttgtgattgattttgtttcgttccgactttcaccctgtattttatgtcctttggtttgtgtttgtcccattgtgcgtgtgagtctatgtcttcggctttgtgtttgttggcctggtacctccatcctcttgtgttctttatatctttacaatacccttaatatagttaatatctgtaaactgttccgtaacgctacaatacacagcccacacatctcagcattcccagctttaagtattctcgtatattctgtgagcatgtcgaattgccgccggatttcaagtgctcttcttggctgcattgtcgccggcaattgtcgcaattactcacaataaagactaactttgcattgcttttattccagttgcgctacagagaaggtggaatcggaggagcaggcaaggcgcgctttttggtgcgcaacaagcggagatcaaagctgcttgaggagcaagtgcgtcagttgtttgaacataggcggaatcggattgagcagcatggtactgcggcctcacttgaacccatctccgttgacagtgccatttcaagcaacagcaccaccggcggtggcggcagcggcactaataacaacaataataataataataataacaacagctggggcggcaaacgtctggagaggctgggcgccccacaggtgggcttggccgagcaatacgcctttaatgatcgcgacgagatcagcacaaatatcagcaacgggcgatgttttgtgaccagcaagaatctcaagctacttaagtacgatgcagtgcgtcgtgccaagaaggtgagtgttttatttaaacgcagtatttggataaaaacatacttacgaatttgtttatttctctgcagagtcattgccgcgtaactcaggcgaaatacgctcacttccaaacgtacgttaacaagtggcttcagcaacatgtcagcgagcaacagcagcagaactgcgtcgactggctgctgggcaagacggcagaccaaatcaatgccagcggctggggatccgccagcaaaaccaagacggtacagcagaaggatacttcgaagacaccgtatcgcatctacaacagatacagagtggtgcagagtgcagtaagcggcggtttgatgagtgccactgctccaactccagatggttcagttccggcggtcaattccgcgccatcaggctcagtttcaacggtgaacaatgtacagggctcggcggcagtatcctcaacttcccactcgatgtgcaacagtagcattttgtccgcggactccaccaccaataccaatgcgtcagcacagcagcagcagcattgcaacagtgcagcagctgcaacaacaccgaatgcagaggcactgcaacaggtgcgacccatggagagctaaccgacgggaatgggagcaacaacggcagtggtcgctgcatggccagattcttcattcacatgacgacaatgagaagatgtgggatgaattgcctgcattgaaataaatagtgttttaaatgtgataccagttcctcgacgcggtcatcgagattgcagctataccaacgcgcgatcgactgtttaatgtccggcatggcattgggctctggaaattgattgatgaacgaaggaaagctctttttcatattgtacaaaaagtcatttaatcttaggcgaaagtgctcctaaataagaattttatagtcttacgttgcataaattttagaattaattttacgacggcagcgtcctgttttattgatgcgcttttagaattaagatataaagtttatacgcctagagccacatacaccttaaacacaatcgcaagaccacaatttaagtcacggatatttttaacgattttgcactagaaaccgatcgagacagttgtgctagtaactaggaaccagaacacgtctgtttagtgttttaagattttttaaaaccaagctcttttactttatcataagtgtaacgtatttttaatacaaaacaaacaaaacacccacatacaaaccgtgtacaattccttgtgaatactattgtttatatattttacgcgtttaaggttattaagttaaattgtaaaaatgtattgcgcagatattaaaacaaaagtttatcaaaagtgaatggaaaatatttaattgattagacccacttttggcattcgataaattttcgtaaaagtgcatttaatgcaaagttacttgtaaataaaatcccttctcgttataatgccagcaatgcgattctcatggttgatgaccagcaaatgacgcaaccccaatgcgcggaatatctgaaaaattctaggcaccgaatcgtgctaagaaacaattggataatcaaacagtgcttggagaaatttcaaaaaatgtaacattactcaccggattgactcgaataggtgatggattcataaacatggacaagtccacagtgtaattgattttctcatctagcttgcgaacactctgaaataggaaacttgaaatattttccttaataatgttgtaatacaaatcaataccttgattgatggaaaacggggatagaggtccctgaatgtctgaattgaagtttctggcagccagaatcgtttgttctccacatacagggatttgagcaaaataacaatcagttgcgagcgcaagatgatgccacaaacgcgaccctccgatcgacgatcctgcaagattggtaaaatactaataacatggagttatgtgaaatttctttgatcttactccgcaaacatcatcgaccaccggaaatccgttgtggtcgcacttcttgagcatctcatatatgtaattagcggaatcgcggatcttgatacagatcactggtttgcttagaatttcgcgagctttcagacccttgtattgcggcaatggctcccaggtcagcatgggcacatgatttacttggatctgcgtatcgtagatgccctcgttgaagtagtcaccgacccacttggcgctgataagtgcaatgataaggg

SEQ ID NO: 18815 - DNA, 7925 bp, DROSOPHILA
gacgccgcacacaaaccgagttgggatttcgttgtaattgctggtcatttttcacggctgtgcgactaattaaatttaacaagagagccttaataaataagtgctaaagaccagacgcagcgcgcagtaattcaaatcatctagaagatctcgtaaaacaaaatgtaaagtcctggcgtggggttgatcataacgcatacatatacccatgtgtacgtgtgtgtttccattgtaatctaaagcacgagtgaatttacgtgcgttaaatttaaacgaaaatttaaaaaaatatttcgagatattgcaacaaaggcagtattaaatcgatttctggtgcatgtgcttgtgtgcagaatgtttgcatgtgtttgttgcaaatgtaagaagaagtagccactcacgcgctactctcttcctttctctctctctccgccccctccccattagctctacaagcagctgaaagttgtagccgcactacattcaaaagtttccaaaagtctgcttgctggcagtagtaagaaataaagacttaaaaacaaaaacatcacttagtaatatcagtgatattcagaaagaactccaaacgctacgtggcagaggcgaatcaccggcgcagcaacaccagcagcagataaccagccgtcagtccaatttctctaccttagaactcgagcgcatttgccgcttgcggggcgaccaaatgcatagacaacatatgtcgcattcacgagcagtccaagatcaagagttgcgaccccgaccgtttgttgcatattacatacgctcatagagggcggccactcacctagagcagccagagtccttgcacttgggcagggatccagggagcaacaaagtgcttagaaagaagaagcagcagcacaggattatacgctccgccgaggacagagcaacaaaaaagatgatgaaacgcactcgcgtagacgaggtgcaatttggcacacgacccgttcctcagacctccggaggtgtgggcgttggtgtcgtcggcgtaactggaggtgggccaacatccggcggcggtggcactgctactgtgggcgtcaatacgacgggcgttaccattggtaccgtcgtgcccagtgctcataacgccaccatcagcgggatcggttccattcaccatcgcatccttactccacagcatggaggagcacaaaccattgcctatttgccgtccaccacgccgacggctacgaatttgaagaccacaacctcgattgtggatagcactaccgctggaggaccagtaggagcaggagcacaggtggccgtaggagttggctctgcagccggcggaggaggcgtggtggtctccacagggagcacgggaacgcaaacattacagtatacaacatcttatagtgtggcttcgatacaggctggtggaactctgaaagccaacacagcggatggcgcgaacacggtacagattcatgtcacaggaggaggagctgcaaacaatcctgccagtgcacagactgtttccagcagctcacaaacgggcacaatccgtcagcgtacaatcagcggcacccagacagtggccactgcagtgggtaatctagccacgatttcccagcaacaaccggttcaacaatcacctttgggcaaggcccaaacgcctccatcgtccgtggttgccaacagtatcccagtgggtggaaccaccccaccacaaggacagtcgggaaatgccacgccacgcttaaaagtggaggatgcgttgagctacctggaccaagtaaagtaccagtatgcagaccagccgcaaatctacaacaacttcctcgacataatgaaggaattcaagtcgcactgcatcgacacacccggagtgattgagcgagtctccacactcttcaaggggcacacagagctgatatacggcttcaacatgttcttaccgccgggttacaagatcgaaattcattcggatgctcttggctgttcggtgccggtggtttcgatgccctcaccaccgggagcgccaacgagcacaggaacggtgcatatgctcaccggaaatagttcgatgtccggtgccggacatatcgccatcaagacgaccaatgctgcgactttaacaccggcagcaggggctggagcagcggccgcagcagcagctgtggctcagattcaatccgctggagctgtaaatctaatgacccacggcggagcctcgcttacccagaccactattcatgcattgcaacaggcgacgcctcctcaatcacaatctccaggcggaggtcatgtccacgtgagtgtaacaaactctacggcagcaaacgccgtagtgcccggacagccaggcatctccgtatcggcgcacaatgtaccgcagaactactcgagagatcgagaaagggccaccataacacctactgggcaagtggctggagcagcggcaaacgtgaatgcgtctgctagtatagttgtcggtggacctccaacgcccaattctctaagtgagcttagccctcatggaggagcaggaggtgggccaggtgcgggagcggcgcagcacaatctgcatcacatccagcaggcgcatcaatcgattttgcttggggagacgggacagcagaatcagccggtggagttcaatcacgccataacctatgtaaataagatcaagaatcgtttccaaaaccagccggccaagtacaagaaattcctcgaaattctgcacgattatcagagggagcaaaaggtgatgaaggagggcagcctgaaccagggtaaaatgctcaccgagcaggaggtatacacgcaggtggctaagctttttggccaggatgaggatttgcttagagagtttggccagtttcttcctgatgccaccaaccaccagtccgggcagtacatgtccaagtcagcgtctgtgcacaatgaccatggcaagcgtcccacggctactttaagcggtggagctcacataaccatgtcatctgcttcgccagcgccaagtggatcccctctgcatttgggtgcaacgactcttccgcagatcgacaaaagcgcccatgcagcggccataggaaacctttcggcggtgaacactagtgtcagcattaagacgtacaataataatcagcaacagcagaatcatgtgatcggttcagggctgaatgcgacgcggaacgatattctctttgagaaggactatcacgcgggtctgcagcagcaagcgcatcagcgaggagctggagttggaggccatcatcatttggccgggactgcagcgggcgccaatatcggacggcctggagtgggagccagcgtgatggtgtcgtacgataaagagcatcgaaataatcatcatgtacaaaagtacgttggccacgcgccaaaccagaatctaacgcatggtcataacgcaaagaaatcaccaagttatggcattccttcggtgattggttccatgccgcacatttcggacaattcgctcgaccgcagttcaccgggaattagttacgccacgccaccattgccctctggtccacatggacagcataactctggttcagctacgaggaggccgggtgatgacagtttagtcggacactatgctagtggagcgccgcctgctaagcgaccgaagccttattgtcgtgatgtcagcttttccgaagcatcgagcaagtgcaccatctccgacgccgcgttctttgacaaggtgcgaaaggcgttgagaagtccagaggtctacgacaacttcctgcgatgcctgaccctttttaaccaggaaattgtctccaaaacggaacttcttggtctggtatcaccgttcttgatgaagttccccgacctgctgagatggttcaccgactttctgggaccgccctctggtcaacctgctggaggattgattgacggcatgcccttagccgcaacgcaacgtcagggaggtggaagcagtaatagttcccatgatcgaggtaccagtcaccagagtgccgccgagtatgtccaggatgtggatctgtcttcttgcaagcggctgggtgcatcctattgtgctttgccgcagtccacagtacctaagaagtgcagcggacggacggctctctgccgggaagtgctcaacgacaaatgggtatcgttcccgacgtgggccagcgaggactccacttttgttacatcgcgaaaaactcagttcgaggagacaatttacagaacggaggacgagcgattcgagctggacctggtcatcgaggttaatagtgccacgattcgagtgctggagaacttacagaagaaaatgtcacgaatgtccaccgaggaattgagcaaattccatctggacgatcatctgggcggcacatctcaaacgatacaccagcgggccattcatcgcatctacggcgacaagtcgggagagataatcacgggaatgaagaaaaatccgtttgtggcggtgcctattgtactgaagcgactgaaagtcaaggaggaggagtggcgagaagcgcaaaagaccttcaataagcaatggcgggaacagaacgagaagtactacctcaagtctctcgatcaccaggccatcaactttaagcccaacgacatgaaagccctgcgctcaaagagtctgtttaacgaaatcgagacgctgtacgatgagcggcacgaccaagaggacgacgccatggaaccgtttgggccgcatctggtgctgccgtacaaggataaaaccattctggacgatgccgccaacctgctgattcatcatgtgaagcgtcagactggcatccagaagcaggagaagcaaaagattaagcagatcatccgacaatttgtgcctgaccttttcttcgcgccgcgacagccactaagcgatgacgaacgcgatgacgcctttccatttttggtagatgacaatacgaaaatggacgtggactcgccactgggtcgcacggagtcttcgactcgaaatgccaagagtacgcccagtgaaagtgcctctccggcgcgtagcaatgcaagcactagcagcgtaacaccagcgggaattaagaaagagactgatgactcgaaagcgacgacaggatcttttgcaccagcgtcctcggcaacggcatcttcagcgacgcctgtggacgatgctacgccatcaacatcctcagcagcggcggcagcatcagcggcatcgtcatcaactgtttcaggaaccgaaggcaagccaaaggatgaccccctatcgtcgcacaaggaagaaggagccggtagcaccagctctggagttgccacgagtcccaggcaagcccaagacactgcaggagcaggcgtcgatgtggaaatcaaactggaacatcctgcggacttttccaatccaaagcttctaccgccgcacgcgcacgggcaacgcgaagacgaatcctacacgctgttcttcgctaacaacaattggtatttattcctgcggctacatgcgattctctgcgaccgtctgcatgttatgtatgaaagagcgcgtttgctggccatcgaggaggagcgctgtagggtgaatcgaagggagagcacagccacggcgctgcggctaaagcccaaaccggagattcaagttgaagactactaccccaccttccttgatatgctcaagaacgtcctagacggcaacatggactcgaatacgttcgaggacacgatgcgtgaaatgtttggcatttatgcctacatctctttcacgctggataaggttgtctccaatgctgttcgccagctgcaatattgtgtcacagaacgagccgcactggattgtgtagagctgtttgcaacggagcaaaggcgtggctgcaccggaggattctgtcgagatgcgcacaagacatttgacagggagatgtcgtatcagcggaaagctgagagcattctcaacgaggagaattgcttcaaagtgtacatttacaaaatcgattgccgtgtaaccatagagctgcttgattcggagcccgaggaagtcgataagccggctgcgttgaaggcccagaagttcagcaagtatgtagagcggttggcgaatcctgcgctcggcggtggtggcaatactggccgctccgattcggcgctcggcaatgacagcgttgtagatgggtccgatatcaagacggaggcggacgaagatactgccgagcacacacaatcacaacagtggacattactggagagtgaaaatgagaaatatatctggagcagcccattaaaaatacatgttcaaagttattgaaacagtgggaatgggatggtcttgagggggtttgggggttttcctttttccgggctagagccacaatcgaactcagtaattgccacacagacttaagtttaagcaagttgcgctacagagaaggtggaatcggaggagcaggcaaggcgcgctttttggtgcgcaacaagcggagatcaaagctgcttgaggagcaagtgcgtcagttgtttgaacataggcggaatcggattgagcagcatggtactgcggcctcacttgaacccatctccgttgacagtgccatttcaagcaacagcaccaccggcggtggcggcagcggcactaataacaacaataataataataataataacaacagctggggcggcaaacgtctggagaggctgggcgccccacaggtgggcttggccgagcaatacgcctttaatgatcgcgacgagatcagcacaaatatcagcaacgggcgatgttttgtgaccagcaagaatctcaagctacttaagtacgatgcagtgcgtcgtgccaagaagagtcattgccgcgtaactcaggcgaaatacgctcacttccaaacgtacgttaacaagtggcttcagcaacatgtcagcgagcaacagcagcagaactgcgtcgactggctgctgggcaagacggcagaccaaatcaatgccagcggctggggatccgccagcaaaaccaagacggtacagcagaaggatacttcgaagacaccgtatcgcatctacaacagatacagagtggtgcagagtgcagtaagcggcggtttgatgagtgccactgctccaactccagatggttcagttccggcggtcaattccgcgccatcaggctcagtttcaacggtgaacaatgtacagggctcggcggcagtatcctcaacttcccactcgatgtgcaacagtagcattttgtccgcggactccaccaccaataccaatgcgtcagcacagcagcagcagcattgcaacagtgcagcagctgcaacaacaccgaatgcagaggcactgcaacaggtgcgacccatggagagctaaccgacgggaatgggagcaacaacggcagtggtcgctgcatggccagattcttcattcacatgacgacaatgagaagatgtgggatgaattgcctgcattgaaataaatagtgttttaaatgtgataccagttcctcgacgcggtcatcgagattgcagctataccaacgcgcgatcgactgtttaatgtccggcatggcattgggctctggaaattgattgatgaacgaaggaaagctctttttcatattgtacaaaaagtcatttaatcttaggcgaaagtgctcctaaataagaattttatagtcttacgttgcataaattttagaattaattttacgacggcagcgtcctgttttattgatgcgcttttagaattaagatataaagtttatacgcctagagccacatacaccttaaacacaatcgcaagaccacaatttaagtcacggatatttttaacgattttgcactagaaaccgatcgagacagttgtgctagtaactaggaaccagaacacgtctgtttagtgttttaagattttttaaaaccaagctcttttactttatcataagtgtaacgtatttttaatacaaaacaaacaaaacaccc

SEQ ID NO: 18816 - protein, 1775 aa, DROSOPHILA
MKRTRVDEVQFGTRPVPQTSGGVGVGVVGVTGGGPTSGGGGTATVGVNTTGVTIGTVVPSAHNATISGIGSIHHRILTPQHGGAQTIAYLPSTTPTATNLKTTTSIVDSTTAGGPVGAGAQVAVGVGSAAGGGGVVVSTGSTGTQTLQYTTSYSVASIQAGGTLKANTADGANTVQIHVTGGGAANNPASAQTVSSSSQTGTIRQRTISGTQTVATAVGNLATISQQQPVQQSPLGKAQTPPSSVVANSIPVGGTTPPQGQSGNATPRLKVEDALSYLDQVKYQYADQPQIYNNFLDIMKEFKSHCIDTPGVIERVSTLFKGHTELIYGFNMFLPPGYKIEIHSDALGCSVPVVSMPSPPGAPTSTGTVHMLTGNSSMSGAGHIAIKTTNAATLTPAAGAGAAAAAAAVAQIQSAGAVNLMTHGGASLTQTTIHALQQATPPQSQSPGGGHVHVSVTNSTAANAVVPGQPGISVSAHNVPQNYSRDRERATITPTGQVAGAAANVNASASIVVGGPPTPNSLSELSPHGGAGGGPGAGAAQHNLHHIQQAHQSILLGETGQQNQPVEFNHAITYVNKIKNRFQNQPAKYKKFLEILHDYQREQKVMKEGSLNQGKMLTEQEVYTQVAKLFGQDEDLLREFGQFLPDATNHQSGQYMSKSASVHNDHGKRPTATLSGGAHITMSSASPAPSGSPLHLGATTLPQIDKSAHAAAIGNLSAVNTSVSIKTYNNNQQQQNHVIGSGLNATRNDILFEKDYHAGLQQQAHQRGAGVGGHHHLAGTAAGANIGRPGVGASVMVSYDKEHRNNHHVQKYVGHAPNQNLTHGHNAKKSPSYGIPSVIGSMPHISDNSLDRSSPGISYATPPLPSGPHGQHNSGSATRRPGDDSLVGHYASGAPPAKRPKPYCRDVSFSEASSKCTISDAAFFDKVRKALRSPEVYDNFLRCLTLFNQEIVSKTELLGLVSPFLMKFPDLLRWFTDFLGPPSGQPAGGLIDGMPLAATQRQGGGSSNSSHDRGTSHQSAAEYVQDVDLSSCKRLGASYCALPQSTVPKKCSGRTALCREVLNDKWVSFPTWASEDSTFVTSRKTQFEETIYRTEDERFELDLVIEVNSATIRVLENLQKKMSRMSTEELSKFHLDDHLGGTSQTIHQRAIHRIYGDKSGEIITGMKKNPFVAVPIVLKRLKVKEEEWREAQKTFNKQWREQNEKYYLKSLDHQAINFKPNDMKALRSKSLFNEIETLYDERHDQEDDAMEPFGPHLVLPYKDKTILDDAANLLIHHVKRQTGIQKQEKQKIKQIIRQFVPDLFFAPRQPLSDDERDDAFPFLVDDNTKMDVDSPLGRTESSTRNAKSTPSESASPARSNASTSSVTPAGIKKETDDSKATTGSFAPASSATASSATPVDDATPSTSSAAAAASAASSSTVSGTEGKPKDDPLSSHKEEGAGSTSSGVATSPRQAQDTAGAGVDVEIKLEHPADFSNPKLLPPHAHGQREDESYTLFFANNNWYLFLRLHAILCDRLHVMYERARLLAIEEERCRVNRRESTATALRLKPKPEIQVEDYYPTFLDMLKNVLDGNMDSNTFEDTMREMFGIYAYISFTLDKVVSNAVRQLQYCVTERAALDCVELFATEQRRGCTGGFCRDAHKTFDREMSYQRKAESILNEENCFKVYIYKIDCRVTIELLDSEPEEVDKPAALKAQKFSKYVERLANPALGGGGNTGRSDSALGNDSVVDGSDIKTEADEDTAEHTQSQQWTLLESENEKYIWSSPLKIHVQSY

SEQ ID NO: 18817 - DNA, 2713 bp, DROSOPHILA
atcacggcgttcttccagtgcagccaccttcatttcatggagtttgcccaacaaggaactatgacgtctctgcgcacggggattgccaaaataaaaccacgttaataactttcatttacccctagcaaatgggtggaatccctaccttgatgtgcatgtgaaagttcccggtggagcggacactgccgcgataaatccgatccggcggacagtagcagcacttgaccgtaacattgtcgcccacctgcttctcgatgcgatacagttccccgttcaggatgtacggcacatgctttttcagctccatcttttcttcagaaccgtccaagtttacggacatttttcagtttcataaatgggaatgaacctgctagctttcgagaacgaagggaataggaggaatgtcaaagcagaggaagatacagattctctcctcgcaggaataggaagaaaatggaatgaaagagagaactaggcaaaagcaacggttcttgactaaccgaagatagacaaaaagaatagaaaaaggcccctttgtacgtttaaagttggcaacattattagtgttaaaaaattggtcacgaagtgactttatagtgacttataaataatggcattattacttacgtaaattacttttgtcctttgaactgtatgctagaataggtcaaataggtattcttaggaaaattaaattaatttattttacgccaatataattgtaacaaatttctatatttgatctaaggtctaaaatatgaaataaaagcctatttatattatactgacgagaaatatttaaaaacctttttgaaataattgaactacatatgtagtcattttgcgccaagcaacgataaagaatacgcgaggaaacagtccggcatccctattcttgctctgaaacatggtggcagctttaccatgtgtactaaagaaactaagttgacagctccggttcttaagtataaacaactttgcttcacgtgctaaacgttataagtaacaaaaataaaaggttgttttctggtccaatatatacccaactgattagtaaaagctatgtcagaaccagagccagatgtcaagcccaacatactaataaccggtgggtattcctgctcccctcaaacattaatatgtttttgttttacataaaaatcaatgtatttttaggaactcctggagcggggaaatcgtatttatgcgaacgtatagcctccgaactaaagtttgagtggctggactgctccaaaatcgccaaggagaaaaattttgtagaggaatatgacgaggagtacgattgtcccattctggatgaagaaaaggtatagatcttgttcattacctaataagtttaatgtatatatggtattgtttcagctgatggatcacttggagcccctgatggcaaaggggggcaacgtcgtcgagtatcatggctgtgatttctttccagagcgctggtttcaagccgtcttcgtggtaacctgtcccaatacaacactctacgatcgtctgaaggagcgcaactacaacgaaaagaaactggcatccaatattcagtgcgagatctttggaaccattttggaagaggcccgcgattcctacaaatcagatatagtattcgaacttaagggcgaaacaaaggcagatgcccatataagcataaaaacagtcaaaaactggtatcgtatgtggaaaagaaaataaaaaagcgattggtactttgttatactcgttatcttatgtataaatgcttaaacatttgtgtgtaaagtgactattatttacaacagagtgtataaaatcgaaatactaaagtctacaaactaaactcgtgtcatcttaaagcgcagcggtccatccggcgcgtacatgaaagtgactgcgtaatccagtggcttgtggttgtactccagtttgtagtttcgtagtagcttggccagcagtatttgcatctccagatcagcgaatcgacgacccagacacatccgagctccatagccgtaaggcagcgaggcgaacgggtgaagtttgcccggagtaccaccatgctgtggtttcaaccatctttcgggcctgaaagtggctgcatccgtgacatactcctccatattacccgtgacaatagtcggaaagaccgcctgcactcccttgggcacctggtagccacagatgacactgtcctccatgagagttcgtccgtttccaatcaccgtgctgtacatgcggaacacctccttgatgaagcccttcaggtggtgcatctgatcaagcagcggaattgtgagtggtgtgtttggatccggaagtagtcgctttaattcctcgtgaaccttttgctgatccactggacgtgtggccagttggtacaacatcgaacaaacagccatggatatctgtagcatacatatcaattagaatttctaagttcttttcaatttatcatatctgaccgtatctattccgacgagaatcaaatcaagtgccataatggtggctattttttcgtccttctgcgaaaggatgaccttctccaccagcgagggctcgccggcacgtagactgggatcttgggtcttcagtctttcggtggcactctgaatgtacttcatgcagacactgcggggccatagaaattatttattattgaacaactgttttttataatgtatttacccaacaaaaaagttcatgttcttcacgtagc

SEQ ID NO: 18818 - DNA, 590 bp, DROSOPHILA
aagtaacaaaaataaaaggttgttttctggtccaatatatacccaactgattagtaaaagctatgtcagaaccagagccagatgtcaagcccaacatactaataaccggaactcctggagcggggaaatcgtatttatgcgaacgtatagcctccgaactaaagtttgagtggctggactgctccaaaatcgccaaggagaaaaattttgtagaggaatatgacgaggagtacgattgtcccattctggatgaagaaaagctgatggatcacttggagcccctgatggcaaaggggggcaacgtcgtcgagtatcatggctgtgatttctttccagagcgctggtttcaagccgtcttcgtggtaacctgtcccaatacaacactctacgatcgtctgaaggagcgcaactacaacgaaaagaaactggcatccaatattcagtgcgagatctttggaaccattttggaagaggcccgcgattcctacaaatcagatatagtattcgaacttaagggcgaaacaaaggcagatgcccatataagcataaaaacagtcaaaaactggtatcgtatgtggaaaagaaaataa

SEQ ID NO: 18819 - protein, 175 aa, DROSOPHILA
MSEPEPDVKPNILITGTPGAGKSYLCERIASELKFEWLDCSKIAKEKNFVEEYDEEYDCPILDEEKLMDHLEPLMAKGGNVVEYHGCDFFPERWFQAVFVVTCPNTTLYDRLKERNYNEKKLASNIQCEIFGTILEEARDSYKSDIVFELKGETKADAHISIKTVKNWYRMWKRK

SEQ ID NO: 18820 - DNA, 8700 bp, DROSOPHILA
atttaaaaatatatttcttgtatactggcggctatatgtacagcttatataactatttcgagggcaagtctatttcgattgatttttaactcgtttaagtctactaatgcactattagttgttgcgtctgtgtgagagttttgaggcacccattatgaatttatgaattatgttgggaatagactgtggatgaggtggttttatggatgggttgaaagaaataaaaccaaaagagaaatacaattgcgtgtatatatttgaaatatatattaatataaatatatattgttttcattcatgtattttgttctaaaaacgtgttgtgattgctttttaaaaattaatttaaaattaataaaatagttgcgttaaacataattcatatagaaatattataaagaatttataactataacttttctttatatatgccataatatgtataattatatttgctaacatttttctttaccaaggctgcaaagtaaaattaactaaaacttaaacaatttaaaaagccgttcatcttccttactgtacgcatacgaaaacaaaattcaactaaaatgtttatgtttttgggtaacaggaaaagggggtagggtgggcgggggggggggggggtgggctggttgggttttcgtttttgagcttacagactagacgtagagctaatataacttttaatgtgtgtttttgtttttctttgtggtaatatcaattaaaactaggcataaatataaagcttaacatgcttaaacaatcgaaaattgagcataaggaaataagtaaatggtgtgcatatacaattacatacatatataaattataaagtattaacaaatcaaatttttgtgttgtttttgttgtggttataatcgttctgttggaaggttgttggtttcgatttcatttcattcgttactcctcctcctcatcttgactaactaaattagtagcttgtagtagataatagttgctaatttggcctgactttcatttagacacgtttggtggtgcttccgtctccgccttcgcctccgcctccgccaacgcttccgttgcgtttgcggttgatattgccgctgtcgctactgcgactgatgcgtcggatgcgacacggcatccctgagcgtcttgagacccgcctgcacgtaccggaacacctcgtgcatggtgctatgcagcgtcagcgggccgttctcgtgatccagttctcggatgaaatctaatggattcagacattgatcattaatatatatcattaggcggacgcctaaacaactcacctatatgattgcctgtgcgcaccaatcgatcggcttgatcccacaactcgtgagcgctatttagatagctcagaaactcattctgcttgcacagcatattgtgtatatctggaggcactattctgcctggcggcgtattcgaaccggagccctgaaaacagagaaaagccgcaatgaataaacgaaatccgcacatgagtagctgccaactgagagactcacctgcgagcccaccgagttcgatggtgatatggaggacggcgtgttgccgttggcaatgtcccccctgccaacgcgaaagaaatctgttagactgttgataatggcccgacaatcctttcttctcagcttataaagctttaatgatatcaacgactggcagcgcaaactgctcgacgagattggggaaaaatgaaaagtgtcattagcaagtgtacttcgacttgagttaagttaattgtaatgatctacctgagaatggccactttgttgtgcgtttcgtgctgaatgttggtcgttgactgctgctggtagggacgaaacttagtggagataaacctgcaagttgatggcatgttattggtgagttctgctcggaccacttccgtctccgtgggcgcacatttgttggcacactttactcacttaattagcgacagggtatccttgtacatggtgttggtggcctgctcggagctgcagcgctccatggcatcggcggtcagcaagaagtagacaacggcctccaggtacaatgtcacctggttgaaggagtcgcgctccaagtcggcggcatgcttccgattgatggcctcctgcaggaactgattgttttttctagaagataaaacaaagtacatacattagatctgtgtaagtataatagctcatgggactaggtggtaatgataatcacctgggatcgtcgctggggtgctccacatcgcgatcgaaataggagcggtatataagccttgtggctggcaccggaggagctattgcagaggttgctgttgccgatggcggagtagtctgcactgcctcattgcaggtggcaggcgcaacggtgacagttggcggaggcggtagaggtgacatggccagcagctttttggtgggactgccatttggagcggacacatcgccaatgacggcggcagcgtcctcgtgaagcaactgcagcttgtcataggacaatcgatcatggttcggcattcgctcgtggttgttagagggcagaagcacgggcactggcaacagttccttgcccatctgtagctggtcggccttctcctttttccgcttcttctccttgtacggactggagctggaactggagctgcgtttccgccgtcgcccaggaggttgctcacgctcacgatcccgctcacgttctcgttcccgctcccgttctcgctccctgtcccggtctcgttcctgcttcagctggaactcctgcttgacattgccgggcttgaatttggcctcgtagccggcgtccagctcgggctccggtttcaccggatgctcgtgcttgaccttcgccgcgggatttgtgtcgccggcatagccattgggcacatgaaccgcattcgtcgcctgatccttgggcgtcagatggccattctgctgggcgggtgttagtttcttcagtcgcataatgcgctctcgcgaaagcttgcttagatcgatcttgcatatcaaggaggttagatgtggcgttgttgtcctcgctggcgaggccagtccggctcccagctgctgttgctgagtgggtgtcatccggggcttggccattatggcggcaggtgctgcaggtggcgcctgtggagctgatggctgtgccgccgcatccaacttgccctgttgttgctcctcctgcaggtctacgataacgacctggccctgtttcttggcgccgccctcctttggattgaaaatcctcgtcagcgtattaatcttattcttgtcactcttgggcttcctctcgcgctccttttcacgccgcccctcgtcctcctcgccgctgctgctgctgcacacagcagtacagccaccactcgatgaggagcagtcggaactgctcaggtgctgactatgctgactgatcggcagctgcttgtagggcggcagttgttgtgctagcgcctgcccacttccaacctgtgacctggtggtctgatcttccgcctcgctgccactgctgcttggtgaactgctcccgctgcccagcagcgccttcttctgcacagcgccagtcttgttcagcttgactatccggcagttggtgttctgggtttccgtgtcgtcgctgctgctcgaagagctgctcgatttcgaactggattcggcacttgaggagctgtcctcgtcggagctgctactgccagcagtgttacttgtcggtttcaggggagcggcgaccagctggggtgtggccacctttttggtgggcgtattgccgttggagctgctctggctggaatgttcgcgcttcctcgccctgctcatggccagcggtgtcttggcgagaggctttttggcagcggtcaacgtgggacccttggtctgggagctgctgccggctgatgcactactgaggttaccactgccgccgctctgctgctgcttcctgggccgtccgcgtccctttttcaccgtatccgtagctggctgcgtttgaaccgaaacagctgtgtgatccagacctggatgcttgggcggcggctcatcgtcgtcgcttgaatccagaatgggggcacttgtaatcgcctttttctttcgcggcttcttttgtcgctgttttggcgacgtgggcagcggaagaatcggcgtcaacgtgacgctgttgctcggcggtgccttttgtgactgcgtcggttgcactcgcataacagttgtaatggcggccggtacgccgggaagctgaagggtttctccaggacctggcatgggcaccacctcgcctcccatcgcactgtccgaactgctgctgctgctcgatgagctgccactggcactggtcccagaatccgaaagccgggctgaaagcaaagtctcagccgactcacgtttgatttgtgtttttggtatcgctccaagcgccatctccgatacagcgtcaatggcctcctttttcaccgccaccggtgtgacactcagtccgccaccgtagcgcagttgttgctcctcgtcgtcatcctcctcctcaccctcctccattgccatgtcgtttttctcgttcttaacaatggccgttgtcacatcaatggactcgggtatgatttgggctccacctggcagtatccctggcaccttcatgcttacattgcccggcgagacgctttcggaatttgtctgatttgcgggcttgtggaaaaagcgactcagattccacttgttgctttccgttggcgagggggtcttgttcgatgagctgcctccactgcttaacgtgccgcccgatccacttcctgtgcccacgactgcattggagttcacaccggctggtcccacattacctccgctaccgaatccactggagctgaggagtcccgtaatggtattactgccacgggcaatgatctcatgcctaaacttcttgttctgggccccgttggacgtcagtggttgggaccgatgctgttgctggaggacttgctgctgctgcatggtcgcctgctgctgctgttgctgctgctgcagttggtgatggtgctgttggtggtttggatgatgctgcagatcgttcttgctgctcgactcgctgcccgactcactggaatcggactcggaactattgctgctgtttccacccgatcgcctatagggaaaacattatttagcctattcattttcaatgagcacagccacacgacttacccctccttcttgcgctgttcatcctccgactcggacagctccaggtcgttctccaggctaaaaatgtgaacaaagtatgaacaatttgaatggccaagtgtgtaggtatacataccacgagtcttgcttctccaacgagtgattcttttccgttttgagcggcttgaccggtcccggcgacgtgactccggaagctgctttgggcatagtgggtggcagttggtgcaggggtgccagagcctctcccgctagtatcgtcccacttgttgctccgcccagaggcatttggcttgcctgtggcggtgttgtcaccaacggggcgatgggcgaggtaatgggcgcaaaaagtggcgtcatcagcgaagagggttccgcagagggtggcgagctgggtatgtccatcgcatacttttgtctattgggcgccagcaggttgtagttctcgcgcgttggcgcatgtggcgtcgccgctatcaatgtgagtggctgcaccgtgaagatatttgctatgtcgctgataattttgttgacatccttctgcaaggttaaaaaaaaaagaaatcgtggtttagaaaaaaaaaatccaaaggtgtttgacatttgtaaacgttgcagcgattggtaagcacaacctccagaggtttggccaactattctcgctgcaccatgctgccatcgtttacaagtgttagacgttaagtaatgattacctccggtggtggcggctgttggcccactccaggtcgcttactggccgctggcggcacaaagcgtccgccggtgccgttgtgcagcgccggagccggcggaccaagaaaggacttctctcgcccattcggcatctgggtggacaggggtggtcccagcggtgtgctggccgggactccgccgctgctggcattgtttgtgacgctggacgagttgctgttgctggaactggttctgggcgggccgcggggcggggccatgccactactcgacggaatgtcgttcttcatgggctgcccaggatagccgccgcgaccattgtacggcggcttattgtccgcctgcttcacatacgtaggcggtcgctgctgttgctggtagtgctgttgctggccgggcagcgaagtggtcgcggacgcggcagtgggcccagctgctgaggaggcggaggagggtgaatgccccagggatttggcttgcggcgccagattgggctgcaggcgcggattgccggcgccgggcgcactccggctgattcccacagtctgattgttgatgtactcccgcgcctcgaagaactcacccagggcggcggtgatctccgcatctccctcagtcagccgacgcggctccccgaatagactagtctcccgatcgtcaatctgtatgccctgttgccgctcgattttctcacgctcacgtctttttcgccgttcgtactcctccatgctgcaaaaaggacgaaaagtatatagtaaaatgcttgaactttgacttacggtctttaatgttggtcttttattctttgtactggtttaagccattatttcggttggcagagacagtagcaacataaattagaacagcaaacaaacatcacaggtagtacaacaacaacaaacagctggcattttccaattttcgaattttcctatttttcgtccagaacaaaccttttgtcatgcatttgcgtgcttcacttattggttgtctaaacgagcaaaaacataaatcgcttttaccctacaaacactttgttagtatagccttctatgtttattttcttataataccttttacagagaaagtagatacatttatagtgctgaccaaaagatcctatctgattttgtagtttattgctaacaaaatattcatttcccttaggatgtaatccaaaagaaatcatacactacatggtgcaaaacatctcccatttctccttttcagcggggggaaacgttgtcgtcccttccttaaacgctgttcttttgtcaatatttgacccaaccttgtggacatgggtgttgttaggtgccaacagtttgacaagcatgcgataggtgtcaacggttaggcatgcacacacgcaagcacagtttgatggccatgaggaagtttgttgtttttgcaacgtttttttacggggtcagcgggggcgttagaattgtgcaaatgtttgcatttgattttgcccggtttttaaggtttagtagtggtagtagtgcagacatgcttgagaacgcaacaaatatatggtataggtatgtacacatttgaggagcgacaaaaagggagagacagacggagacggagacaaacacaggcagtaacagagatagagtgcagtgactctaaaacttacttataattttggctatacaaattgttattgtattgctgtagttgatctagttgttgctgttgttgttggggctgttgttgctgaaggagaacaatgctgctgctgttgttgttgttgatgctgctggtgtggtgttgctgttgttgctgcatttgttgttgctgctgctgtgccataacgcgcgcttagtacaaataaaataattaaattatcctcagctgagagagcacacacagacagtcagacagacacacgcacacagccaaagggttaaggtcgaggaagggaagggggaaggatagactggaagaggatggggagctgtgcaactaggcttctcctctctttcccactcgcttttatatatatctcgctcgattgctcgcttatgttatcgttgtaaatttgcgacgttggaacgtcgctttgttgtggttgttgttattgtggctgttgtaatcgcaattgcagttgatatcgttgttgttgcttctcttgctgtgcttttgtttttgcgcttgtaacattttggaattctgcagtttgacaagcactgtcgaaattgcctttctgtttgtttatttgttttcccggttttattttttcctatacgcagacttttcttgtaaatgctgaatttgatttgtttcttggggcttttgatctcgtatcttctatagtcttttattgcttgagtacgttgcttaagagagtgtgtgtgtttgtgtgtgtgtgtgagtaggggaaaataaagttgcagtacctgaaagaaaaacagaaagagagaatgtgaaattagttgcctacttctcagagcgcttgagcttaaaataaagaaagagagcaccgacctctctataccctgtaacataaaaacgtagcttaaaatagtatgtattataatggtaacctatgcaattatacattggtgttgactatgcaagttaaaacttaaaaaaaaaaaaacaatgttttacctatattacagttcttactactaaagccgaatggattccatcgccacaaagacccctacgcacgtgcattagggtgaaccttaactgcgcgtcaaattttattaaaaaatttgtatattttcattggatataaaagcattaaaatttaaatcgtttgtaattcgttgttttataacaattagacttacacctgaggctc

SEQ ID NO: 18821 - DNA, 5113 bp, DROSOPHILA
atggcacagcagcagcaacaacaaatgcagcaacaacagcaacaccacaccagcagcatcaacaacaacaacagcagcagcattgttctccttcagcaacaacagccccaacaacaacagcaacaactagatcaactacagcaatacaataacaatttgtatagccaaaattataacatggaggagtacgaacggcgaaaaagacgtgagcgtgagaaaatcgagcggcaacagggcatacagattgacgatcgggagactagtctattcggggagccgcgtcggctgactgagggagatgcggagatcaccgccgccctgggtgagttcttcgaggcgcgggagtacatcaacaatcagactgtgggaatcagccggagtgcgcccggcgccggcaatccgcgcctgcagcccaatctggcgccgcaagccaaatccctggggcattcaccctcctccgcctcctcagcagctgggcccactgccgcgtccgcgaccacttcgctgcccggccagcaacagcactaccagcaacagcagcgaccgcctacgtatgtgaagcaggcggacaataagccgccgtacaatggtcgcggcggctatcctgggcagcccatgaagaacgacattccgtcgagtagtggcatggccccgccccgcggcccgcccagaaccagttccagcaacagcaactcgtccagcgtcacaaacaatgccagcagcggcggagtcccggccagcacaccgctgggaccacccctgtccacccagatgccgaatgggcgagagaagtcctttcttggtccgccggctccggcgctgcacaacggcaccggcggacgctttgtgccgccagcggccagtaagcgacctggagtgggccaacagccgccaccaccggagaaggatgtcaacaaaattatcagcgacatagcaaatatcttcacggtgcagccactcacattgatagcggcgacgccacatgcgccaacgcgcgagaactacaacctgctggcgcccaatagacaaaagtatgcgatggacatacccagctcgccaccctctgcggaaccctcttcgctgatgacgccactttttgcgcccattacctcgcccatcgccccgttggtgacaacaccgccacaggcaagccaaatgcctctgggcggagcaacaagtgggacgatactagcgggagaggctctggcacccctgcaccaactgccacccactatgcccaaagcagcttccggagtcacgtcgccgggaccggtcaagccgctcaaaacggaaaagaatcactcgttggagaagcaagactcgtgcctggagaacgacctggagctgtccgagtcggaggatgaacagcgcaagaaggaggggcgatcgggtggaaacagcagcaatagttccgagtccgattccagtgagtcgggcagcgagtcgagcagcaagaacgatctgcagcatcatccaaaccaccaacagcaccatcaccaactgcagcagcagcaacagcagcagcaggcgaccatgcagcagcagcaagtcctccagcaacagcatcggtcccaaccactgacgtccaacggggcccagaacaagaagtttaggcatgagatcattgcccgtggcagtaataccattacgggactcctcagctccagtggattcggtagcggaggtaatgtgggaccagccggtgtgaactccaatgcagtcgtgggcacaggaagtggatcgggcggcacgttaagcagtggaggcagctcatcgaacaagaccccctcgccaacggaaagcaacaagtggaatctgagtcgctttttccacaagcccgcaaatcagacaaattccgaaagcgtctcgccgggcaatgtaagcatgaaggtgccagggatactgccaggtggagcccaaatcatacccgagtccattgatgtgacaacggccattgttaagaacgagaaaaacgacatggcaatggaggagggtgaggaggaggatgacgacgaggagcaacaactgcgctacggtggcggactgagtgtcacaccggtggcggtgaaaaaggaggccattgacgctgtatcggagatggcgcttggagcgataccaaaaacacaaatcaaacgtgagtcggctgagactttgctttcagcccggctttcggattctgggaccagtgccagtggcagctcatcgagcagcagcagcagttcggacagtgcgatgggaggcgaggtggtgcccatgccaggtcctggagaaacccttcagcttcccggcgtaccggccgccattacaactgttatgcgagtgcaaccgacgcagtcacaaaaggcaccgccgagcaacagcgtcacgttgacgccgattcttccgctgcccacgtcgccaaaacagcgacaaaagaagccgcgaaagaaaaaggcgattacaagtgcccccattctggattcaagcgacgacgatgagccgccgcccaagcatccaggtctggatcacacagctgtttcggttcaaacgcagccagctacggatacggtgaaaaagggacgcggacggcccaggaagcagcagcagagcggcggcagtggtaacctcagtagtgcatcagccggcagcagctcccagaccaagggtcccacgttgaccgctgccaaaaagcctctcgccaagacaccgctggccatgagcagggcgaggaagcgcgaacattccagccagagcagctccaacggcaatacgcccaccaaaaaggtggccacaccccagctggtcgccgctcccctgaaaccgacaagtaacactgctggcagtagcagctccgacgaggacagctcctcaagtgccgaatccagttcgaaatcgagcagctcttcgagcagcagcgacgacacggaaacccagaacaccaactgccggatagtcaagctgaacaagactggcgctgtgcagaagaaggcgctgctgggcagcgggagcagttcaccaagcagcagtggcagcgaggcggaagatcagaccaccaggtcacaggttggaagtgggcaggcgctagcacaacaactgccgccctacaagcagctgccgatcagtcagcatagtcagcacctgagcagttccgactgctcctcatcgagtggtggctgtactgctgtgtgcagcagcagcagcggcgaggaggacgaggggcggcgtgaaaaggagcgcgagaggaagcccaagagtgacaagaataagattaatacgctgacgaggattttcaatccaaaggagggcggcgccaagaaacagggccaggtcgttatcgtagacctgcaggaggagcaacaacagggcaagttggatgcggcggcacagccatcagctccacaggcgccacctgcagcacctgccgccataatggccaagccccggatgacacccactcagcaacagcagctgggagccggactggcctcgccagcgaggacaacaacgccacatctaacctccttgatatgcaagatcgatctaagcaagctttcgcgagagcgcattatgcgactgaagaaactaacacccgcccagcagaatggccatctgacgcccaaggatcaggcgacgaatgcggttcatgtgcccaatggctatgccggcgacacaaatcccgcggcgaaggtcaagcacgagcatccggtgaaaccggagcccgagctggacgccggctacgaggccaaattcaagcccggcaatgtcaagcaggagttccagctgaagcaggaacgagaccgggacagggagcgagaacgggagcgggaacgagaacgtgagcgggatcgtgagcgtgagcaacctcctgggcgacggcggaaacgcagctccagttccagctccagtccgtacaaggagaagaagcggaaaaaggagaaggccgaccagctacagatgggcaaggaactgttgccagtgcccgtgcttctgccctctaacaaccacgagcgaatgccgaaccatgatcgattgtcctatgacaagctgcagttgcttcacgaggacgctgccgccgtcattggcgatgtgtccgctccaaatggcagtcccaccaaaaagctgctggccatgtcacctctaccgcctccgccaactgtcaccgttgcgcctgccacctgcaatgaggcagtgcagactactccgccatcggcaacagcaacctctgcaatagctcctccggtgccagccacaaggcttatataccgctcctatttcgatcgcgatgtggagcaccccagcgacgatcccagaaaaaacaatcagttcctgcaggaggccatcaatcggaagcatgccgccgacttggagcgcgactccttcaaccaggtgacattgtacctggaggccgttgtctacttcttgctgaccgccgatgccatggagcgctgcagctccgagcaggccaccaacaccatgtacaaggataccctgtcgctaattaagtttatctccactaagtttcgtccctaccagcagcagtcaacgaccaacattcagcacgaaacgcacaacaaagtggccattctcagtttgcgctgccagtcgttgatatcattaaagctttataagctgagaagaaaggattgtcgggccattatcaacagtctaacagatttctttcgcgttggcaggggggacattgccaacggcaacacgccgtcctccatatcaccatcgaactcggtgggctcgcagggctccggttcgaatacgccgccaggcagaatagtgcctccagatatacacaatatgctgtgcaagcagaatgagtttctgagctatctaaatagcgctcacgagttgtgggatcaagccgatcgattggtgcgcacaggcaatcatatagatttcatccgagaactggatcacgagaacggcccgctgacgctgcatagcaccatgcacgaggtgttccggtacgtgcaggcgggtctcaagacgctcagggatgccgtgtcgcatccgacgcatcagtcgcagtagcgacagcggcaatatcaaccgcaaacgcaacggaagcgttggcggaggcggaggcgaaggcggagacggaagcaccaccaaacgtgtctaa

SEQ ID NO: 18822 - protein, 1665 aa, DROSOPHILA
MQQQQQHHTSSINNNNSSSIVLLQQQQPQQQQQQLDQLQQYNNNLYSQNYNMEEYERRKRREREKIERQQGIQIDDRETSLFGEPRRLTEGDAEITAALGEFFEAREYINNQTVGISRSAPGAGNPRLQPNLAPQAKSLGHSPSSASSAAGPTAASATTSLPGQQQHYQQQQRPPTYVKQADNKPPYNGRGGYPGQPMKNDIPSSSGMAPPRGPPRTSSSNSNSSSVTNNASSGGVPASTPLGPPLSTQMPNGREKSFLGPPAPALHNGTGGRFVPPAASKRPGVGQQPPPPEKDVNKIISDIANIFTVQPLTLIAATPHAPTRENYNLLAPNRQKYAMDIPSSPPSAEPSSLMTPLFAPITSPIAPLVTTPPQASQMPLGGATSGTILAGEALAPLHQLPPTMPKAASGVTSPGPVKPLKTEKNHSLEKQDSCLENDLELSESEDEQRKKEGRSGGNSSNSSESDSSESGSESSSKNDLQHHPNHQQHHHQLQQQQQQQQATMQQQQVLQQQHRSQPLTSNGAQNKKFRHEIIARGSNTITGLLSSSGFGSGGNVGPAGVNSNAVVGTGSGSGGTLSSGGSSSNKTPSPTESNKWNLSRFFHKPANQTNSESVSPGNVSMKVPGILPGGAQIIPESIDVTTAIVKNEKNDMAMEEGEEEDDDEEQQLRYGGGLSVTPVAVKKEAIDAVSEMALGAIPKTQIKRESAETLLSARLSDSGTSASGSSSSSSSSSDSAMGGEVVPMPGPGETLQLPGVPAAITTVMRVQPTQSQKAPPSNSVTLTPILPLPTSPKQRQKKPRKKKAITSAPILDSSDDDEPPPKHPGLDHTAVSVQTQPATDTVKKGRGRPRKQQQSGGSGNLSSASAGSSSQTKGPTLTAAKKPLAKTPLAMSRARKREHSSQSSSNGNTPTKKVATPQLVAAPLKPTSNTAGSSSSDEDSSSSAESSSKSSSSSSSSDDTETQNTNCRIVKLNKTGAVQKKALLGSGSSSPSSSGSEAEDQTTRSQVGSGQALAQQLPPYKQLPISQHSQHLSSSDCSSSSGGCTAVCSSSSGEEDEGRREKERERKPKSDKNKINTLTRIFNPKEGGAKKQGQVVIVDLQEEQQQGKLDAAAQPSAPQAPPAAPAAIMAKPRMTPTQQQQLGAGLASPARTTTPHLTSLICKIDLSKLSRERIMRLKKLTPAQQNGHLTPKDQATNAVHVPNGYAGDTNPAAKVKHEHPVKPEPELDAGYEAKFKPGNVKQEFQLKQERDRDRERERERERERERDREREQPPGRRRKRSSSSSSSPYKEKKRKKEKADQLQMGKELLPVPVLLPSNNHERMPNHDRLSYDKLQLLHEDAAAVIGDVSAPNGSPTKKLLAMSPLPPPPTVTVAPATCNEAVQTTPPSATATSAIAPPVPATRLIYRSYFDRDVEHPSDDPRKNNQFLQEAINRKHAADLERDSFNQVTLYLEAVVYFLLTADAMERCSSEQATNTMYKDTLSLIKFISTKFRPYQQQSTTNIQHETHNKVAILSLRCQSLISLKLYKLRRKDCRAIINSLTDFFRVGRGDIANGNTPSSISPSNSVGSQGSGSNTPPGRIVPPDIHNMLCKQNEFLSYLNSAHELWDQADRLVRTGNHIDFIRELDHENGPLTLHSTMHEVFRYVQAGLKTLRDAVSHPTHQSQ

SEQ ID NO: 18823 - DNA, 3513 bp, DROSOPHILA
gtagttcgtccttgatcctgggcagctttcgctggcgcgcgcccttttgttcgcacacaaagaagacgtcgtcgtcccactcgatgttctcgtgcttcaggaaatccgtagtggctagcaaagtctgattgatgttgctattatgatcgagcaggggcgttggcgtttggggagtctccaagttctgagtgttattcaggggctgattgtccaattcgttgacgggaaactggtaaggttggcccttgtccgagggcactgaataattgggcttctccgggtcctgtcgctggcaattctcgtggaaggagcgatggcaggatatgcatttcttaacggctccgggcaaatggcactcgaagcagaacggatcaattggtgagctgggcagccggcttactttttgacaaaaggcgagggccagacgcttggaccgtccgccgcctgctctggccaccagtatgcctcgctccgtggcatttttcaccgataaactggctgcttctgaagttggatttttagatgtttgagacaaacgttatggattggacattcaatggttcacttacctgcactcattaaattgagcagggaacgctctaggactgtcgccggctgcccaacgccctttttcagcttgtccatccaaatacggatggctgaaggtggaatatcgctggccatttcatttgcgttttaaagttttcttgcaaatgaaatcaatttttggctaactggaagcgttgccggactgctggattgggtgaactcgcgttgccaactataggcaacaggagctgccacgtaggggtaactttaaatttacatacaaatttatggatttttaaatgactctacttaaaagtaagtttgtaattatatgcagcattccatttttaaacatttgtgaaacaaagtatctgagtttatttcagtaacaacttgctatgattcgtaataatggtattcctcgatggcattttcacacggatcagcgacggtaacactgttgaaaacaaaaaatatacacaacttatacaatccgagacaaaaacggggcaaaggaggcgtgtctagaagagcggaggacgcggaggtgaccccaagtcatggccatgctgacgcgattgaccagcagcggcaccaccacggtggccggagcacccggttcacccaagggcctgcagcgtttccaaaactacatctcggccttcttgtggccgggaacgcagcggcaacgtcggaagtccacacatctcgatcccatggactgtttcaccaacgacttggtgaccagaaagacccaaaagtgggaggagctgcgcgatagcctgataaagaggccatcgtccggaaatctggaggcggacgccaattgcaatgtgggaacgcagcgaaaggctggtagtaccagctttagccagaacgtgggtcttatgtccaagggcatgatgagtgatctgaaggcgctgcgctccccccaactgggactggatatcagatccctgtcgcaggcgcagctggacaacctgctgatggccacgttggagatcaagaacaagctggactttctctacctgatacgtcagtgcatccgctgcaacctgttgccctccaacgaggtcttcgtgtcctgtctaaagtatttgagcgcgcagcgcaagctccagcagttggaggcactggcggagacctgtcggcagctggagcacccgttctcacagacctacgcggatctggcgcccttccgcgccatcgccctgtggaacaatggtaacgccgacgtggccctgatgacgctacatcgcggttacggggtaagcatgacttcggaggagggcaggcggatggcgcgctccgcattccgcaccatttccgaggagactctggcccagaagagtgaggcggtgctagtgtcgctgctggaggtagcgcgtgccattcaccgcgagcacaaggacatctttgtggtggcctgtgtgtggaagcaatgcttcgctagcgattggttttgcgatcaaaaatcggcttcggaactgtttgagcactacaaggagctgcaagagctagtggagaggaggtaagtcgctttaatttctttaaaaacccgaaatttgaatcccaatgtaaccttccttgcagagccagttctttgtgctcttcatttctggcccgtaacaatgttgatgcggtgcatcggctaatcgaggcgttcttgcagcaccagcagcgtttggcctgctccagctgcctcagcttgctctttaactatcaatgtgagtctgtgcaacacaaccgaatattatgtaactcccgtttcgtttttagatatgcgcaaggatctgcgagcctgcgctgagattgtcaaatcctgcagtgaattagagatgccgctaaatgagctgcagaacgaacagttcctcagtctgttcctcgaccagagcgatcctgtggactcttcgggaatggccagcaagtacaaggcacccaagtccttccagtacaagttctagtccccagtttccatcgttaagccgttgtcatcgtagttacagcacaagtgtttgcaccattgagcaatattgcaagcatccccatattgcaagcccccacaaggaatgtagtgtctcttcaataaatgttatttaatatccatcttcaggtggctccttcatccaccatgttgccctcgggcagttggccaggcaaaatgccgacgcattcgtagcagcgggatatcaagtggttgccgcatcgatgttgcaagcactgttggcaccgcgtccgcgatttagtgccacgcttatttcgagcgcagggcttgcacctgcgatgcttctctccgtaccgactagccaaattaatgcccaagggcaggctcatcttgtcgggtgttagcacgcctacgctgtgcgttagtttcgcctcgccggtcgcctcactgagcagccgctgactggattggcccaggatttcgcagatttgcagtcgcatcacgagcgaagtgctggtggatcttcgctgaaggcgtcgctgtaatctctgctgtgtgaggaagagtcccaactgtctctggaagtcgcgctgatccatagcggcatcgcctttgggcgaaagtcgtaacaggatccatgcattcacggcagccgcgttgagcacaaagtgaagtagttgcagaaaaggattgatctgctttttcaagggtgcgggcgtagcgtgggctgtgctgaagcgctgggagtgttcgtaaaactgctgacaggcttctgaggtttgctcatatgcctggactgcatctacttgggagctaagaccgcagcagaagactgcgtcgccatcgagcggaatgagttttgagctgccaccaaacaagggtgattctgtgggccactgccgcggccaatgtggcgaattggcctccagcttacccaacgagcttatttgccgctgcgccaactgctcgcactgcgtcaagtttagataccgtgatcccagcgttacatttcttcccgt

SEQ ID NO: 18824 - DNA, 1399 bp, DROSOPHILA
gtaacactgttgaaaacaaaaaatatacacaacttatacaatccgagacaaaaacggggcaaaggaggcgtgtctagaagagcggaggacgcggaggtgaccccaagtcatggccatgctgacgcgattgaccagcagcggcaccaccacggtggccggagcacccggttcacccaagggcctgcagcgtttccaaaactacatctcggccttcttgtggccgggaacgcagcggcaacgtcggaagtccacacatctcgatcccatggactgtttcaccaacgacttggtgaccagaaagacccaaaagtgggaggagctgcgcgatagcctgataaagaggccatcgtccggaaatctggaggcggacgccaattgcaatgtgggaacgcagcgaaaggctggtagtaccagctttagccagaacgtgggtcttatgtccaagggcatgatgagtgatctgaaggcgctgcgctccccccaactgggactggatatcagatccctgtcgcaggcgcagctggacaacctgctgatggccacgttggagatcaagaacaagctggactttctctacctgatacgtcagtgcatccgctgcaacctgttgccctccaacgaggtcttcgtgtcctgtctaaagtatttgagcgcgcagcgcaagctccagcagttggaggcactggcggagacctgtcggcagctggagcacccgttctcacagacctacgcggatctggcgcccttccgcgccatcgccctgtggaacaatggtaacgccgacgtggccctgatgacgctacatcgcggttacggggtaagcatgacttcggaggagggcaggcggatggcgcgctccgcattccgcaccatttccgaggagactctggcccagaagagtgaggcggtgctagtgtcgctgctggaggtagcgcgtgccattcaccgcgagcacaaggacatctttgtggtggcctgtgtgtggaagcaatgcttcgctagcgattggttttgcgatcaaaaatcggcttcggaactgtttgagcactacaaggagctgcaagagctagtggagaggagagccagttctttgtgctcttcatttctggcccgtaacaatgttgatgcggtgcatcggctaatcgaggcgttcttgcagcaccagcagcgtttggcctgctccagctgcctcagcttgctctttaactatcaatatatgcgcaaggatctgcgagcctgcgctgagattgtcaaatcctgcagtgaattagagatgccgctaaatgagctgcagaacgaacagttcctcagtctgttcctcgaccagagcgatcctgtggactcttcgggaatggccagcaagtacaaggcacccaagtccttccagtacaagttctag

SEQ ID NO: 18825 - protein, 429 aa, DROSOPHILA
MAMLTRLTSSGTTTVAGAPGSPKGLQRFQNYISAFLWPGTQRQRRKSTHLDPMDCFTNDLVTRKTQKWEELRDSLIKRPSSGNLEADANCNVGTQRKAGSTSFSQNVGLMSKGMMSDLKALRSPQLGLDIRSLSQAQLDNLLMATLEIKNKLDFLYLIRQCIRCNLLPSNEVFVSCLKYLSAQRKLQQLEALAETCRQLEHPFSQTYADLAPFRAIALWNNGNADVALMTLHRGYGVSMTSEEGRRMARSAFRTISEETLAQKSEAVLVSLLEVARAIHREHKDIFVVACVWKQCFASDWFCDQKSASELFEHYKELQELVERRASSLCSSFLARNNVDAVHRLIEAFLQHQQRLACSSCLSLLFNYQYMRKDLRACAEIVKSCSELEMPLNELQNEQFLSLFLDQSDPVDSSGMASKYKAPKSFQYKF

SEQ ID NO: 18826 - DNA, 3470 bp, DROSOPHILA
caacgtctaggggtctctggacacttgtggccgttctccgcttacgcatctgttcattgatatggcgaagtaaagaccgcagcatttcatcatcgaagagcagcatccatgcttccactgcattggacactgttcgggcgggtcccttgccacaggcctgttgccccaaaaggggtagatcctctgcagaaatatctgggctcctggtcacgctccatagctgcccacaaggagatgtgtagtttccgttattatttggtggacgaccacgtcctcgcttcggggcagctggcctggcggaatcctccttcttcagcaccacgtcagccagttggtcctcgttcatcagcatgtcgctgtcctcgaaaatccagggaaaattgcatactgcttcctgtagcggatcggagtcatctccgttaaaggaggcactttggactgtggaatcgaccggcggcagccgctcctccacctccatcttttcaccatcctcgtcttcttcctcctggtcgctacatttaatattggccagcagctcctcgtccagcacgcattccattgtttgtttataaacttgcaacaaaacaaaccttttcagtcgtcgataggttaggacagtaacgtctatacatatcgataatttatatagttatcgaaaaagacatttaaaacataaatcttaagcttgaaaggttgaaaacttataaaaaaaatagtttgttctatttagaaaaaattatgtacattctaaatataacttatttattttaaatgtagatttaatttccagcgtagagataactagtgtatgtttataattcttaaacaaattatacttaacaaaacttgtatttattcttggcgccactgttcaaatttcaaatgaacctgccaactgaactaactccccagtggacccccatccatgatttatcgcacataagcggctatcggatttctttcgccactaatttgttgtttggcacgcagcaaggaaaaggaataaaacgctttaaaaccagtgccaaaatagctttccccaacgttcgttactatatttacgttgtctgcaaaaagagtttgtctaattggcctcgatactacggttgtgacgactgccccgtcactacagtttgctgagtgcagtaaccggggcctggctgaaacactgggaaaaccagtgtttagtgtaaataaatgatagtggcacccattcggacatcgcaggtgaatccccgggagctcaagacgcccgttatttgggcgcgcagtgaatttgtcaaaatattttggttaaagtgtcaatttgacatgttatatgtcatggtctctcgtgtgccagtgcgatagttatcgatagatagccccaacttaatttgttttaaatatttttaaatttcttctttacttaattcactactgtaatacgttcgtttaatgtatagttccttggaaattaatcgatttagcaagtagaccgattggaaagaaatcaaaaatcgatttgaaatgcgtatttgaaccttagttggccatgactttggtgtctgaatgacgcctgccctcagaaaaagttagttgaatctcaaagtctgtggtgacaacacctaaagaaactaaaaagtgacaggtttctctgtttgtaaaaaaaaaaaaattgtaattaaagttctgttcttttcctttcaatatttgcataccgtttctggttgtgttttaatgaattttctgttttctgaagcttaagtctgagctgcaatgatctcgccggaacaagaagaggtcaacatggtcctggatcgccatgtacggcagaatatccaggacatgatgcacgaggctcatgtccaggcgagcctgctggagaacgaaggtgagtttgctatatttcggtcgagttcggtcttgttcatgcccgttttttttgcatgtcatctgcaggacgcggccgtttccactcggactcaagtttggaccaggattctcttcacgctgacgtcatcgtggaggaggatcagagcaccgaacacggcgccaaccaggtgcaaaactaccacgacatgatggtggacagtgaacaccacatcgacataaatgggtcgctgcgcaaacgtcgtggaaatcttcccaagacctctgtaaagattttaaagcgttggctttatgagcaccgctataacgcctatccgagcgatgcggagaagttcaccctgtcccaggaggccaatctgacggtgctccaagtgtgcaactggttcatcaatgcccgtcgccgcattctaccggagatgatcaggcgcgagggcaacgatcctctgcacttcaccatatcgcgacgtggcaaaaaggttagccccaactgttcgagatcaagtgcgttgggcgcaaacttgactgggccgaatcccgcacacggaagtcctgcttccgaagtggtgtgttatcttctggtcaatcattataccactgaagttactaaattgcttgactccaggtcgttggcgctacagaggaggtggatggcgccggtgagattcacgagggcatcgccaatgtgctgaccaactttgaacagtatgtgcagggccccaacggacaaatggtcaagatggagccggagtacgaggacagtgtcatctacaggtaactggtaaccggtctttatgacctgcttccctagcgttagtcacttctatctcctatcccatcccacctatgtccaaactccttttcctcttccaagctggcagcaggccattgcaaacaacccgatgggctttcaaagtcttcactcctcgcttcaagcaaccatgatcgataaaattaaaaactatcagatgcgcaaggctgccgccattgggggttcggcggttggctctggtggtgctggtgggtcgagctccaactccagtcctgccacatcaatactgccatacagcctttttggccagctgccgccagagttcgatgacgaagaaaagccaagacctccgaagcgcgtaagaacgcggacggttgctgcaaagagtcctagggagaatgccaagcaagcaaagcagaagactgggaataagcaagaaaccatgtactgctataaggattcatacggcggaatcgtggtgtctcctaggtacagcttctgctcccattgactgatccagagccttaaatcttactcaagtgcgagtggcggtgctaagattttacttttacccccaggtccgaaggcgaagagagtgcacagggatacgagtcctgtgggccgaacagcgaggaggaagtacgcttcgagacctcccatgattggcagagcgttataaagtaagtagctatgtggatgtattaagaaaatattgtaatctcggcctctgcaattccagaactgtatttggtactgaggaagtcagcacttcggctggcaataatccaggtacctctggttctaagggatctgttcagaataccgccat

SEQ ID NO: 18827 - DNA, 815 bp, DROSOPHILA
gaataaaacgctttaaaaccagtgccaaaatagctttccccaacgttcgttactatatttacgttgtctgcaaaaagagtttgtctaattggcctcgatactacggttgtgacgactgccccgtcactacagtttgctgagtgcagtaaccggggcctggctgaaacactgggaaaaccagtgtttagtgtaaataaatgatagtggcacccattcggacatcgcagatgatctcgccggaacaagaagaggtcaacatggtcctggatcgccatgtacggcagaatatccaggacatgatgcacgaggctcatgtccaggcgagcctgctggagaacgaaggacgcggccgtttccactcggactcaagtttggaccaggattctcttcacgctgacgtcatcgtggaggaggatcagagcaccgaacacggcgccaaccaggtgcaaaactaccacgacatgatggtggacagtgaacaccacatcgacataaatgggtcgctgcgcaaacgtcgtggaaatcttcccaagacctctgtaaagattttaaagcgttggctttatgagcaccgctataacgcctatccgagcgatgcggagaagttcaccctgtcccaggaggccaatctgacggtgctccaagtgtgcaactggttcatcaatgcccgtcgccgcattctaccggagatgatcaggcgcgagggcaacgatcctctgcacttcaccatatcgcgacgtggcaaaaaggttagccccaactgttcgagatcaagtgctggtgtgttatcttctggtcaatcattataccactga

SEQ ID NO: 18828 - protein, 195 aa, DROSOPHILA
MISPEQEEVNMVLDRHVRQNIQDMMHEAHVQASLLENEGRGRFHSDSSLDQDSLHADVIVEEDQSTEHGANQVQNYHDMMVDSEHHIDINGSLRKRRGNLPKTSVKILKRWLYEHRYNAYPSDAEKFTLSQEANLTVLQVCNWFINARRRILPEMIRREGNDPLHFTISRRGKKVSPNCSRSSAGVLSSGQSLYH

SEQ ID NO: 18829 - DNA, 4538 bp, DROSOPHILA
gttttggacctgactcttttaaacttaacatgtacactactgatacttaaataaaacataaacaagcatttgaaatacacattgccataaaatgatggtgtgttttatctaattggctgatagagccatttttttaaggtatctagtaattatgtacacatacatacataaaatgagaacgtttgtggaaggacaaaattaattttgttataaatattataaatgtattggaatactttggttaccacagataataaagagtggcgcaaaaacaaaatgattcgatttttaactataaagctatagaacaaaaaaaaagaatgatatattcgagttccccggctatcagatacccggtacatatatgtgaaaatgtgaacaagaaatttcataatttttctggggtattgatagataattcggaaaaaagaaatatccaaaaattttcaaaaatgagggcgtgagttttgcgctgttttagggcgttacagtgggcgtggcaaaaagttttcatttttcaaaagtgtgggagtggcattttgtacggtttgaaagcgttggagtggacgtggcaaaataggtccacaaacttgtgatagttcctgacttcatacgaacggacagtcagacggacggacggacaggtcgactcgggtattgatcctgatcaagaatatatgtgttttatatggtcggagaagcttccctctgctattacatactttataacgaatctagtatacctttttactctacgagtaacgggtataacaagtgacgatcgcacctccaacatacaaatcttctgaaatcaaaatgatattacatttgaccaaataaatgcgcttgtctaaattttacaaatcaaaatttttataaattttggataaggtaaaaagtacatttcgagacgcccgttacttgggcgcgcagtgaatttgtctaaatattcatggtctctcgtgtgcaagcgcaatgtttgtgcgatagttatcgatagttggccctaacttaattaattttaaatatttataaaattctcctgtacttaattacttactttaatacgttcgatacaagcagaccgattgaaaagaaccatttttaaaaatcaattgaaaaaatttgtttttgaaccctagttggccatgactttggtgtctgaatgacttgcctgccctcgggaaaagttagttgaatctcaaagtctgtggtgacaacacctaaagaaactaaaaagtgtcaattttctctgtttgcaaaaattgtaattaaagttactgtgcttttcctttcaatatttgcacaccgattctggttgtgttttaatgaattttctgttttctgaagcttaagtctgagctgcaatgatctcgccggaacaagaggaggtcaacatggtcctggatcgccatgtacggcagaacataaaggacctgatgcacgaggctcatgtccatgcgagcctgctgaacaacgagggtgagtttcctatatcccggttgagatcagtcttgtttatggccgtttttttctccaggacgtgaccgtttccactcggactccagtttggaccaggattcccttcacgccgtcgttgggaatgatctgagcaccgaacaaggcgccaaccaggtgcaaaactaccacgacatgatggtggacagtgaacaccacgtcgacattaatgggtcgctgcgcaaacgtcgcggaaatctgcccaagtcatctgtaaagattttaaagcgttggctttatgagcaccgctataacgcctatccgagcgatgcggagaagttcaccctgtcccaggaggccaatctgacggtgctccaagtgtgcaactggttcatcaatgcccgtcgccgcattctacccgagatgatcaggcgcgagggcaacgatcctctgcacttcaccatatcgcgacgtggcaaaaaggttagccccaactgttcgagatcaagtgcgttgggcgcaaacttgactgggccgaatcccgcacacggaagtcctgcttccgaagtggtgtgttatcttctggtcaatcattataccactgaagttactaaattgcttgactccaggtcgttggcgctacagaggaggtggatggcgccggtgagattcacgagggcatcgccaatgtgctgaccaactttgaacagtatgtgcagggccccaacggacaaatggtcaagatggagccggagtacgaggacagtgtcatctacaggtaactggtaaccggtctttatgacctgcttccctagcgttagtcacttctatctcctatcccatcccacctatgtccaaactccttttcctcttccaagctggcagcaggccattgcaaacaacccgatgggctttcaaagtcttcactcctcgcttcaagcaaccatgatcgataaaattaaaaactatcagatgcgcaaggctgccgccattgggggttcggcggttggctctggtggtgctggtgggtcgagctccaactccagtcctgccacatcaatactgccatacagcctttttggccagctgccgccagagttcgatgacgaagaaaagccaagacctccgaagcgcgtaagaacgcggacggttgctgcaaagagtcctagggagaatgccaagcaagcaaagcagaagactgggaataagcaagaaaccatgtactgctataaggattcatacggcggaatcgtggtgtctcctaggtacagcttctgctcccattgactgatccagagccttaaatcttactcaagtgcgagtggcggtgctaagattttacttttacccccaggtccgaaggcgaagagagtgcacagggatacgagtcctgtgggccgaacagcgaggaggaagtacgcttcgagacctcccatgattggcagagcgttataaagtaagtagctatgtggatgtattaagaaaatattgtaatctcggcctctgcaattccagaactgtatttgggactgaggaagtcagcacttcggctggcaataatccaggtacctctggttctaaggcatctgttcagaataccgccatctggaatcgcaatcagactgcgaagcgtgacggtgagtgaagtttgcagacttagagctcggtttctttggtaatatccaactcttttactcctaaagtgaatcaacagttgacagactttgaaagcgagctgaatataatacaggcctcagaaatccagacaatcgatcctaccaactccaatcaacaggacattggtgacaatctacaggcggacgaggtgtttaccggtgccgaagctgaagctggccagagtcaattatctgctctatcgcagggtaacctatacctggttttattcaactttttaattattttatgacatttttataattttatttgaaaatctcgcttaagcaccagctcagatgaggagggcaagtacaagtgtctctattatctagtggaaactgccatggctgtgcgccaaaacgatgacgtccaggatgacgatttcgtttacatgggagactagagcctcaaaccaaatacccacgcaacagatccagacttctcaaagtgccgaagcgtgtatatacaaatatgtatatatatatatatatatatatatatatatatatatatatatatatttaagtaatttaatccaacagcactagacccataaatttgtctctaacccatgttattgtgttaattaggtaaggttagtaacataatgtacaaagcaatcaattcgcaatgcgaccgcccaaataccttttccaccaagtcaattcagaaacaaatcgacttagttttggacctgcctcttttaaacttaacattgtgtacactactgatacttaaataaaacaaaaacaagcatttgaaatacacattgccataaaatgttgctgtgttttatctaattattaatattttgataaattttggataagtttaagaaaaaagttttaaaccgcttttacaacgtaaatcattaaattgccattctatagatgttttccccaaacaattgttctttcctaaattggtacagttaatgtttcatttatacaattatgctttgaaaacatatttcgaattaagtatcaaagcattttcctgaatgatggttagtggccttcggagggtgtctgattcgtcactacgtaaactatttatggtggtctagcgtgttacaagctctgcgagtggagatactcttcaaagagtaggagccgatttttcaattgcatgtttggtataatttcttgatatgctttcgtacattgttgcatttttatttatttatatccattaataccaatttgacgcacattcttatatttaccttcatttgacgtcccagtatgttttggtatttcccagtataatattcggttgtatataccgtcccgttttcggtatttttcatatgactaagatggtatttcaacgccattttcgtacggtcagttgccgattttgttttttgttgtttttttgcaataaatgtttgcccagcagga

SEQ ID NO: 18830 - DNA, 1894 bp, DROSOPHILA
ttggccctaacttaattaattttaaatatttataaaattctcctgtacttaattacttactttaatacgttcgatacaagcagaccgattgaaaagaaccatttttaaaaatcaattgaaaaaatttgtttttgaaccctagttggccatgactttggtgtctgaatgacttgcctgccctcgggaaaagttagttgaatctcaaagtctgtggtgacaacacctaaagaaactaaaaagtgtcaattttctctgtttgcaaaaattgtaattaaagttactgtgcttttcctttcaatatttgcacaccgattctggttgtgttttaatgaattttctgttttctgaagcttaagtctgagctgcaatgatctcgccggaacaagaggaggtcaacatggtcctggatcgccatgtacggcagaacataaaggacctgatgcacgaggctcatgtccatgcgagcctgctgaacaacgagggacgtgaccgtttccactcggactccagtttggaccaggattcccttcacgccgtcgttgggaatgatctgagcaccgaacaaggcgccaaccaggtgcaaaactaccacgacatgatggtggacagtgaacaccacgtcgacattaatgggtcgctgcgcaaacgtcgcggaaatctgcccaagtcatctgtaaagattttaaagcgttggctttatgagcaccgctataacgcctatccgagcgatgcggagaagttcaccctgtcccaggaggccaatctgacggtgctccaagtgtgcaactggttcatcaatgcccgtcgccgcattctacccgagatgatcaggcgcgagggcaacgatcctctgcacttcaccatatcgcgacgtggcaaaaaggtcgttggcgctacagaggaggtggatggcgccggtgagattcacgagggcatcgccaatgtgctgaccaactttgaacagtatgtgcagggccccaacggacaaatggtcaagatggagccggagtacgaggacagtgtcatctacagctggcagcaggccattgcaaacaacccgatgggctttcaaagtcttcactcctcgcttcaagcaaccatgatcgataaaattaaaaactatcagatgcgcaaggctgccgccattgggggttcggcggttggctctggtggtgctggtgggtcgagctccaactccagtcctgccacatcaatactgccatacagcctttttggccagctgccgccagagttcgatgacgaagaaaagccaagacctccgaagcgcgtaagaacgcggacggttgctgcaaagagtcctagggagaatgccaagcaagcaaagcagaagactgggaataagcaagaaaccatgtactgctataaggattcatacggcggaatcgtggtgtctcctaggtccgaaggcgaagagagtgcacagggatacgagtcctgtgggccgaacagcgaggaggaagtacgcttcgagacctcccatgattggcagagcgttataaaaactgtatttgggactgaggaagtcagcacttcggctggcaataatccaggtacctctggttctaaggcatctgttcagaataccgccatctggaatcgcaatcagactgcgaagcgtgacgtgaatcaacagttgacagactttgaaagcgagctgaatataatacaggcctcagaaatccagacaatcgatcctaccaactccaatcaacaggacattggtgacaatctacaggcggacgaggtgtttaccggtgccgaagctgaagctggccagagtcaattatctgctctatcgcaggtggaaactgccatggctgtgcgccaaaacgatgacgtccaggatgacgatttcgtttacatgggagactag

SEQ ID NO: 18831 - protein, 508 aa, DROSOPHILA
MISPEQEEVNMVLDRHVRQNIKDLMHEAHVHASLLNNEGRDRFHSDSSLDQDSLHAVVGNDLSTEQGANQVQNYHDMMVDSEHHVDINGSLRKRRGNLPKSSVKILKRWLYEHRYNAYPSDAEKFTLSQEANLTVLQVCNWFINARRRILPEMIRREGNDPLHFTISRRGKKVVGATEEVDGAGEIHEGIANVLTNFEQYVQGPNGQMVKMEPEYEDSVIYSWQQAIANNPMGFQSLHSSLQATMIDKIKNYQMRKAAAIGGSAVGSGGAGGSSSNSSPATSILPYSLFGQLPPEFDDEEKPRPPKRVRTRTVAAKSPRENAKQAKQKTGNKQETMYCYKDSYGGIVVSPRSEGEESAQGYESCGPNSEEEVRFETSHDWQSVIKTVFGTEEVSTSAGNNPGTSGSKASVQNTAIWNRNQTAKRDVNQQLTDFESELNIIQASEIQTIDPTNSNQQDIGDNLQADEVFTGAEAEAGQSQLSALSQVETAMAVRQNDDVQDDDFVYMGD

SEQ ID NO: 18832 - DNA, 5771 bp, DROSOPHILA
atgggggactctaaaaatatggtgttaagggttgacacgaaggcttcacttgctgagtatgaagcgaataagtaaagacttgagtaaacactgtaatacaagattcaatccctcattaagggaacgtttaatgatgtgataaaccaaacttgattaaacttaataaaatgataatacgcaattaagttttttttttctcttcataaaaaagttattgaaataagcagagttttctctgaacttaaaaggtgaatatcagatcttggagcttaaattctaccaaatgtattcgatgtcttaataaagtgggcaatacttttgaactcaacaaaattaaaagtttacaattttcaatacactatgagatacgtgtacgaaaggtacggaagaaagggagctacaatgccgtggtccctaatgttttcctatggaactgtctccgatttttcattatgttgccagccaggcgccactggaggcccaattcccaattcctgcctgcgacgaaggtggatgtggttgtgccatgtgtgcgtggtattagcgtgaggacatcgcggtcgccttggataaacaattgccactaaatggcttgtggcttcgcgcgactcctcgggtttcctttgatttttatcgctcgtcaagcccaagtcgcgagcattgattaaagttcgatgtggcctgtcccccatgacagggtgggcgggactgtttcggtggggacaggcctggtggtggtgtcgacatggttgcccattgtcttgcgacacgacctactattgtgcattattgcttaactctctcagttccgtaaaccagctgccagcgggcaggcggccaaaagccagatgatgtcaactggtgggttggacacaatggcaaaaagtgggttagatgttgagcaagggggtattcaggttttcaatatttgaaatttaattaatgttttctatgaaatccgtgtgacattatcttatgatatgtatccatctatattccagcctacgctatctctataagatgtccttggctgtatcgctgcgccgagctctgttggtgctgctcaccggcgccatattcatcctgacggtgctctactggaaccaaggagtcaccaaggcccaggcttacaatgaggcgctggaacgcccccacagccatcatgatgctagtggctttcccatgtgagtgccacatgccaatcagtttgaggaatcatccaacttccactaatcactcttcgttcgtgcagacccgtcgagaagtcctggacgtacaagtgcgagaatgaccgatgcatgcgagtgggccaccatggtaaatctgccaagagggtctcgttcataagctgttcgatgacgtgcggtgacgttaacatttggccgcaccccacccagaaattcctgctcagctctcagacgcacagcttctccgtggaggatgtgcaactgcacgtagacacggcgcatcgcgaagtacgcaagcagctccaactggcttttgactggttccttaaggatctcaggctaatccagcggctggactacgtgggtagttcatcagagccgaccgtaagcgaatcctcttcgaagtcacgccaccacgcggatttggaaccagctgccacgctctttggagctacctttggtgtaaagaaggctggggatctaactagcgtacaggttaagattagcgtgctcaaatccggggatcttaactttagcctggacaatgacgagacctaccagcttagcacacaaagtgagtattctaaaataacactaaaagaaataaaaataacttaattttccctacttttgagcagccgaaggacaccgcctgcaggttgagatcatcgcaaattcttacttcggagcccggcatggtctgtccacgctacagcaactgatatggtttgacgacgaagatcaccttttgcatacgtatgccaatagtaaggtgaaggatgcgcccaagttccggtatcgaggcctcatgctggacacctctcgccacttcttctctgtggagtccatcaagcgtacgattgtgggcatgggcttggccaagatgaaccgcttccactggcacctcacagatgcccagagttttccctacatttcgcgctactatccagagttggccgtgcacggagcttactcggagagcgaaacgtactcggagcaagatgttcgggaggtggccgagttcgccaagatctatggcgttcaggtcatacccgagatcgatgcgcctgcacatgcgggcaatggctgggattggggacccaagcgcggaatgggcgagctggccatgtgcatcaaccagcagccatggagcttctactgtggcgaaccgccgtgcggtcagctgaatcccaagaataactatacctacctcattctgcagcgcatctacgaggagttgttgcaacacacgggccccacagacttcttccacctgggcggtgacgaggtgaatcttgattgctgggcgcaatacttcaacgatacagatctccgcggattgtggtgcgatttcatgctccaggctatggccaggtgagtagcagataactacattaagaataaggtgatctcaactaatctgatgtgttgttccgtagactaaaactggccaacaatggagtggcgcccaagcacgtggctgtctggtcgagcgccctgaccaacacaaagtgtcttccaaacagtcaattcaccgttcaagtatggggcggcagcacctggcaggagaactacgatttgctagacaacggctacaacgtaatcttctcgcacgtggacgcctggtatttggactgcggcttcggtagctggcgggccactggggatgctgcctgtgctccgtaccgcacatggcagaacgtctacaaacacaggccgtgggagcgcatgcgattggataagaagcgaaagaagcaggtaagcatcgcctgaacataaatattatagtgcacaagtttttgaataataccaaattattaattaggtactgggtggcgaagtgtgcatgtggaccgagcaggttgacgaaaatcagttggacaaccggctgtggccccgtacagccgctctggcggagcgcttgtggactgatcctagcgatgatcacgatatggacatagtaccgccagatgttttccgtcgaatctcactgtttcgaaatcggctcgtcgaactgggcatccgagctgaagctctgtttccaaaatactgtgcccagaatcccggcgaatgcatttgatattacctctaagaagtaaaagtaatctcctacaaacccaatcccgcgatccctcccaaaatgtgcgttagttagttgatagtctaattgttattttatacgaatacctaggcttcggtttgcaaagaagcaggcgactgtttgaaatggtttctggcataaaccacgaatcgaatttcgttttcatagaacaaacataaaaccacacccattactagtacaatccatctcggaatatagcgcacacaggcattgcagttgaaatagagaatgattggaaatgacctagtagggaatcacgttgaggttgacatgcaggtgacgttgaacactagagttcatagatatagttgtagatttcatacgcatcaattcacacagacacagacataggcttacgatacatttatatatttagatgataaatcacgattaagaaatgacaaatattttgatatttttaaaagctttattcgcagaatatgaattatttagtttagggtgacattaaatgatcttttcctctgcttttaatttgattttcgatttgttttcgtttaatttcccgttgccttaagttaaaatacgtttaattacattttcagtgatataacaatgtgaccttaagaatcagaaagaaaaacaaaaactgctaaaagagtaaaacttagaaataaactaaatatttaatcgttatgagacatttttgcacgcattggcacataactgacactcgactagtaaattagtagctaatttagaatgtacacttaaatgggggaacaattgttggggtattcacagtttgtttggtttaatatttcaacatttggaatgattgataggatccttatgcaacttgttttcgtacttaagactttcaaagaaaatatcaactaaacaaaatcctgaattctgaaccaacatgagtttaacaattttcgctgtaactccaagtaactcttgaaaataaactaaaagtccagtctaagcaggttcctaatcttgtgacacattttttgggtggccatagttttccatactgtaatagagaaactctggagcatatttcatgagacgatgcaagacaattcaaatgctgttcctctgtttgatggtaagttgtgatgcactcttctcgtgtcccttccccttatcgtctataattttttagatgagaatgcgagaaagtcatgagcggcccacgccgaaaaatctgctggaacaaatgctgcctgctgacacctttgacgttatccggagaatacctcgctccgatgaacccggtccggatgccaaaggggacctgaagctgttgcatgctccctgcgagtttgacttgataagatacacatcgattaaccactatcccatttattgcctgcccgtctacacaaatcggcacgtgaacgaggactggtatcgactttataggacctacgacaccgagggatttgttttcgggcagttttacgagcgtctccagcggtacgagttggactgaattaatgccctttttcagaaagaataagatttagacaaaatctgtgatatcgatactgtggtagcgttgcagagatcccaatcgcgtgtgtggcgaaggacgcagacagataacacattcctccgtgctgaaaatcaattataattagtcgtgggaaacaactaaaagaatataaaaatggcccgttggtttataaaaaatataatactttaatctgatctcttataatgtaaactatcatgcaatacttagggacgaacggatgtggtctacatgtatgtcgtatacgtatatttttgtgtggtgttcattcatagtgtccagtgggtataggacttgttgatgtcagtctacaataaacgataaacagaaaaaggaaaaccccaatcagaaacataagaaaataagtaagaataaaaaggatatctaaagccaaccaaccatgcagaataaacataacattaagaactgatgtagggaaatgcacggttttaagtagatcactttagttggcacgagtgtgttagtatatttagagaacgggtgcaatttaactttggaattatttggatgggtggatgtcaaagaagtagaaagcatatacatgagcattgcgtatacgcaccgtagactttcggttcgcgatctcagcgagtagtcttttgaggcgcgatgcctgaaatggaaattaattggttaaatgacaacaacaacaacaacaacatcgacgacaatagcgaacaactacaatatcagccatagccacatcaactaggtagtgcaaatagtgaaaagccaatatgtcgacagccagggttatataaatataatccaacaacaataatgtgctagaatgccaaatgagtgcagtcgcccctcaatgattggttagcccacctgcgattcttgatggaactgttccgatggatattcctgctctcccgccaccgggtgaatccatgcctcagcgtctggcgcacctctgagttaaggaaacagt

SEQ ID NO: 18833 - DNA, 2225 bp, DROSOPHILA
gcctacgctatctctataagatgtccttggctgtatcgctgcgccgagctctgttggtgctgctcaccggcgccatattcatcctgacggtgctctactggaaccaaggagtcaccaaggcccaggcttacaatgaggcgctggaacgcccccacagccatcatgatgctagtggctttcccatacccgtcgagaagtcctggacgtacaagtgcgagaatgaccgatgcatgcgagtgggccaccatggtaaatctgccaagagggtctcgttcataagctgttcgatgacgtgcggtgacgttaacatttggccgcaccccacccagaaattcctgctcagctctcagacgcacagcttctccgtggaggatgtgcaactgcacgtagacacggcgcatcgcgaagtacgcaagcagctccaactggcttttgactggttccttaaggatctcaggctaatccagcggctggactacgtgggtagttcatcagagccgaccgtaagcgaatcctcttcgaagtcacgccaccacgcggatttggaaccagctgccacgctctttggagctacctttggtgtaaagaaggctggggatctaactagcgtacaggttaagattagcgtgctcaaatccggggatcttaactttagcctggacaatgacgagacctaccagcttagcacacaaaccgaaggacaccgcctgcaggttgagatcatcgcaaattcttacttcggagcccggcatggtctgtccacgctacagcaactgatatggtttgacgacgaagatcaccttttgcatacgtatgccaatagtaaggtgaaggatgcgcccaagttccggtatcgaggcctcatgctggacacctctcgccacttcttctctgtggagtccatcaagcgtacgattgtgggcatgggcttggccaagatgaaccgcttccactggcacctcacagatgcccagagttttccctacatttcgcgctactatccagagttggccgtgcacggagcttactcggagagcgaaacgtactcggagcaagatgttcgggaggtggccgagttcgccaagatctatggcgttcaggtcatacccgagatcgatgcgcctgcacatgcgggcaatggctgggattggggacccaagcgcggaatgggcgagctggccatgtgcatcaaccagcagccatggagcttctactgtggcgaaccgccgtgcggtcagctgaatcccaagaataactatacctacctcattctgcagcgcatctacgaggagttgttgcaacacacgggccccacagacttcttccacctgggcggtgacgaggtgaatcttgattgctgggcgcaatacttcaacgatacagatctccgcggattgtggtgcgatttcatgctccaggctatggccagactaaaactggccaacaatggagtggcgcccaagcacgtggctgtctggtcgagcgccctgaccaacacaaagtgtcttccaaacagtcaattcaccgttcaagtatggggcggcagcacctggcaggagaactacgatttgctagacaacggctacaacgtaatcttctcgcacgtggacgcctggtatttggactgcggcttcggtagctggcgggccactggggatgctgcctgtgctccgtaccgcacatggcagaacgtctacaaacacaggccgtgggagcgcatgcgattggataagaagcgaaagaagcaggtactgggtggcgaagtgtgcatgtggaccgagcaggttgacgaaaatcagttggacaaccggctgtggccccgtacagccgctctggcggagcgcttgtggactgatcctagcgatgatcacgatatggacatagtaccgccagatatgagaatgcgagaaagtcatgagcggcccacgccgaaaaatctgctggaacaaatgctgcctgctgacacctttgacgttatccggagaatacctcgctccgatgaacccggtccggatgccaaaggggacctgaagctgttgcatgctccctgcgagtttgacttgataagatacacatcgattaaccactatcccatttattgcctgcccgtctacacaaatcggcacgtgaacgaggactggtatcgactttataggacctacgacaccgagggatttgttttcgggcagttttacgagcgtctccagcggtacgagttggactga

SEQ ID NO: 18834 - protein, 734 aa, DROSOPHILA
MSLAVSLRRALLVLLTGAIFILTVLYWNQGVTKAQAYNEALERPHSHHDASGFPIPVEKSWTYKCENDRCMRVGHHGKSAKRVSFISCSMTCGDVNIWPHPTQKFLLSSQTHSFSVEDVQLHVDTAHREVRKQLQLAFDWFLKDLRLIQRLDYVGSSSEPTVSESSSKSRHHADLEPAATLFGATFGVKKAGDLTSVQVKISVLKSGDLNFSLDNDETYQLSTQTEGHRLQVEIIANSYFGARHGLSTLQQLIWFDDEDHLLHTYANSKVKDAPKFRYRGLMLDTSRHFFSVESIKRTIVGMGLAKMNRFHWHLTDAQSFPYISRYYPELAVHGAYSESETYSEQDVREVAEFAKIYGVQVIPEIDAPAHAGNGWDWGPKRGMGELAMCINQQPWSFYCGEPPCGQLNPKNNYTYLILQRIYEELLQHTGPTDFFHLGGDEVNLDCWAQYFNDTDLRGLWCDFMLQAMARLKLANNGVAPKHVAVWSSALTNTKCLPNSQFTVQVWGGSTWQENYDLLDNGYNVIFSHVDAWYLDCGFGSWRATGDAACAPYRTWQNVYKHRPWERMRLDKKRKKQVLGGEVCMWTEQVDENQLDNRLWPRTAALAERLWTDPSDDHDMDIVPPDMRMRESHERPTPKNLLEQMLPADTFDVIRRIPRSDEPGPDAKGDLKLLHAPCEFDLIRYTSINHYPIYCLPVYTNRHVNEDWYRLYRTYDTEGFVFGQFYERLQRYELD

SEQ ID NO: 18835 - DNA, 3011 bp, DROSOPHILA
taataatgcattttaattacgaaccatcgcagttgcaactgctcctcagcttttgcactttgtggtcggactggggatgatataataaatatttataacaacgtcacggaaaaggtacatacgttgctatttaaaaattaacaatctgtttataaggcggttagtcccaatagcgccctctcgttttcgccagcctctagccgactctttctgttcaatcgattctctcactcgatttccgctagtgtttaacgcttcagcgaattcttcagcgtgtcgatgggttcgtttcacgttttgcataattaaatctatttaccgcccagtcgccgactttccacccgcctttccctggattttttttttataatgcctgaaaactccacatttgtagctcgcactggttagctgtgctgatgaacttgtttcctacttcagccttccaaggcggaaatgttcgcctttcttcggggattggctttgaccaaggcggcgccttaaatggtgacacagaaagcaaaccttggcagtgaaaatatatttttgccaaacggtagctgggcttgccggtaaacaatgttcgctgcaaaaactccgaatgacttggcacttagtttacgcagtggaattgatttgtgttcgcttttattttctttatgcacggggttatgttgatttaggatgtacttgctaaaaaacagattttctcgaaataaaattgctttttacaatcggtggtcattgctgaatttatatttataatttatacgttttccatgtagtatcatcaagcagtaatgccattttgatgcttgagatgctcattcatgaaagtgaaattgttacttgatgatagtacatttatagagagatgatctatccttttggctctggtccacaatttgagattactgagcttgtaagctactgctaatctttgcacgaattgatagttcaagcagcataaagaattctcgctgttagctttccagtcagtttttcaacttatgggagaaacgctctcatttctaaccacgattcttcgaatgtcaccccgctgtatatcgaaagagataactaggtccttgtccacgcccattgaagctcctgcattgtcgtacaatccacaatagttgggtgccgagaagacggtgaccaattggcgtttggcaaagaactcgtatccatcctccaccacctggtgggcacgacacaccagatcgaagtcgttcttttgcagaaacttctcgaggacatcgcgaccatagagatagctaacacctcgatcactcgatgtccagccgaatccatagcgatccggatcgctccacaacagatcgcatagcagacccgtttcgggcacttcagtgggacgggcaatcgattcgatgttgctcagctccttcagctgcggactcagtccgccgtggcaacagaagatgcgatgggaaatgatggctgccacgggcatgcagttgtagcaatcgacaaaggttttccacagcttcaccgtgtagcgccgcttgcactcgtcaaagaatccatagactcgattcaccgactgcgattcgtgatttccgcgcagtaggtaaatatgctttgggaacttgacgcgcagtgccaagagcagggtgatcgtttccaccgaattcttgcccctgtccacgtaatccccgagaaatagataccgtgtctgcggcggatatccgcattgatcgaggatcttcagcagatcataaaactgcccgtgtatgtcgcccacaactcgaatgggtgccggaacattgagcaacatgggctcgtccaggaaaagttcacgtgccagggtgcacagtaagttcacttctgactccaacaatggaagtctttgcatctttgagcgtcgaaagctcatcagtttattgagcaaatcgttcagattcagggcaccaggcagacggtagtcagcattcgcttcgctattcgacaactgccccgcgaaatgtaaactgtgcagtgtatccacggccatcgtttgggtgggtgaaatcaacaagtgtattcttaaataataaaaaactgacagaaaatgtaaagccagtggatcacaggaaaaattaggcaatctttaactaacaaatattttgcattattataaatggtagctcatcatcaactcgttgtaactgcaattaatgcgacaagaaattaaaattaacgattttccgatttgcgccgcagtcgccggaaagcgagtaaataaatatgaatgaaaaatgtcttttggctgctgcggccaacgacaaaacaactttttgccctagttggatgagcgaaaaaaaatgcagttatgttgttggcaagcggaaacgcagttggcactgctaattccttttggcaactctcgcttttttctttcagcggtttcctgctgaaattttcctctttttgtaaagttttcaattagcgagctgtcgacggaagtcgtacgtaaaaaatgcaagcgaaaaaatagttgaacagcggcgacgcaaaggaaatttcacccacttaacggaaaggcataaatttgacgcgtcttccaattgattttccaattttcacctgctttgtttgtttctgttttgtgattgctcagcgacgcttgaagaatgtttgcaataatttcacagccttatgaatttttaagttccgtcgctgcgttacaaagttttcagattgttggaaaggctacggaaaatgcgaaaattatggtcgatgaccggttgaaaagttagcactagttataggcatattttcactgatttaatttgatgtatattgagcagacgattgttgagtaattagtttgaaatcataactaatggatgttcactgtcttcccttacagtggacgctcgtacagcaaggacagccacaagagttcgcacaccgacttgagtttaatgtgcaatgcctcatcgtcccggccatcgaactctgcgtctggaagcggatcgccgaagctattggcaaacactcaattgcgtaag

SEQ ID NO: 18836 - DNA, 1011 bp, DROSOPHILA
atggccgtggatacactgcacagtttacatttcgcggggcagttgtcgaatagcgaagcgaatgctgactaccgtctgcctggtgccctgaatctgaacgatttgctcaataaactgatgagctttcgacgctcaaagatgcaaagacttccattgttggagtcagaagtgaacttactgtgcaccctggcacgtgaacttttcctggacgagcccatgttgctcaatgttccggcacccattcgagttgtgggcgacatacacgggcagttttatgatctgctgaagatcctcgatcaatgcggatatccgccgcagacacggtatctatttctcggggattacgtggacaggggcaagaattcggtggaaacgatcaccctgctcttggcactgcgcgtcaagttcccaaagcatatttacctactgcgcggaaatcacgaatcgcagtcggtgaatcgagtctatggattctttgacgagtgcaagcggcgctacacggtgaagctgtggaaaacctttgtcgattgctacaactgcatgcccgtggcagccatcatttcccatcgcatcttctgttgccacggcggactgagtccgcagctgaaggagctgagcaacatcgaatcgattgcccgtcccactgaagtgcccgaaacgggtctgctatgcgatctgttgtggagcgatccggatcgctatggattcggctggacatcgagtgatcgaggtgttagctatctctatggtcgcgatgtcctcgagaagtttctgcaaaagaacgacttcgatctggtgtgtcgtgcccaccaggtggtggaggatggatacgagttctttgccaaacgccaattggtcaccgtcttctcggcacccaactattgtggattgtacgacaatgcaggagcttcaatgggcgtggacaaggacctagttatctctttcgatatacagcggggtgacattcgaagaatcgtggttagaaatgagagcgtttctcccataagttga

SEQ ID NO: 18837 - protein, 336 aa, DROSOPHILA
MAVDTLHSLHFAGQLSNSEANADYRLPGALNLNDLLNKLMSFRRSKMQRLPLLESEVNLLCTLARELFLDEPMLLNVPAPIRVVGDIHGQFYDLLKILDQCGYPPQTRYLFLGDYVDRGKNSVETITLLLALRVKFPKHIYLLRGNHESQSVNRVYGFFDECKRRYTVKLWKTFVDCYNCMPVAAIISHRIFCCHGGLSPQLKELSNIESIARPTEVPETGLLCDLLWSDPDRYGFGWTSSDRGVSYLYGRDVLEKFLQKNDFDLVCRAHQVVEDGYEFFAKRQLVTVFSAPNYCGLYDNAGASMGVDKDLVISFDIQRGDIRRIVVRNESVSPIS

SEQ ID NO: 18838 - DNA, 4080 bp, DROSOPHILA
ggcactccatcacgattgttacccaaaggaaaggtgtcctcgccagtctggaaagcaaagagcaccagttgcaatggactttgattcaaaaatctcacaagacctaccacaaatctgggcaggaataggacgccagcctcatagttggcgatcctcaggcagggttggatattcgagtttttgttaaagcagccccaggctgccttcgagagattcgccgaggttaaaacgaaccagtacaccgactgatcctccagattgaagcgcgtatagctcttgatgtgcggcattgcccgcgagcgaaagcgatcgctggacttccattgctgcagatagtccttgagccatggctgcttatcgttggtgttcttgccgtagggcaaacacccgccgcccagcattccatcatgactgcccgcgacgttgccgtagctgggatagatcatcttgaagggcggcatctggcgcagcttgcccacaggcgtggaatccttcttcaggctattgacgaaatctgccagatgtggtgtgaccgcgggcgaggccatgcgaaaataccaactgcgtgggcggagctgcgcaactatcggttgcacacttatagtattttatgctttgccgccaaaatgtacgcatttaaaatgctgtccaaaacaaagtattggttgttattacaattttaatgcaatgaatatataacattaaatcttttgatttagttttagtaatataagtaaggacaataaattatggtactgaaaactgagtgaacttgatggttttacctgcggtgcaaacagaattagcactccgatccaagaagtatgggcagaattggacatttaccgaaaaaaaaagatgcctgaatccaaaaataggatcgcaaattaaatttccttaatttaatgtgcagtaaataaataaaagtaactgattcaaacgtgaatagttgccatagaccagatatttcaacgaattcaaaagccatttgtgaggccttataagacgtatcttaatctcaaccttgtaggtaatccatcaggaagggcttatcatctggagcatagggcgtcaatggaacgtcgtatggtagcggaaacgctggcactccatcacgattgttacccaaaggaaaggtgtcctcgccagtctggaaagcaaagagcaccagttgcaatggactttgattcaaaaatctcacaagacctaccacaaatctgggcaggaataggacgccagcctcatagttggcgatcctcaggcagggttggatattcgagtttttgttaaagcagccccaggctgccttcgagagattcgccgaggttaaaacgaaccagtacaccgactgatcctccagattgaagcgcgtatagctcttgatgtgcggcattgcccgcgagcgaaagcgatcgctggacttccattgctgcagatagtccttgagccatggctgcttatcgttggtgttcttgccgtagggcaaacacccgccgcccagcattccatcatgactgcccgcgacgttgccgtagctgggatagatcatcttgaagggcggcatctggcgcagcttgcccacaggcgtggaatccttcttcaggctattgacgaaatcctgctgaatccaggcctgcacgttggctcccaggctgccgatgctcgagctctggcagacgaccggtatgcgatcgtcgatgggcgccgcgtgtttggcgagcaaggaggccaagcgggcgtggccccatggatgaccacgcacgctgccctcgcgatgacctccgggcacagagcccaagaagaaaacgctgcggagggaaacaattgatagattaaatctacaatacttaggttgtgtcctacttgatggcactgaaatcactgttccgaatccttgctatccaaggctgcagctggcttatcttgtactccaccaagtacagcatcagatcctgtttgaagcccgtcagactttcgccagcgcccgtatccgcatcgaccggcagagcaggcagcttgggactgatccacaggccctgcgtgcgattgtgccagtcgtcctcgtacagattcgccgtggatatgaccacccgcatggagccatcgctgtagccgaggaacatcatcttggtgtgcgaggtggcaaacggcgtgggcatcttgacacgaatggccgtgacctgctgcttgaacttcccaatgctaagcagctccggcgattcgtcgccgtagagcagcaaaagtggcttgtccctgcaagttaagcaattgcattgcacgaataaggagtttagttaattagttattacttacagtatcccggcaaagtagtagtgtcccaggagccagccaatgtccaccataaagttaatttggacggtgctctcaatctcgccgagactttcgtccaggatttcctgcagcgttatgctcaatggctccgagtgggtgggcttggagtccgtgatcgcggtgaggaacatgttatagggagctgcccgctccagctttttggccattcctcccttttcgattaccacaggaatataatctctgatgttcttggcatttagcttctgttttttggccagatttgaggtgtcttgggaagcagctggcccggaggctgacgatccactgggattggtatctagggacccagaactcgaggatccactggcaaccggagcagttacggctggttttgagctagaggaatgtgcttcctgttccttgttggttgcctgcttgggaaacagtttctccagcagcttcaactgggtgtgaatcatctcgctggagtaattggctggtatctcatagtcccccgattcatttcccttcgcataaatggcatcaactgaataaatagacaaatatcatttaatgctacattttattggaatttacttacggtgggcatgggagaactcgccaaaatgaatgggattcttcctgtagcacttttcgccataaggacactccttcatgttgctatttattatttgataacttaaacgaacacaattaacacaaatagaatttcgcaaatgctgtgcaaataaaaaacacaaagcgcgctcagctggcgatggcaattaatcgattggaaaaataccgttggataattaaaaaatatcaaaagtttgcatgacttcctgaaattaaataaatacaagcgaatataattaaagaaaaataactcactcacattacagttcccaaaattactttactcataacatcgataactcaatatatatttagcggagtttgtttcgaattgtttttgggtataatatatatataaagtaaaaacaattttaaattcctattataaacgatagtttccggcaaggcgatagtcagaaacgtacatctctacttatgatataccgtaaggaagctggtatatttcgccagtcatggtcacactgttttcaatggtcaatgttgtgtgtgttgcatttcgtgataaacaattttgaaaaacaatttacgcacatttgcgtgtcgaaaaaccaaacaaaatgtcaaaataaacgagcagttagtgcctaaatccacgcgtgagtagcttccaggccgttttcagcgattttccccacagaatattcggtttttaagtgcaattacgtttgtgtgaaagagaagaaaaaatgtttgcctgtatttgtgctgtgatgctgcttcttcttcatccatagctacgaccgccacacatttgttgttattcttgttgttgttattattgttgttgtgttgggggcaaaaacagaattggctttgtagttgtttttctttgcagggacgatcaccgttgatttcttcctataagaatatgctgcaatatgtgtgtgcagatgtgtgcgcgttgtgtatgtataagtgcgtgcgcgccattaattcaaccaaaaacaagaagaaaaacaaaaaaaaaacaacgaagaaaaagtagcatcacttataaatacacacaataaaattaaatttttattatgttttgaaaatacttgaaattcttgtctgaacatttcccttccaattccacttgagcctctgccgctgcctcggtcggcg

SEQ ID NO: 18839 - DNA, 1851 bp, DROSOPHILA
cgcgctttgtgttttttatttgcacagcatttgcgaaattctatttgtgttaattgtgttcgtttaagttatcaaataataaatagcaacatgaaggagtgtccttatggcgaaaagtgctacaggaagaatcccattcattttggcgagttctcccatgcccaccttgatgccatttatgcgaagggaaatgaatcgggggactatgagataccagccaattactccagcgagatgattcacacccagttgaagctgctggagaaactgtttcccaagcaggcaaccaacaaggaacaggaagcacattcctctagctcaaaaccagccgtaactgctccggttgccagtggatcctcgagttctgggtccctagataccaatcccagtggatcgtcagcctccgggccagctgcttcccaagacacctcaaatctggccaaaaaacagaagctaaatgccaagaacatcagagattatattcctgtggtaatcgaaaagggaggaatggccaaaaagctggagcgggcagctccctataacatgttcctcaccgcgatcacggactccaagcccacccactcggagccattgagcataacgctgcaggaaatcctggacgaaagtctcggcgagattgagagcaccgtccaaattaactttatggtggacattggctggctcctgggacactactactttgccgggatactggacaagccacttttgctgctctacggcgacgaatcgccggagctgcttagcattgggaagttcaagcagcaggtcacggccattcgtgtcaagatgcccacgccgtttgccacctcgcacaccaagatgatgttcctcggctacagcgatggctccatgcgggtggtcatatccacggcgaatctgtacgaggacgactggcacaatcgcacgcagggcctgtggatcagtcccaagctgcctgctctgccggtcgatgcggatacgggcgctggcgaaagtctgacgggcttcaaacaggatctgatgctgtacttggtggagtacaagataagccagctgcagccttggatagcaaggattcggaacagtgatttcagtgccatcaacgttttcttcttgggctctgtgcccggaggtcatcgcgagggcagcgtgcgtggtcatccatggggccacgcccgcttggcctccttgctcgccaaacacgcggcgcccatcgacgatcgcataccggtcgtctgccagagctcgagcatcggcagcctgggagccaacgtgcaggcctggattcagcaggatttcgtcaatagcctgaagaaggattccacgcctgtgggcaagctgcgccagatgccgcccttcaagatgatctatcccagctacggcaacgtcgcgggcagtcatgatggaatgctgggcggcgggtgtttgccctacggcaagaacaccaacgataagcagccatggctcaaggactatctgcagcaatggaagtccagcgatcgctttcgctcgcgggcaatgccgcacatcaagagctatacgcgcttcaatctggaggatcagtcggtgtactggttcgttttaacctcggcgaatctctcgaaggcagcctggggctgctttaacaaaaactcgaatatccaaccctgcctgaggatcgccaactatgaggctggcgtcctattcctgcccagatttgtgactggcgaggacacctttcctttgggtaacaatcgtgatggagtgccagcgtttccgctaccatacgacgttccattgacgccctatgctccagatgataagcccttcctgatggattacctacaaggttgagattaagatacgtcttat

SEQ ID NO: 18840 - protein, 580 aa, DROSOPHILA
MKECPYGEKCYRKNPIHFGEFSHAHLDAIYAKGNESGDYEIPANYSSEMIHTQLKLLEKLFPKQATNKEQEAHSSSSKPAVTAPVASGSSSSGSLDTNPSGSSASGPAASQDTSNLAKKQKLNAKNIRDYIPVVIEKGGMAKKLERAAPYNMFLTAITDSKPTHSEPLSITLQEILDESLGEIESTVQINFMVDIGWLLGHYYFAGILDKPLLLLYGDESPELLSIGKFKQQVTAIRVKMPTPFATSHTKMMFLGYSDGSMRVVISTANLYEDDWHNRTQGLWISPKLPALPVDADTGAGESLTGFKQDLMLYLVEYKISQLQPWIARIRNSDFSAINVFFLGSVPGGHREGSVRGHPWGHARLASLLAKHAAPIDDRIPVVCQSSSIGSLGANVQAWIQQDFVNSLKKDSTPVGKLRQMPPFKMIYPSYGNVAGSHDGMLGGGCLPYGKNTNDKQPWLKDYLQQWKSSDRFRSRAMPHIKSYTRFNLEDQSVYWFVLTSANLSKAAWGCFNKNSNIQPCLRIANYEAGVLFLPRFVTGEDTFPLGNNRDGVPAFPLPYDVPLTPYAPDDKPFLMDYLQG

SEQ ID NO: 18841 - DNA, 2633 bp, DROSOPHILA
tgaaaatgaggaaaaaaaagagcaaatgatgattagcacatgatttaatgacacttgttcccggattacttacggttcccttaggacgggcgcgatcttgtagaggcagtcgaggaagtgggcatcaaggcaccacacactgggcttcagcggctggctgtgaacattaaggatgcggaacaggatgcacacgatgacggcgatgagggtaaggaaggcggtggacatggtggcgctgggtgctgcgagtttttagccaggatccgaggaagtgacccgccttgtcatccaatcgaactccacttatcctgctatttggcgcgcctccttgcggcttctcttcgtgtttcccagggcaatctgcgttgctttcgtcctttctatgtgcgtttgctacgttttttggctggcgtaaataagttaacactttccacgagaaccggatttaaatgctgctcgaaatttccgaaaattcgcctgctgcgatttttttcaactgccagatgtggtgtgaccgcgggcgaggccatgcgaaaataccaactgcgtgggcggagctgcgcaactatcggttgcacacttatagtattttatgctttgccgccaaaatgtacgcatttaaaatgctgtccaaaacaaagtattggttgttattacaattttaatgcaatgaatatataacattaaatcttttgatttagttttagtaatataagtaaggacaataaattatggtactgaaaactgagtgaacttgatggttttacctgcggtgcaaacagaattagcactccgatccaagaagtatgggcagaattggacatttaccgaaaaaaaaagatgcctgaatccaaaaataggatcgcaaattaaatttccttaatttaatgtgcagtaaataaataaaagtaactgattcaaacgtgaatagttgccatagaccagatatttcaacgaattcaaaagccatttgtgaggccttataagacgtatcttaatctcaaccttgtaggtaatccatcaggaagggcttatcatctggagcatagggcgtcaatggaacgtcgtatggtagcggaaacgctggcactccatcacgattgttacccaaaggaaaggtgtcctcgccagtctggaaagcaaagagcaccagttgcaatggactttgattcaaaaatctcacaagacctaccacaaatctgggcaggaataggacgccagcctcatagttggcgatcctcaggcagggttggatattcgagtttttgttaaagcagccccaggctgccttcgagagattcgccgaggttaaaacgaaccagtacaccgactgatcctccagattgaagcgcgtatagctcttgatgtgcggcattgcccgcgagcgaaagcgatcgctggacttccattgctgcagatagtccttgagccatggctgcttatcgttggtgttcttgccgtagggcaaacacccgccgcccagcattccatcatgactgcccgcgacgttgccgtagctgggatagatcatcttgaagggcggcatctggcgcagcttgcccacaggcgtggaatccttcttcaggctattgacgaaatctgccagatgtggtgtgaccgcgggcgaggccatgcgaaaataccaactgcgtgggcggagctgcgcaactatcggttgcacacttatagtattttatgctttgccgccaaaatgtacgcatttaaaatgctgtccaaaacaaagtattggttgttattacaattttaatgcaatgaatatataacattaaatcttttgatttagttttagtaatataagtaaggacaataaattatggtactgaaaactgagtgaacttgatggttttacctgcggtgcaaacagaattagcactccgatccaagaagtatgggcagaattggacatttaccgaaaaaaaaagatgcctgaatccaaaaataggatcgcaaattaaatttccttaatttaatgtgcagtaaataaataaaagtaactgattcaaacgtgaatagttgccatagaccagatatttcaacgaattcaaaagccatttgtgaggccttataagacgtatcttaatctcaaccttgtaggtaatccatcaggaagggcttatcatctggagcatagggcgtcaatggaacgtcgtatggtagcggaaacgctggcactccatcacgattgttacccaaaggaaaggtgtcctcgccagtctggaaagcaaagagcaccagttgcaatggactttgattcaaaaatctcacaagacctaccacaaatctgggcaggaataggacgccagcctcatagttggcgatcctcaggcagggttggatattcgagtttttgttaaagcagccccaggctgccttcgagagattcgccgaggttaaaacgaaccagtacaccgactgatcctccagattgaagcgcgtatagctcttgatgtgcggcattgcccgcgagcgaaagcgatcgctggacttccattgctgcagatagtccttgagccatggctgcttatcgttggtgttcttgccgtagggcaaacacccgccgcccagcattccatcatgactgcccgcgacgttgccgtagctgggatagatca

SEQ ID NO: 18842 - DNA, 633 bp, DROSOPHILA
atggcctcgcccgcggtcacaccacatctggcagatttcgtcaatagcctgaagaaggattccacgcctgtgggcaagctgcgccagatgccgcccttcaagatgatctatcccagctacggcaacgtcgcgggcagtcatgatggaatgctgggcggcgggtgtttgccctacggcaagaacaccaacgataagcagccatggctcaaggactatctgcagcaatggaagtccagcgatcgctttcgctcgcgggcaatgccgcacatcaagagctatacgcgcttcaatctggaggatcagtcggtgtactggttcgttttaacctcggcgaatctctcgaaggcagcctggggctgctttaacaaaaactcgaatatccaaccctgcctgaggatcgccaactatgaggctggcgtcctattcctgcccagatttgtggtaggtcttgtgagatttttgaatcaaagtccattgcaactggtgctctttgctttccagactggcgaggacacctttcctttgggtaacaatcgtgatggagtgccagcgtttccgctaccatacgacgttccattgacgccctatgctccagatgataagcccttcctgatggattacctacaaggttga

SEQ ID NO: 18843 - protein, 210 aa, DROSOPHILA
MASPAVTPHLADFVNSLKKDSTPVGKLRQMPPFKMIYPSYGNVAGSHDGMLGGGCLPYGKNTNDKQPWLKDYLQQWKSSDRFRSRAMPHIKSYTRFNLEDQSVYWFVLTSANLSKAAWGCFNKNSNIQPCLRIANYEAGVLFLPRFVVGLVRFLNQSPLQLVLFAFQTGEDTFPLGNNRDGVPAFPLPYDVPLTPYAPDDKPFLMDYLQG

SEQ ID NO: 18844 - DNA, 4892 bp, DROSOPHILA
gcctcgcgctttttcaacttcttgttagcccgctcgatgggcagcttgtcatcatcatcatcatcatcatcatcgtcgtcgtcctcatcctcctcttcatcactgtctgcctgagcaccatcttcctcgccagatatgtcaaagtcatcgtcggagttggcatcatcatcgtcggatagatcggccagcttgccaacctgagcggtatcatcatcagattccaatccttcctcatcgtctccctcctcttcctcttcacattcttctcccaactcatcttcggagtcctcctccgactcctcatcctcctcctcctcctcctcggactccgtttctggctgcttctgttgcttcttgggcttcagccaggcatcattatcatctgtaaaacccttgggagctgtagctttctggcccttcggagccggcaccagttgaggcacctcctcatcggaggatgcaacctgtggttcctcttcattatcctcaggatcgctgtcgctgttgtaggccgtcttccgcttagccggttgtggtaactttcccttggccctcttctcctgtagtttggccttctggactactttcttttgctctcgcttaacgaacctctgcttctgtcggtgggaaagcttcttgtcctcctcttccatgggagctgtgaagtaaaacatttgaattgaacacccattgaatagggtaatattcaggagctctcaccaaacgattgtttgcgaaaaacaggcggtccttgcttgcgcgccttgcgcccaggtccctttttcggtttctcactgtattcagccttccgacccatatttttaacttagtttatccagtttcttggagcagaacttaaaaaaaaacgtgagcacttcgattttgctccacgtgcgccgctcaaaagacagcgagtgttttccagcactggtcagagggaattgcttgagccagtgctgtcaacttttcagcttttaactagctatgaacaatgtttttttttcaacatatattaataactaataaaattatatattactttaaattttattttgtcggactttgcttgattcttacacagtttatttatacagattacgttagtatatatatttggaaaacacgtggaactttttaattaagatattttagctacttgctctcccagctgtttagcagcaaacgtatttctcagcactataaaaacgagttggtaaactaattggtaaatccaaaaatatcataaataaaaaaaatctggaatatatctaattaacagaattcttgcttataagtaagtattatatccattcaataattagatatgatctttagttgtaatttaaaatgaaaaattaatttaaataaccgttatagttgctgccaacttgatgcgaatagtagtttgttgacaaccctgccatatttgattgtgttggtgaatggctggttcaaacgactgcgcctttttgcgaaaaatttaattagttgcaaatcatggcataccaggagaaaataacagaatttaagaactgggccactaatcttggctgcccgcccactgccctgcccaccgatgatgcactccgaaggtaagttacagctgtgttaggcaaatcggcaactatccgtacttaaaacccgctttttgcttcacagaatttttaagtccggctccagtttacttttgaaccagctgcaatcccgcatccagccggtggattacgtgcgggaggtgcgcgagaacctgctgattgcccaagtggctcgctacaaggacaaaatggtgccgctggcctctaggagtttccagccaccggagctccagaggtaccaaaaaatacaggagctaaagaagcacaaggagaaggcgaaccaacagcttacggaggcccgaaaagagtaccaaaagctatctgccggcatcaagaccaagagtgggtataaagtgaacatactgataaccttgacgtcaatttaatgcggtgaatcccatacagacattcaaaccatcagtgctgagaaccggaagcaactacttgaatccaaatgcaatatccttgacctgaagctggagtcgctgaataagaactacgaccaggagttgaagaacaagatccaaatcttgggcaccacgcccgtgaagctgagtgctagaaatgccagcgaggcgcaggcaacaagggctgtggagcaggctctcaagcagctggagaccttctatggaatgtgtgacgatggcaatgcggtgaacaatttagccgaggccaagcagcgattatgggatcagatgcggagcacctttgcggatattcccaactccctgcttctgaacgtggtaatgaagatcaaagaggagcagctgcagcacatcatgaagctgaatgaatccagaggcgaatgcacaaatgataagccaccgctgaataactatgaggtcaagttactaaagaccaaggccgatatgctgggtctggcggccaaatatttcgcggcccaaaaggagctggaactgaaggaggaacgcttttgccaagactacagcgtctttgtggacaaactgcaatcaaaggtatacagatttaatggcataagtttgggcgacgaggaaaatgcggatgaactgattagcgactatctggtgcagtacaacatgcgcaattttaatcgctcccaaaacgaattccttcgtgagcagattgagcaactgcgtctggagctagatgcgggcgccaagcagctggagaatcacgatctaaagctaggctctgtgaaacaagtatacggcgacattaactccagcatcaatcgcatccagcaagatatggtgcagctgtcacagatcaaggagaagatcctgttttcgcgaaatatgatgaagaacctgctggacgatatgcaagcggccacacagaaacaaaacgccaagtcccagctgatgagcactaagctaaaagtcagcaatatgtccatgttgggtgcggagagtttttgcctggccaatgatagtgtgttctccagcaccaaggtggagttcgatggcaactgcagcgcaataaactcaacgatgcgtcgcagttttgacaacaaaacgctagtgccgggcggagcagcatctaccacactgatggctgcatccggagccacgctaccatcgcatttgctggaattcaatacatttttggaaataccgctggaaaaatttagctgtacgccgcgcgcctggtgagagcatactttagctgaatgtgctatttccaattaatccagagttcatgttttttccgacagctccttcctgttgtcggccaatccactcatcgtcgaggcccaggagttggcctccaccgttcaactggcaccaggctatttgctaacacccttcggcgctctgcaggaagtccgaaaacgcattttgtgggcgtcagcaattgccgcacacacgtctgagttgaaattgaatttgcagccgttaattggtaagctcgattccgacattttgtctcatatccgtctgatagaaaacgtatcaccctgctccccagttgatccgcacgatttgagactgaaggcgagtcgtcagcacgaggaaattgaccaattgctggacaacctgatggccattggggtgaagactcagttgcagctggaaaaggccgagcgcatctatcagttcctgcttgagaatccattgcgacgctacgttccacccagtaaacgatacaacaatggcagtttcgcggactacgagtccgaattcaatctctactatcgcatgaccaccaatggaagttcgatgcgagcgccacctaattaagtacgttatttgtgttgtgaatactgtagcccttttcaattttaaattatatgaatatcctgtactgttagaatgaaaaaacgttattttaattttttaaatatttttattcatttttttttgttaattttagtttttcgtttgtctttttttttttttgttacaaagtcgaaattgattttactcacacccacacaaaaatttgggtaaaaatgtcttgttattcaaaagaatttctcattgtgcttatgagctaataatgtacacaacttttgttgccttttattcgaatatggattttgcctcgattatgggggttgagatattatttagggaatagtgtgtcgagctgataggtttgcgtaacgaaaatactttattattattaaataaaaataaaatatcctctcaattgtcgaagcaaaatcggaatgcttgtgatgtatcttgcttagattaaaatatttaaaacatatacagtgccagatcagaaagcaaaacggacgggatcaaggtgaaatgcatcgtttacggctgggctggagtctaatttcggtttgagttcggctctagggtgctaataaattatagtctagttatcgttggcccttcacttatcatacttaacttaagacataatattggacgtacaaaaattgggctggactatacggaaacggaagcagaagctacaaaacgaactgagaactggatgtgggttggtgtgtccgaaatcgtttgagacatctattgcgcggttacacgatgtttgttttcgatatatctattttatatatgttttatgcattcgagggctggttgatggattggacctgaagcgcttggagtcgacggccgtgggcccattggcttatctggcgaagagcaacgccgccaggatgcccacaagagcgaacgaagtggcggacacatcctcggctccggcgatgtacgcctgtccacaggccggtgggcacacgggaatgatcgtctcgaagagattgacgcgcgcctccgcctctccaaagcgattggtggccttgcacacataatctccgtactggcgcttctcaac

SEQ ID NO: 18845 - DNA, 2630 bp, DROSOPHILA
tttcaacatatattaataactaataaaattatatattactttaaattttattttgtcggactttgcttgattcttacacagtttatttatacagattacgttagtatatatatttggaaaacacgtggaactttttaattaagatattttagctacttgctctcccagctgtttagcagcaaacgtatttctcagcactataaaaacgagttggtaaactaattggtaaatccaaaaatatcataaataaaaaaaatctggaatatatctaattaacagaattcttgcttataagtaagtattatatccattcaataattagatatgatctttagttgtaatttaaaatgaaaaattaatttaaataaccgttatagttgctgccaacttgatgcgaatagtagtttgttgacaaccctgccatatttgattgtgttggtgaatggctggttcaaacgactgcgcctttttgcgaaaaatttaattagttgcaaatcatggcataccaggagaaaataacagaatttaagaactgggccactaatcttggctgcccgcccactgccctgcccaccgatgatgcactccgaagaatttttaagtccggctccagtttacttttgaaccagctgcaatcccgcatccagccggtggattacgtgcgggaggtgcgcgagaacctgctgattgcccaagtggctcgctacaaggacaaaatggtgccgctggcctctaggagtttccagccaccggagctccagaggtaccaaaaaatacaggagctaaagaagcacaaggagaaggcgaaccaacagcttacggaggcccgaaaagagtaccaaaagctatctgccggcatcaagaccaagaacattcaaaccatcagtgctgagaaccggaagcaactacttgaatccaaatgcaatatccttgacctgaagctggagtcgctgaataagaactacgaccaggagttgaagaacaagatccaaatcttgggcaccacgcccgtgaagctgagtgctagaaatgccagcgaggcgcaggcaacaagggctgtggagcaggctctcaagcagctggagaccttctatggaatgtgtgacgatggcaatgcggtgaacaatttagccgaggccaagcagcgattatgggatcagatgcggagcacctttgcggatattcccaactccctgcttctgaacgtggtaatgaagatcaaagaggagcagctgcagcacatcatgaagctgaatgaatccagaggcgaatgcacaaatgataagccaccgctgaataactatgaggtcaagttactaaagaccaaggccgatatgctgggtctggcggccaaatatttcgcggcccaaaaggagctggaactgaaggaggaacgcttttgccaagactacagcgtctttgtggacaaactgcaatcaaaggtatacagatttaatggcataagtttgggcgacgaggaaaatgcggatgaactgattagcgactatctggtgcagtacaacatgcgcaattttaatcgctcccaaaacgaattccttcgtgagcagattgagcaactgcgtctggagctagatgcgggcgccaagcagctggagaatcacgatctaaagctaggctctgtgaaacaagtatacggcgacattaactccagcatcaatcgcatccagcaagatatggtgcagctgtcacagatcaaggagaagatcctgttttcgcgaaatatgatgaagaacctgctggacgatatgcaagcggccacacagaaacaaaacgccaagtcccagctgatgagcactaagctaaaagtcagcaatatgtccatgttgggtgcggagagtttttgcctggccaatgatagtgtgttctccagcaccaaggtggagttcgatggcaactgcagcgcaataaactcaacgatgcgtcgcagttttgacaacaaaacgctagtgccgggcggagcagcatctaccacactgatggctgcatccggagccacgctaccatcgcatttgctggaattcaatacatttttggaaataccgctggaaaaatttagctgtacgccgcgcgcctgctccttcctgttgtcggccaatccactcatcgtcgaggcccaggagttggcctccaccgttcaactggcaccaggctatttgctaacacccttcggcgctctgcaggaagtccgaaaacgcattttgtgggcgtcagcaattgccgcacacacgtctgagttgaaattgaatttgcagccgttaattgttgatccgcacgatttgagactgaaggcgagtcgtcagcacgaggaaattgaccaattgctggacaacctgatggccattggggtgaagactcagttgcagctggaaaaggccgagcgcatctatcagttcctgcttgagaatccattgcgacgctacgttccacccagtaaacgatacaacaatggcagtttcgcggactacgagtccgaattcaatctctactatcgcatgaccaccaatggaagttcgatgcgagcgccacctaattaagtacgttatttgtgttgtgaatactgtagcccttttcaattttaaattatatgaatatcctgtactgttagaatg

SEQ ID NO: 18846 - protein, 685 aa, DROSOPHILA
MAYQEKITEFKNWATNLGCPPTALPTDDALRRIFKSGSSLLLNQLQSRIQPVDYVREVRENLLIAQVARYKDKMVPLASRSFQPPELQRYQKIQELKKHKEKANQQLTEARKEYQKLSAGIKTKNIQTISAENRKQLLESKCNILDLKLESLNKNYDQELKNKIQILGTTPVKLSARNASEAQATRAVEQALKQLETFYGMCDDGNAVNNLAEAKQRLWDQMRSTFADIPNSLLLNVVMKIKEEQLQHIMKLNESRGECTNDKPPLNNYEVKLLKTKADMLGLAAKYFAAQKELELKEERFCQDYSVFVDKLQSKVYRFNGISLGDEENADELISDYLVQYNMRNFNRSQNEFLREQIEQLRLELDAGAKQLENHDLKLGSVKQVYGDINSSINRIQQDMVQLSQIKEKILFSRNMMKNLLDDMQAATQKQNAKSQLMSTKLKVSNMSMLGAESFCLANDSVFSSTKVEFDGNCSAINSTMRRSFDNKTLVPGGAASTTLMAASGATLPSHLLEFNTFLEIPLEKFSCTPRACSFLLSANPLIVEAQELASTVQLAPGYLLTPFGALQEVRKRILWASAIAAHTSELKLNLQPLIVDPHDLRLKASRQHEEIDQLLDNLMAIGVKTQLQLEKAERIYQFLLENPLRRYVPPSKRYNNGSFADYESEFNLYYRMTTNGSSMRAPPN

SEQ ID NO: 18847 - DNA, 5465 bp, DROSOPHILA
ttagtctggcgttccttgcgagctcgctccttgagctgcgctgtttttagagtcaccatcagctgcgtggagttgtagagccaagtgccctgcaaataagcaaagataaatacacacttcatgcagtggaaacactataacttacaatcaaaagcatgcaattaagcaaaataggtattgagaaaactgtcgagataaacaggccgttgctatcgaagtattgttgtctggaaaaggaactccagttgttagcagcgaactcattgatgctttcggtgaagtagactgccagcactgaggaagatgaagcacatgcaaaaatcagagtcatttatcgggtaagtcaaggaagccgccaagtccacgtacacagtactaggaagaggaaaacctggaagttggagctgttccggctgagcagcgcagtggtggtggttaagatatgcgccaaaataaggccaataagccagggatccttccaatcgatctgcaaaaatagtgacaacttgccggattcttgatttttgattgtatataggcgagtatcttacgctcagcagaaatgtccaatagccattgatctcgttgacctcaatttgccctgggtgcatcgtacagatttttgtgaatataaatgtttcctgtatatattttgcgatatattcgaaagccgagtcaaaacaaacataaatagccattcgcagcgaacagctgtcatttttcatggcaacgccattttgggaggcctatagacgttcaggcttcctcaattttgactggatctggtagcgctgtttgtaagacctaacttactattttatgggctaaatataacaacataaatcaaaatactattatttcgtttagtatgtattactcaccatataaatgcaattacaaattttgtgccacctcattctcacccaccccgacttgtcgtgcagagtcgccctgcccgtcattcagtctgaacgtgtcgataacgctttcactgactcagtagacaacattaacaaatccgaaaaatatcacaaagaattcgttttaaaacagtcaaaattgtagtttttagggcgaatcaaatctattcgggttattaagtcgaacgggcgacgtgtgagcaagcaatcgaagctaaagccgagcagggtaatccgaaaaaaggggcgccttagatgtggcacgggccaccgaccctaccgtgcaccacactcgtctaggactctgttctaaagcgcttgtggcgggagtttctggccaggatcgggcagggatcgaggcgcactcgagacccgttgaaaggtcgcagtcaaatcgtaacgacgacacgtaacggagcgcggttcaaggacacgcggctcagactcctcgctcagagtcgcaggcaacgaaaaagccgctgtgttcgggcgctaggcaagcccacgcctccgcccatcggcaactggaagttccagtcggccctgtggtccgcaagcctttgtgccactcacgtccacgcccacgccaagcgattgaaacgcgaaatggccgttaagcagaataacagcgaggcgggtgataatgcctcggataatgccggaggagctggcaacggcattccgcccaacgccaaacccatgtccgcgaacggaatggcgaatgccgaagagaacgtattgccaaagggcatggacacgggttcgcccgctggcgagagcctgaactccaaccgatcgggcaagcgggatattaaggccctgctggcatacctccaaagcatcgatatgccggagcaaggccacaatgtgatggccatctgcgagagggttatcgtggacttggcccgtctgcaaattccacgaggcgcatcctgtccacgcctaaaggaagacgtctgccaggtcggtgcctttctggctacgcgcaacgagaagttccaccaaatgttctacctgcgtgtcgtctacgagctgatcaccaagtcgccattcgagccaccaccctcgtgtgccgtggccattgtgttccagctgttcgactccacgcagatcctggaggctgtacactcgctgctggaacagaatgtgcaggactcgagcattaagaagacggtgaacctgctctgtgattggatcacgtactgcaccttttgcagcactctcaatctttgggtgctggcgctgctcaaggggctaagggatcagggcaaaatggcgctgctcgacgagattgcaatggacaacatcgagaagctgttccacgtgatgatctttccggcgctgaggcaaaaggccgcaccggttgtgtttcacatgctgtcaacgattaatcagacccccgaggtttttcacaaggtaaacacttcactcaaacattagcttcaacataattattgacatttggttggttaccctattagatcttgccaaggatcccacgagtcctgcagtatgtgaagaatcagtcgaccaccatggacgagattggcctggaaaccaagaaatgtctgcagcaactggtcgacctaaccagcgccctaatgctacgtttctatgatcaggatgagctctatgtcgcaaccaagaaagccctgcagacctatgagccctctccgaattgcgtggctctggcaaaggcaatgcatgagaatgcccagccgtggggtcggcggaatgcgagggttggactcgttaacctggggaatacctgctacatgaatagcgtacttcaggcgctagccatgaccagcgagtaagtaaagatcaaatgaagaaaccccacttctaatttccccaaagtagaagcgcaaaataatatctttgcctcatatttatgattaaaactcggttctatatttgcattgccttgccagcaccttttgtttaagagctcactgtttataaatctgttttaggtgtcaatttccgattacgaaaataattacgattacgaagcttattggctttatttatcttcttacaactacatatactcattttccatttgcagttttagcaggcaaatcctgcttatcgagtgcaattcagtgctgctcatgaaagtgcagcagcagattgccctgatgcatcactcgctgcgctacgaactaacgccttcgcgagtgctgaacgccacccggccgcctagcttcacgcccggcctacaacaggacagctccgagttcctaggatatctgctcgacctgctgcacgagcacgagatcaacagctcctcagtcactggtcacagtgttggtcctccgaagaccggcagggaagtggacgacgtgcccgcactgctgagcgaggatatattgtcgagcggcgttattccgtacaacagcaaggatcacgagctcagcagtggaagcaacagtgacaattgtaatcacaagcccacaccgacaccacccgcgactcccaccaaagccaccaacggcttaaagcagcagggccagcaggttgatcaggcgaagccaccatctaccattgacaagacgttcgctggcaagctttccaccacctatcgatgtttaaactgcggctgggagagccggaacgaggacagctttcgcgagctgcagctgtcttttcccgatgataaggaagactgtggagccaccaactactcggtgcaggatctgatcgagtactactgctcgcccgagaagctggacggtgacaatcaatatttctgtccacaatgcaagaagctttgcgatgcggagcgccacatcggggtcacccaggcaccgaagaaccttattctcacgctcaagcagttcaagtacgatcagaagtaccacttccgcaccaagctcatgcataaggtgttccacgatgagagcgtaagtatcgcagcgaatttctccgctacaagtttagctaaccatttcgcacgctaggtcacagtaaaaatgtcggcaaaggactcgctgcaggagatgtccactgtgcactatgatctgtatgcgggtgttgttcacgccgggtacagcatggattccggtcactactttacgttcgcggcggatcaagccaagaattggtacaagttcaacgataacgtggttacccactccaagccggaggagatgcacaatctcacttcgcccaacacgccctacatcctgttctacaagatgtgcggccactccaatgagtctaattcggttacggccagctgcagttcgagtatggtatcgggctcaaatgaccaggtggtctcggtgccactgtcgccgcctctgaagctggaggagttgccacgccgacttcgcgactacgtaagaaaggacaaccatgtttacaacgaagagttgaagatgcaacgctttaagcgtggcaacagcggtcacggcaatgcgtttgtcagccggcacaactttgatggcgatggtgacgaggacgacaaggcgccgccgccgcccggaggatgtggaggcaatggactgggcatgaacatcaaccgcttcgtcttctgagaaagcgacagccaggatagcgagcacaccggaggccactagaacatatacttgtctactttatgaaacacgcgcatactaatcgaaatgttacatacatatatatatagcacgttcacaaccaatcgagatatatgcgcctacgtatatcgaagtgtatgagaaacgcgcttaccgatcgcttgttcgctacctccttgagttgttgtcgatgttttctaaattgtttcttccttttctccttgatccttcggcccgttgccccaaaaatcattatactcatccactcatacgaacgcaaactattattgtatttccatttacaaaattgttataatttttttgtttttgttaacacaaacctagttgtagaacgtgcatatatgcgaacacaaacatatttaattataaaaattaaaaaaaaaaaaaaacaatagaattagccagaaataggagcgatatacttgaatccgaagaccactaacttccaaaacactaaaccagaaataatgtctgcaccctagtttttaacgcacagctcgaaattaaatcatatctcgagttgcaatcgaactagcaagaagctacaaaacaagataatcgcggcattgacttgtatagatcgagatcgtttatagatcgggctataaccctcggatcgtattattagtttcactgttaattttagcaaatttcaaaaaatttgcgcatgtgcgacacgaatttgtaattgatatatataaatgtatctctttggatctggtgagcagaggttgcgatgaattttgaacgttattgcaattaaattggaataatttcaaggaaatttgtatatggtgtatgtctattgataaccaaaatctatactatgctatgctataagtgtatcaataaagaaaagaacaagcccaaagagtgtttaattattagagtcacgaaagagtttaatgtgaaaacaacaaaaatagtatccattcatggaagttactatatcaaaaag

SEQ ID NO: 18848 - DNA, 3085 bp, DROSOPHILA
tagacaacattaacaaatccgaaaaatatcacaaagaattcgttttaaaacagtcaaaattgtagtttttagggcgaatcaaatctattcgggttattaagtcgaacgggcgacgtgtgagcaagcaatcgaagctaaagccgagcagggtaatccgaaaaaaggggcgccttagatgtggcacgggccaccgaccctaccgtgcaccacactcgtctaggactctgttctaaagcgcttgtggcgggagtttctggccaggatcgggcagggatcgaggcgcactcgagacccgttgaaaggtcgcagtcaaatcgtaacgacgacacgtaacggagcgcggttcaaggacacgcggctcagactcctcgctcagagtcgcaggcaacgaaaaagccgctgtgttcgggcgctaggcaagcccacgcctccgcccatcggcaactggaagttccagtcggccctgtggtccgcaagcctttgtgccactcacgtccacgcccacgccaagcgattgaaacgcgaaatggccgttaagcagaataacagcgaggcgggtgataatgcctcggataatgccggaggagctggcaacggcattccgcccaacgccaaacccatgtccgcgaacggaatggcgaatgccgaagagaacgtattgccaaagggcatggacacgggttcgcccgctggcgagagcctgaactccaaccgatcgggcaagcgggatattaaggccctgctggcatacctccaaagcatcgatatgccggagcaaggccacaatgtgatggccatctgcgagagggttatcgtggacttggcccgtctgcaaattccacgaggcgcatcctgtccacgcctaaaggaagacgtctgccaggtcggtgcctttctggctacgcgcaacgagaagttccaccaaatgttctacctgcgtgtcgtctacgagctgatcaccaagtcgccattcgagccaccaccctcgtgtgccgtggccattgtgttccagctgttcgactccacgcagatcctggaggctgtacactcgctgctggaacagaatgtgcaggactcgagcattaagaagacggtgaacctgctctgtgattggatcacgtactgcaccttttgcagcactctcaatctttgggtgctggcgctgctcaaggggctaagggatcagggcaaaatggcgctgctcgacgagattgcaatggacaacatcgagaagctgttccacgtgatgatctttccggcgctgaggcaaaaggccgcaccggttgtgtttcacatgctgtcaacgattaatcagacccccgaggtttttcacaagatcttgccaaggatcccacgagtcctgcagtatgtgaagaatcagtcgaccaccatggacgagattggcctggaaaccaagaaatgtctgcagcaactggtcgacctaaccagcgccctaatgctacgtttctatgatcaggatgagctctatgtcgcaaccaagaaagccctgcagacctatgagccctctccgaattgcgtggctctggcaaaggcaatgcatgagaatgcccagccgtggggtcggcggaatgcgagggttggactcgttaacctggggaatacctgctacatgaatagcgtacttcaggcgctagccatgaccagcgattttagcaggcaaatcctgcttatcgagtgcaattcagtgctgctcatgaaagtgcagcagcagattgccctgatgcatcactcgctgcgctacgaactaacgccttcgcgagtgctgaacgccacccggccgcctagcttcacgcccggcctacaacaggacagctccgagttcctaggatatctgctcgacctgctgcacgagcacgagatcaacagctcctcagtcactggtcacagtgttggtcctccgaagaccggcagggaagtggacgacgtgcccgcactgctgagcgaggatatattgtcgagcggcgttattccgtacaacagcaaggatcacgagctcagcagtggaagcaacagtgacaattgtaatcacaagcccacaccgacaccacccgcgactcccaccaaagccaccaacggcttaaagcagcagggccagcaggttgatcaggcgaagccaccatctaccattgacaagacgttcgctggcaagctttccaccacctatcgatgtttaaactgcggctgggagagccggaacgaggacagctttcgcgagctgcagctgtcttttcccgatgataaggaagactgtggagccaccaactactcggtgcaggatctgatcgagtactactgctcgcccgagaagctggacggtgacaatcaatatttctgtccacaatgcaagaagctttgcgatgcggagcgccacatcggggtcacccaggcaccgaagaaccttattctcacgctcaagcagttcaagtacgatcagaagtaccacttccgcaccaagctcatgcataaggtgttccacgatgagagcgtcacagtaaaaatgtcggcaaaggactcgctgcaggagatgtccactgtgcactatgatctgtatgcgggtgttgttcacgccgggtacagcatggattccggtcactactttacgttcgcggcggatcaagccaagaattggtacaagttcaacgataacgtggttacccactccaagccggaggagatgcacaatctcacttcgcccaacacgccctacatcctgttctacaagatgtgcggccactccaatgagtctaattcggttacggccagctgcagttcgagtatggtatcgggctcaaatgaccaggtggtctcggtgccactgtcgccgcctctgaagctggaggagttgccacgccgacttcgcgactacgtaagaaaggacaaccatgtttacaacgaagagttgaagatgcaacgctttaagcgtggcaacagcggtcacggcaatgcgtttgtcagccggcacaactttgatggcgatggtgacgaggacgacaaggcgccgccgccgcccggaggatgtggaggcaatggactgggcatgaacatcaaccgcttcgtcttctga

SEQ ID NO: 18849 - protein, 852 aa, DROSOPHILA
MAVKQNNSEAGDNASDNAGGAGNGIPPNAKPMSANGMANAEENVLPKGMDTGSPAGESLNSNRSGKRDIKALLAYLQSIDMPEQGHNVMAICERVIVDLARLQIPRGASCPRLKEDVCQVGAFLATRNEKFHQMFYLRVVYELITKSPFEPPPSCAVAIVFQLFDSTQILEAVHSLLEQNVQDSSIKKTVNLLCDWITYCTFCSTLNLWVLALLKGLRDQGKMALLDEIAMDNIEKLFHVMIFPALRQKAAPVVFHMLSTINQTPEVFHKILPRIPRVLQYVKNQSTTMDEIGLETKKCLQQLVDLTSALMLRFYDQDELYVATKKALQTYEPSPNCVALAKAMHENAQPWGRRNARVGLVNLGNTCYMNSVLQALAMTSDFSRQILLIECNSVLLMKVQQQIALMHHSLRYELTPSRVLNATRPPSFTPGLQQDSSEFLGYLLDLLHEHEINSSSVTGHSVGPPKTGREVDDVPALLSEDILSSGVIPYNSKDHELSSGSNSDNCNHKPTPTPPATPTKATNGLKQQGQQVDQAKPPSTIDKTFAGKLSTTYRCLNCGWESRNEDSFRELQLSFPDDKEDCGATNYSVQDLIEYYCSPEKLDGDNQYFCPQCKKLCDAERHIGVTQAPKNLILTLKQFKYDQKYHFRTKLMHKVFHDESVTVKMSAKDSLQEMSTVHYDLYAGVVHAGYSMDSGHYFTFAADQAKNWYKFNDNVVTHSKPEEMHNLTSPNTPYILFYKMCGHSNESNSVTASCSSSMVSGSNDQVVSVPLSPPLKLEELPRRLRDYVRKDNHVYNEELKMQRFKRGNSGHGNAFVSRHNFDGDGDEDDKAPPPPGGCGGNGLGMNINRFVF

SEQ ID NO: 18850 - DNA, 4574 bp, DROSOPHILA
aatcattatactcatccactcatacgaacgcaaactattattgtatttccatttacaaaattgttataatttttttgtttttgttaacacaaacctagttgtagaacgtgcatatatgcgaacacaaacatatttaattataaaaattaaaaaaaaaaaaaaacaatagaattagccagaaataggagcgatatacttgaatccgaagaccactaacttccaaaacactaaaccagaaataatgtctgcaccctagtttttaacgcacagctcgaaattaaatcatatctcgagttgcaatcgaactagcaagaagctacaaaacaagataatcgcggcattgacttgtatagatcgagatcgtttatagatcgggctataaccctcggatcgtattattagtttcactgttaattttagcaaatttcaaaaaatttgcgcatgtgcgacacgaatttgtaattgatatatataaatgtatctctttggatctggtgagcagaggttgcgatgaattttgaacgttattgcaattaaattggaataatttcaaggaaatttgtatatggtgtatgtctattgataaccaaaatctatactatgctatgctataagtgtatcaataaagaaaagaacaagcccaaagagtgtttaattattagagtcacgaaagagtttaatgtgaaaacaacaaaaatagtatccattcatggaagttactatatcaaaaagaaaagcaatgatcagaaaggaggatattatattcagttcaaacattagagaggaggcgtaaactagaattaaaaacttgacaggattattgaagtggcgaattgattttcttgccgccaaatttcaaattatagcgtactaataatcaaaagtcgggcctaagactatcgataatttagaccgcgcggcagtgttaccaaattaataagggaaattcaagtgttgttgtcagcaagggtgagagcccatttacaatctggtaacactgctagaaagcgccaaaattttacgtttattaggattaagactaattttattacaataaaatagaattgtacaaattccggcccctaggaaaggcaacccaaactgtgcggcaaagtaacgtccttgagaataccgcatcatgtcgttcttcggatccaacacgtcgctgggagcaacaagcacgccggccaaaagtgagtttccgtaaacaagacctcatgcccttttctccaaatatttgtggggtccatttccacttggtggaggcttcagcagcttcttggcgtcctgcaggctgtggatgcggatgtctttgggatctatgctggatgtgggacgggctacatggtgtcagtgttcttatgtggccagacaaagatgctcaccccttcttgtggaccacataggcgacgtatcccacaaaacctagcaggaggatcagcaatataaaaaccagagccattttccacgaccagcaggcgaccagagcttgaagcaaactaagggcagcttctgtagtattttggaacccgaaatctcagataagaatccaaggcagaagcatagttttcaaaacactgacccatttctggtcttcttatctcttttgttcagcaaccggtggcctcttcggatcgccgtttggaggcacagctgcaaccagccagccagcacccgctttcggagcacaggccacatcgactccggcttttggcgcccaaccggcgacttctgccttcggagcaggttccgcctttggagcaaccgctgcagccccggcttttggagccgccacaggaacttctgcctttggcggctccgcctttggcagtactccggcatttggtgcggcgacaaccacaactgcgggcacgggtttgggaggaggcggtttcggcggatttggagcagctccggcaacaagtcaggccggtctgttcggcgctccagcgactagtgcagcaccaccagcttttagcggattcggccaacaggcagctgcgagtacagcgccagcaagtggattttcaggctttggcacaaccacaacgtcggcacctgcttttggtggctttggcaccagccagtccactggctttgggggcggagccttcggatccagtaagttaaataagcccatttgtctttctgtggtattcctaacctggtttatgtttcagcgttcggaaaaccagcgaatacaacagttacgccgggatttggtggattcggaggcaccagttttatgcttggacagccgcaacagcagccagcgcccatatcggctgacgaggcgtttgcccaatccattctgaatgtatccattttcggggatgaacgggacaaaatagtggccaaatggaactacttgcaggctacgtggggcactgggaaaatgttttactcccagagtgcggcaccggtagacattacgccggagaacgtgatgtgccggttcaaggccataggctacagtcgtatgccgggcaaggataacaagttgggactggtggctcttaacttctgcagagaactctcagctgtcaagtaagtcttagtgcttgtctacatcatggcataggtattaattcattttattttaggccacaccagcaacaagtgattcaaacgcttcacagtttattcggcagcaagcccaacatgcttgttcacatagattccatcaaggagttggagaacaaaaagtgccaaattgttatttatgtcgaggagaaacttcaacatgctcccaacgaaagcaagcgtatacttgccaccgaactctcaaactaccttaatcaggcgacgctgaaaccacagctcaataatctaggtgttgtggaggctttggctctggtattacccgacgaagatcaattgagggagtaccttgaaaatccaccccgcggcgtggatccgcgcatgtggcgtcaggccaattccgacaatccagatccaactttatatataccagtgcccatggtgggctttaacgacttaaagtggcgcgttaagtgtcaggaacaagaaacggacacgcatgcattgtacataaagaaggtggagagtgagctgacagaactcaagaagcgccatgccactgccacagcgaagatacttgaacataaacggaaactggccgagctcagtcatcgcatactaagggtagggacacctagttaaatacccaactttatttttacattcagaaatccgcatttttcaaccacagataatagtgaaacaagagtgcacccgcaaggtgggcacttccctgacgcccgaggaggaggccttgcgcaccaagctacagaacatgctggctgtcgtctccgcacccacccaattcaagggccgactcagcgagctcctctcccagatgcgcatgcagcgcaatcaattcgcagccaacggtggtgccgagtatgccctcgacaaggaagcggaggacgagatgaagacctttctgacgatgcagcagcgcgccatggaggtgctgagcgataccgtcaacaaggacctgagggcgctggatgttataattaaaggactgcccgagctgcgacaatcgtgataggaatggaaatgagctgatacgttgaataaaacccacatatgtgtaacacaacccggtgattttcgatgatcgagacaacgaacaagttgtggccgttacacttttgccattatgtcgtcgtttagcatttcctgtagctttgaacttgcacttttacgggcaatggagtcgaaacaatcgaaacgagttcacacattcgtcgccaatgctgcggaaataattgtgtgggtcaatgcacttgcaccgcacagctcttggaccgcccgacttttcctcggccactgtctgaaattgtccaatttcgacggctaggcagaaggcaatcgctcggactcattatgagtggcaaacggttcgtctctggcagttccagtttgttcaactcccagcatcggtatcaccatcgttgttacattaacattattatgtgctctggcgtgtgcatacatgtgcagtctagttagttggctcgttacatatttatttcttgtgtgggaaactagttttctcccagtcaaccagccagccagggtccgtgcaggttttttgttggccattgatggcggagacttccgagcttccgtttggagcatgtagcgccagtataaatgaattggccagctccaaggaggcctcacatcgtttcagatctaagaaagtgaaggtggttcaattggagcactgcatatgaggagctgaaagtgaaacgttcagagctatgggaattaaattggacatgaatggtttattggttgtgagttgtttggcttgaccgctcaatgcgaaaatcggactaagttttcacatccttgcagttgtttttgtgcgccttttgctgcagcgtggtggccaaaccaccgacagctcggcgggcacagctgcacgacgatgtccagcttatccatccccacatcatcaccatagagcgtttagagaatttgctgcggcgtgctggggaaatctttggtccggctctagaggaagatgccatggcgga

SEQ ID NO: 18851 - DNA, 1971 bp, DROSOPHILA
ctagaaagcgccaaaattttacgtttattaggattaagactaattttattacaataaaatagaattgtacaaattccggcccctaggaaaggcaacccaaactgtgcggcaaagtaacgtccttgagaataccgcatcatgtcgttcttcggatccaacacgtcgctgggagcaacaagcacgccggccaaaacaaccggtggcctcttcggatcgccgtttggaggcacagctgcaaccagccagccagcacccgctttcggagcacaggccacatcgactccggcttttggcgcccaaccggcgacttctgccttcggagcaggttccgcctttggagcaaccgctgcagccccggcttttggagccgccacaggaacttctgcctttggcggctccgcctttggcagtactccggcatttggtgcggcgacaaccacaactgcgggcacgggtttgggaggaggcggtttcggcggatttggagcagctccggcaacaagtcaggccggtctgttcggcgctccagcgactagtgcagcaccaccagcttttagcggattcggccaacaggcagctgcgagtacagcgccagcaagtggattttcaggctttggcacaaccacaacgtcggcacctgcttttggtggctttggcaccagccagtccactggctttgggggcggagccttcggatccacgttcggaaaaccagcgaatacaacagttacgccgggatttggtggattcggaggcaccagttttatgcttggacagccgcaacagcagccagcgcccatatcggctgacgaggcgtttgcccaatccattctgaatgtatccattttcggggatgaacgggacaaaatagtggccaaatggaactacttgcaggctacgtggggcactgggaaaatgttttactcccagagtgcggcaccggtagacattacgccggagaacgtgatgtgccggttcaaggccataggctacagtcgtatgccgggcaaggataacaagttgggactggtggctcttaacttctgcagagaactctcagctgtcaagccacaccagcaacaagtgattcaaacgcttcacagtttattcggcagcaagcccaacatgcttgttcacatagattccatcaaggagttggagaacaaaaagtgccaaattgttatttatgtcgaggagaaacttcaacatgctcccaacgaaagcaagcgtatacttgccaccgaactctcaaactaccttaatcaggcgacgctgaaaccacagctcaataatctaggtgttgtggaggctttggctctggtattacccgacgaagatcaattgagggagtaccttgaaaatccaccccgcggcgtggatccgcgcatgtggcgtcaggccaattccgacaatccagatccaactttatatataccagtgcccatggtgggctttaacgacttaaagtggcgcgttaagtgtcaggaacaagaaacggacacgcatgcattgtacataaagaaggtggagagtgagctgacagaactcaagaagcgccatgccactgccacagcgaagatacttgaacataaacggaaactggccgagctcagtcatcgcatactaaggataatagtgaaacaagagtgcacccgcaaggtgggcacttccctgacgcccgaggaggaggccttgcgcaccaagctacagaacatgctggctgtcgtctccgcacccacccaattcaagggccgactcagcgagctcctctcccagatgcgcatgcagcgcaatcaattcgcagccaacggtggtgccgagtatgccctcgacaaggaagcggaggacgagatgaagacctttctgacgatgcagcagcgcgccatggaggtgctgagcgataccgtcaacaaggacctgagggcgctggatgttataattaaaggactgcccgagctgcgacaatcgtga

SEQ ID NO: 18852 - protein, 610 aa, DROSOPHILA
MSFFGSNTSLGATSTPAKTTGGLFGSPFGGTAATSQPAPAFGAQATSTPAFGAQPATSAFGAGSAFGATAAAPAFGAATGTSAFGGSAFGSTPAFGAATTTTAGTGLGGGGFGGFGAAPATSQAGLFGAPATSAAPPAFSGFGQQAAASTAPASGFSGFGTTTTSAPAFGGFGTSQSTGFGGGAFGSTFGKPANTTVTPGFGGFGGTSFMLGQPQQQPAPISADEAFAQSILNVSIFGDERDKIVAKWNYLQATWGTGKMFYSQSAAPVDITPENVMCRFKAIGYSRMPGKDNKLGLVALNFCRELSAVKPHQQQVIQTLHSLFGSKPNMLVHIDSIKELENKKCQIVIYVEEKLQHAPNESKRILATELSNYLNQATLKPQLNNLGVVEALALVLPDEDQLREYLENPPRGVDPRMWRQANSDNPDPTLYIPVPMVGFNDLKWRVKCQEQETDTHALYIKKVESELTELKKRHATATAKILEHKRKLAELSHRILRIIVKQECTRKVGTSLTPEEEALRTKLQNMLAVVSAPTQFKGRLSELLSQMRMQRNQFAANGGAEYALDKEAEDEMKTFLTMQQRAMEVLSDTVNKDLRALDVIIKGLPELRQS

SEQ ID NO: 18853 - DNA, 3837 bp, DROSOPHILA
taaaatttaaaattgctaaaatttgctaacaaaaaatggacagtaagaaattaatactttagggcttattttaaaacggttttttgaaagattttcgaatcaatagaataaaatttaattccacagagcaaaaatatttcttaagcctttgaaaaaattttagattgttttctaatagaataaaagataaacaagaacacaataaatatgaactcctaccgatttaacaattaaccgtgaacgacaataacaaaccttgggctacgtaaacctctaatcaggaatgcgaggtaacaaaaggatttacagcccgtaaatcttgttatggcacgttttaaatctgatgagtaatagaaacaggcgataatcgaattactgtggcacttcctgcacttttgtttagattgcgtgatttgtgttacagataccagtcaggtgctttgtattggcagaattttcctattacgacatatacatatatatgttttacagtggtaactagggattctcatttgcttcgatttagcagtgaacgatgaagattagataggtgcatttttgaatgccacttacatatttactccacttttaattattccctaattccctataaatgcagttaagtggattaagtatgtggtattagcgggaaaatctgtttcaaagctggttttagtctactgttaaactttcaaaacaaagcattggattgatgtatttttatggtaattgatgtattttgaaggtatggggatcctctacactttaaagcaggttataaaatagtcatgcccagggtaaatctatttgtgcactatctttagcagtcacagataagatggtacaggtgttagccacttgcattgaatccactcaaggtgtctatcgaaactggaatcccagagttctggctccttataaatagaattgcactcacctgcgatcaccacactccgttgcattttctaacggcgagcaagtttttcgaggaaaccacaacatggccatgataccaaccacctacaacgaaaaggataatatctggagtggagccaagcgtaactccatctacaactatgacacctccgtgggcaagatcatcttcaacaacatgaagaactggcccaagaatgtgtgccaggtgagcaaggattctctttattaagtgtatatatcaacataaactttcgttccagatatgtgatgtagatggagtgactgtcaccttcgagcagggtctcacctggtccatccggattgcgcagtaccttaagaagaggggtcttaaccacaaggatgtcattggaattgcagccaaaaactcaacctatgtgatgccccttggagtggcctgtttgatgaatggcaccccattccattcggttaatcctgtgctagatgatggtaagtacagtaaagtgggaaattgtattaaaatgaaattaattcatttgttatagcaaccttgacgcatgtgttttcgatcacaaagcccacactgatattttgtgatggacaagagtacgataaagtgcataaggctacggtaggatggcatccggaaatccttaccctcacggatcatgtggaaggagtccagggcatcgagaccttgctggatcccaccactacagaaaagatatatcagtaagtatgagaaagtttaaaaattttataaacttgacaacgttccgtgttttctcgtagaccggaagtgttgaaggaaggaggtgatcaaaccgtagccatcctatgctcctctggaaccactggtttgcccaaggccgtctgcatttccaacagcattctgatccaagacagcatgtaagtctatcttcataatgatccgattataccacttagggtctatatatcttatcaggttgatcaccagtcagtcggttatctatgtaggaagctgtctggactggatcacgggcttgtgggcctttgtgttcagcaccgtattcggttgcacccgcattatcagtaacaaagccttcactccggagtactttgtgggactggtgaagaaatacaagatcaactatgctgtgctgccgccgcgtcatctgtccgctctgatcacctgtccggatgcgaagccggatgcactggctcccatcacgcacctcaactacggcggaggatcgatatcgttggccaccctgcagcggtcgcaggaactctgcaagacagccatgttcaattcgggatacgggatgacagaggtgggcgccatcacgatcaatatcggaatcagcaacgtctcgtccgcgggcaggcctgtgccgggcattaagattcgtatcgtggatgaggatggcaagagcttgggctacaaccaggtgggagagatctatgtgcacacgggtcaggcctggaacgggtactacggcaatcccgtggagacgcgacgcatgcaggacttcgagggttggttccataccggcgatctgggctacttcgatgagcagaacttcctgtatatagtggatcggaagaaagagatcctcaagtacaatggccttcactattggcccacagagatcgaaaccgttatcgcggagctctcccaggtgcaggatgtctgcgtggtgggaatctacgacgagcgggagggtgacgccgccggtgcactggtcgtcaagagcaagggcgccaccatttcggccaaggagatcgtggagcatgtggccaagcgattgcccgccacccagaagcagctgagagccggtgtccagttcaccgacaaactgcccgccaatgtcaatggcaagaccatgcgaaagacggcacgcgacgtgtttgtcgccctgcgcgtatctggaaagtgagatacaagtgatccgcgcgatcgagtatagtgttaatcacaagtgccgagagatacttgagacacttactataagaggaaaaacagctcaagcacccttactgcgaaggggttctcgacgagaaggggtgacctttggatcccaataaattttatagtacctgcgaatggttataatccccattttatatttgtttttgagaccgtaagtttcgggtttcagaaagaatactcctctgtggtatgttaggcgtgataagcgtagtcacgaggattaattattgtggcactaacataatcaaatatagttaattgattagatagaattacaatatgattcatgcacgtgtcatcagcaaacgttcatctaatgaatcttatattatctattgttattccaaaggagtcaaagcgtatttaaatttaacatcatcttatcacttaaaattaccgaaccacctgagataacatgagatatggagcctggggcagatggtgctggtcttatgttacttgaagtttttgataaatacgatctatgcttgctcagacggccagaagtacttttgatttcagctggaaaggaaagctctaagcatcagcatctatgatgagcagcagggcgatgctgctggtgcactggtggtgaagcgtaatggttcctcaattaacgccgtggagattgcggatcatgtggcaaagagacttccctccattcaaaagcagctccatgctggtgtccagtttacggataaactaccagccaatcccaatggaaagacacttcgtcggttggcgcgagaggatttcaatgcgaaaaaggggtctgtgaaataagatttcagtaaccctcctggtaaaattaaaaattaacttatagtgtcaaatgagaattttgctgtacaaaattgttatattgtagattaaaaacaagagagaatgctatagtccatttccctgactatcagatacaccttacttgtctggaataaatatatggg

SEQ ID NO: 18854 - DNA, 1608 bp, DROSOPHILA
atggccatgataccaaccacctacaacgaaaaggataatatctggagtggagccaagcgtaactccatctacaactatgacacctccgtgggcaagatcatcttcaacaacatgaagaactggcccaagaatgtgtgccagatatgtgatgtagatggagtgactgtcaccttcgagcagggtctcacctggtccatccggattgcgcagtaccttaagaagaggggtcttaaccacaaggatgtcattggaattgcagccaaaaactcaacctatgtgatgccccttggagtggcctgtttgatgaatggcaccccattccattcggttaatcctgtgctagatgatgcaaccttgacgcatgtgttttcgatcacaaagcccacactgatattttgtgatggacaagagtacgataaagtgcataaggctacggtaggatggcatccggaaatccttaccctcacggatcatgtggaaggagtccagggcatcgagaccttgctggatcccaccactacagaaaagatatatcaaccggaagtgttgaaggaaggaggtgatcaaaccgtagccatcctatgctcctctggaaccactggtttgcccaaggccgtctgcatttccaacagcattctgatccaagacagcatgttgatcaccagtcagtcggttatctatgtaggaagctgtctggactggatcacgggcttgtgggcctttgtgttcagcaccgtattcggttgcacccgcattatcagtaacaaagccttcactccggagtactttgtgggactggtgaagaaatacaagatcaactatgctgtgctgccgccgcgtcatctgtccgctctgatcacctgtccggatgcgaagccggatgcactggctcccatcacgcacctcaactacggcggaggatcgatatcgttggccaccctgcagcggtcgcaggaactctgcaagacagccatgttcaattcgggatacgggatgacagaggtgggcgccatcacgatcaatatcggaatcagcaacgtctcgtccgcgggcaggcctgtgccgggcattaagattcgtatcgtggatgaggatggcaagagcttgggctacaaccaggtgggagagatctatgtgcacacgggtcaggcctggaacgggtactacggcaatcccgtggagacgcgacgcatgcaggacttcgagggttggttccataccggcgatctgggctacttcgatgagcagaacttcctgtatatagtggatcggaagaaagagatcctcaagtacaatggccttcactattggcccacagagatcgaaaccgttatcgcggagctctcccaggtgcaggatgtctgcgtggtgggaatctacgacgagcgggagggtgacgccgccggtgcactggtcgtcaagagcaagggcgccaccatttcggccaaggagatcgtggagcatgtggccaagcgattgcccgccacccagaagcagctgagagccggtgtccagttcaccgacaaactgcccgccaatgtcaatggcaagaccatgcgaaagacggcacgcgacgtgtttgtcgccctgcgcgtatctggaaagtga

SEQ ID NO: 18855 - protein, 535 aa, DROSOPHILA
MAMIPTTYNEKDNIWSGAKRNSIYNYDTSVGKIIFNNMKNWPKNVCQICDVDGVTVTFEQGLTWSIRIAQYLKKRGLNHKDVIGIAAKNSTYVMPLGVACLMNGTPFHSVNPVLDDATLTHVFSITKPTLIFCDGQEYDKVHKATVGWHPEILTLTDHVEGVQGIETLLDPTTTEKIYQPEVLKEGGDQTVAILCSSGTTGLPKAVCISNSILIQDSMLITSQSVIYVGSCLDWITGLWAFVFSTVFGCTRIISNKAFTPEYFVGLVKKYKINYAVLPPRHLSALITCPDAKPDALAPITHLNYGGGSISLATLQRSQELCKTAMFNSGYGMTEVGAITINIGISNVSSAGRPVPGIKIRIVDEDGKSLGYNQVGEIYVHTGQAWNGYYGNPVETRRMQDFEGWFHTGDLGYFDEQNFLYIVDRKKEILKYNGLHYWPTEIETVIAELSQVQDVCVVGIYDEREGDAAGALVVKSKGATISAKEIVEHVAKRLPATQKQLRAGVQFTDKLPANVNGKTMRKTARDVFVALRVSGK

SEQ ID NO: 18856 - DNA, 2622 bp, DROSOPHILA
aggcaccaattaataaaaaaaaaacgaaaacccaacccaactggcacgtgacttttgctgactagtgtagacacaattacgttgctattgttgcactcgttgactgctgtcaaatcgcacgcgaaatgtgaaggccggcgttgcaatcaagatggcttcccccgatcctccggctacttccctccactccaatattcatatcttctacccagccaacttatttccaacttcattcatattcattcatgtgcccgggtctccgttgctcattcatgctttattcgcctcaatctctgatggaaacaataattcatattcgacacaattaagttgaggcaaacagaaatattaatacaaatgtagttttaaaattggtaagcatacaagcggttatccaaatgagtaaaaataattacatctttttgctagaaacgatttgcgtgttgcgaaaattaactaaaccgacattttgtaatcacattaggcaaaggggtcggaaaataaaggacggtttcagttaatttattcactgactactcgaatttcactagttataatataaaatgtgtctataagcgatattagcatttatatcttcatatgcttgaacacgaataaacacttagcgcccccaactgtgtcttatgccagtttgtcggctactttcagccatcgcaaagttgctcttaattatacctgttaatggtggagtaaaagggtatactagactaattgaaaagtatgtgtttctgacccttcaaagtatatatattcttgatcaggatcactaacacagtcatgctggcaacgtccgtccgactttccgtctgtctgtccgtataaacgctgtgatctgcttggtaaaattggactattaaaactaaattcattgggatgctaagaaattcattcaattatagcgttctaccgcattgcttttgccacggaagctgttacagttctgtcgcacagatcatcgttgaaagttgccaaaatcgaaatgtctttgaagctggtaaaaccatctagtgatatatccagcaagtgatgtgatctcattttgcgagtgttttcagttctcctgccttttcgtgctcaccctggctgccatcgcctgtgagggacagcctcaatacaatccctatctgcgcaatccctactacagggatctctactacaggaaccgcgatctctacaatctacgacgtttctacgatggcttctacaagaagtacaatccctacatcgccgctgcccaggctagaattgtggagcaaaacaatgatgtgaactacggagcgggctcctattcctacaactatgagacggagaacggcatccatggcgaggagcgcggagtgccagtgaacattggaaaccagcagcaggaggagcaagttgagggtgcttattcgttcattacacccgagggtctgcgagtgggagtcaagtacctggctgatgccaatggtttccgtcccgtgatcacctgtaagtatccatactccagactccatataatagccttgatttatgaaacatttctaatagatgatggtgtgaactccgctttttatgccggacagccagcccctgccaatgtagtctatacaaaacactaagtttgagttcaaactatacctaactagttgagtgaaaatagtgtgtgttcagccttcttaaattaaatatataaatactacaaatattaaaatacgagtatcttttttcttgaaacctagaaaagcctatgatcaccataccgcccacaaaacaaaaaagctgccacacccacagttttgagaaacgttttaactttgtttttggttactttttttgttggtacaaacaatgagttaaaatatctctctactagtctactactatctctaattctactagttgagtggttggtatctgatagtcgagaaaatcgactattgcgttttctgttgttttctttttgtacagattaatgttcattaactttagctaacttacgcctcaaaagctctttttttaaaccccagcgtaaaagtgtgctacgaaaagaattcaatctaaaatagaaaatagaatattttaaaactattattcaactaatggttaattactagttttattttacacaaaattattgtaattaccatatattttattgacaagaacttagtaagtgaaatcaaatgagtaatatcatataattataatctttactgtactttagctttccagtacaaggtcagactttaaatcatattctagaaattgggtcaattcctgcttatcggaaatgtgtatatatgtatatttgtaccaaaatacaaaattttttctgcgactaccgacaacaagtgcttagattaagacttgtttttttttcttctcgccattgcgggatcaaaaaacccattaatttttaaacgccgcccgtatattgtgtattgaaaatgctcaatacatatgtgtagatgtttgccaaaatgtcagacactttcattatcaactgcgttttggcctttgaaaccaaaaatgccgttcaactcaagggcctttggtggtctttgaattcctgagctcaaaattcttggtaatttataacaaatatttagtaggttttat

SEQ ID NO: 18857 - DNA, 501 bp, DROSOPHILA
atgtctttgaagctgttctcctgccttttcgtgctcaccctggctgccatcgcctgtgagggacagcctcaatacaatccctatctgcgcaatccctactacagggatctctactacaggaaccgcgatctctacaatctacgacgtttctacgatggcttctacaagaagtacaatccctacatcgccgctgcccaggctagaattgtggagcaaaacaatgatgtgaactacggagcgggctcctattcctacaactatgagacggagaacggcatccatggcgaggagcgcggagtgccagtgaacattggaaaccagcagcaggaggagcaagttgagggtgcttattcgttcattacacccgagggtctgcgagtgggagtcaagtacctggctgatgccaatggtttccgtcccgtgatcacctatgatggtgtgaactccgctttttatgccggacagccagcccctgccaatgtagtctatacaaaacactaa

SEQ ID NO: 18858 - protein, 166 aa, DROSOPHILA
MSLKLFSCLFVLTLAAIACEGQPQYNPYLRNPYYRDLYYRNRDLYNLRRFYDGFYKKYNPYIAAAQARIVEQNNDVNYGAGSYSYNYETENGIHGEERGVPVNIGNQQQEEQVEGAYSFITPEGLRVGVKYLADANGFRPVITYDGVNSAFYAGQPAPANVVYTKH

SEQ ID NO: 18859 - DNA, 4448 bp, DROSOPHILA
gcgctccttcatcgccttctccatgctttcgcaagcctgcagcctagcatggtgatccttgagcgcagcaaagtggatggactcgctgctggatctgaagtgagacatgtgagtcctttaggatttcaggtaagaataatatgtaaaattaatgctacctggtttgctggcatatgaggagcagcttggaacgccacgaactctgttcgtcgctcatgttttagcaattctgtttacaacgttctgtttagtttttgaacaaaattaaaaagtaaaactcccggcaaatacagcaatcatctgtttagccaagtttcagccaagatcgctggtatcgttatcgatatactgttacagcatgtttccacttgtttgcagtacttccaatcgttaatcaaattgtaagcaaatcgttatcacatgtattgtggttatcgagttcaaaattaaaataaactttaagattatttattttgttatttatgctcgctttgtatattcatttttatattttttagcttctttatgctttttctctttagcctttcagttaaattgtttcttccaattaatgttcaattgccttcaattggttcgcttctttttaattaaaaagcattgtgtgccaccctcagatttcactataaacaaaactagctgccacggcagacgtcctcagatcttatcgccaaatcgttctgtatgctcacgttgggcaaatatatatctgcatattgctcatcccggccatctcaactacacgaaaacacgtccggacacagtctacggccgtttcgtggccggtggatagggttcaactggtggcgcatagtagcgttgttatctctggacgagggttagataaaggcaccgatgccatgcccataaataccccacagcatccattaactgattctcatttcagcagtcagtgcagtgaattgcaggtgttttcccccaggtttcctcattggattttggatacagaagctatataaaaatgtgcctgcccaaaagagtgggtggtccggccatccagagtgttgccacggctttaggtgagcttcacaggattgactcttgctttaagagaaagaagtagtttcagcacaaattgcatactaatattagtattagttggccactagatgtgcgctctactctctctgtacgtaataaaatgctccaatgttttttttttttaccccattccaggcaacattctctgctttaactttggcctcatgtttgggattactccggcgcacatgacgctttacgagtcggaggagaggaccccgttgaaccaggccaccgatccggcgggaactgcatggctgacgggatacctcttcctcagtgccgccttgggagccctggtctccggattcctggccctgaaaatcgggcccaagtcagtgctcctctgctctggcctgctccaaattgtgagtaaaatgtgaaactagaatgggaagggggcatgtgaaggccaggggtaggcggacgtcagtattaacatcaattcctacacacatggttcgttgaatcggaaaatttgcatgtatatcgacatttttttgtacaatgtgtggaatttaaattaacagtgtgtcgcattttttgaagtggaagagaacactgttagaaaaattttatagtgaattgtaaatatctccatatatttaaaagacgcatgacctagtacaagacatattaaattgccccattaaattcacgaatatattccaatacaggaagaaacttatagttgtgatgtctaaacatccaagtcaaagcataaatttaaatttaaattcatgtgaaagccagtaaaattatttatcttactaagtatttaaatcagtgaacggaaaatattcgactttttcatggaaataaaactgaataccacaactccttccagtcgggttgggcctgcatccattttggctacgacatcgtgcacatctacgcctcccgtttgtttgcgggcgtggcatccggtgccgcttttgtagtgcttccgattttcatcaacgaaattgccgagtcgcgcgaaaaggcagcccgcctaacattcaccattgagctgtggcgcacgctgggcatcttgattggatttgtcctgggcttctatgtgccctacgccttcgtgaacatcgtcggctgtgcggtgtcctttgtgttcaccatgacgttccccttcgtccaagagagcccccactactatctgcgcaagaacaacatggccagcttggagaagtcgctgcgctggtatcgcggcatccgcgacatcgatgatcgcgagaagccggagtatctcagcgagctgaacgagttccacgcggaactgaggagcagggacaagaacgtgggctccacgccaatgtcgcatggctatatcatacggctgactttcgtcagcttcctactgaccgtgtgcgccaaactgagcggcgtgttcgtggagctcaactacgctgccgactttctcggccgcaccggctattccacggaaaccaattacgtggttttggccagcgcccagtgcgccggagcgctcctcgcgcggctcgttggtccgcgtttgccgcgaaaggttggtgtgcaattaaatcacaatgtagtgaacatgattagattcatgcttgttgaattcttgcatcaagaacacccttaacactgctcaccttcaattcatttccccttttgcagctcctgctgtgcctctcctcgctctttgctgcggcggcagtcattgcattggctctattcaaggcttacggacatctttggctgctgggcaactgggcagatcggtatctgcccattattctgctggccattcagctggctcttgtcagctttggcctttatcccctggccgcagtcgttagcagcgaagttctgcccacgaaggtaatccattaggatattactatgtcttgacttggcaaactgcctttaggaaactatgtacatttgtgtaccaccaccccattatgtaaagccaccgtgttaagttcaattagactaaagcgttaattctaaatttaacacctgctgttagcatttaattgactgcaatccccttacagctccacgacttgctctactcattggcatccgccgtttcgtggcttctgctcttcggcatgatagaggtgggtgtacccgaagtgagtccctgcggaaggagtctattaacgcggattatttgcaggcattcaatgcggttaaggccacaattgcccccgggctgcttctctatctgtgggtctttgccggagcctcaatattcgtgggtcttatctcgctgccacttctgccggaaacccgcaatcgtcgtccttcggcggtgcagcgggaactgggctatgtggacgatggcggagtggccaagggatcggcggttacgaacggacacatcgccacgcacatctaagaggctcgagaaatccctcctattagctttaccaacgatattagtaacgaatttagtcttaatacgccccacagcacttatttaataaacaagtaataaaaaataaagcactttccagctcttatttctccaagtgatgctgctcaccgcattccacccacaaaagtatgcaacgaattgcttggatcagatgattaattcgtgattactcatccggctggcaacggcaagatccggaatccaaaagagttatatgtcgcgcacgtcacttgagttctgagttaccagctttatctcttaccccgaatcttgttgtttggccacgggtcttatctgccttacggtctttggccatatacatttaccccaaggggggaataacttgtgataaaacttacggtcagtgggcttcgcctgcgattatgtggagaagtctgaagaggtagcattcggtacacgtgtaactactgaagacagcgaggaagttcatttcatgtcaactcatccgagttgagcccctgtctcatgctttgtgtacaatctaatcaaagttatactccaggccaataaaagaggatgagtttaccacttgttgctcctcatatttaaatatgtctctatttgcattgggtgcattgagggaatttgggaatttcacggcgccaatctcaccgaaacacgcatcattcttgcgtggaaatgatcccatttaattcgcagcagcctctaatccaaatttacgcgtttacggacgaccaagctggcccaaaatgttaaatgcgcgacttttgtttgcgctgggtatctcgactagccaaatattagccacgattaggccgcacgagtaatttacaatggtggctctctcttctcgcctctgattagtagacattttattgagagggagagaatgtgacagtcctcccattgaacgcatatcaaatcaggaaaaagcaaacaaaagctgtaaaaaccattgtaatcgtcagagggttagcaa

SEQ ID NO: 18860 - DNA, 1458 bp, DROSOPHILA
atgtgcctgcccaaaagagtgggtggtccggccatccagagtgttgccacggctttaggcaacattctctgctttaactttggcctcatgtttgggattactccggcgcacatgacgctttacgagtcggaggagaggaccccgttgaaccaggccaccgatccggcgggaactgcatggctgacgggatacctcttcctcagtgccgccttgggagccctggtctccggattcctggccctgaaaatcgggcccaagtcagtgctcctctgctctggcctgctccaaatttcgggttgggcctgcatccattttggctacgacatcgtgcacatctacgcctcccgtttgtttgcgggcgtggcatccggtgccgcttttgtagtgcttccgattttcatcaacgaaattgccgagtcgcgcgaaaaggcagcccgcctaacattcaccattgagctgtggcgcacgctgggcatcttgattggatttgtcctgggcttctatgtgccctacgccttcgtgaacatcgtcggctgtgcggtgtcctttgtgttcaccatgacgttccccttcgtccaagagagcccccactactatctgcgcaagaacaacatggccagcttggagaagtcgctgcgctggtatcgcggcatccgcgacatcgatgatcgcgagaagccggagtatctcagcgagctgaacgagttccacgcggaactgaggagcagggacaagaacgtgggctccacgccaatgtcgcatggctatatcatacggctgactttcgtcagcttcctactgaccgtgtgcgccaaactgagcggcgtgttcgtggagctcaactacgctgccgactttctcggccgcaccggctattccacggaaaccaattacgtggttttggccagcgcccagtgcgccggagcgctcctcgcgcggctcgttggtccgcgtttgccgcgaaagctcctgctgtgcctctcctcgctctttgctgcggcggcagtcattgcattggctctattcaaggcttacggacatctttggctgctgggcaactgggcagatcggtatctgcccattattctgctggccattcagctggctcttgtcagctttggcctttatcccctggccgcagtcgttagcagcgaagttctgcccacgaagctccacgacttgctctactcattggcatccgccgtttcgtggcttctgctcttcggcatgatagaggcattcaatgcggttaaggccacaattgcccccgggctgcttctctatctgtgggtctttgccggagcctcaatattcgtgggtcttatctcgctgccacttctgccggaaacccgcaatcgtcgtccttcggcggtgcagcgggaactgggctatgtggacgatggcggagtggccaagggatcggcggttacgaacggacacatcgccacgcacatctaa

SEQ ID NO: 18861 - protein, 485 aa, DROSOPHILA
MCLPKRVGGPAIQSVATALGNILCFNFGLMFGITPAHMTLYESEERTPLNQATDPAGTAWLTGYLFLSAALGALVSGFLALKIGPKSVLLCSGLLQISGWACIHFGYDIVHIYASRLFAGVASGAAFVVLPIFINEIAESREKAARLTFTIELWRTLGILIGFVLGFYVPYAFVNIVGCAVSFVFTMTFPFVQESPHYYLRKNNMASLEKSLRWYRGIRDIDDREKPEYLSELNEFHAELRSRDKNVGSTPMSHGYIIRLTFVSFLLTVCAKLSGVFVELNYAADFLGRTGYSTETNYVVLASAQCAGALLARLVGPRLPRKLLLCLSSLFAAAAVIALALFKAYGHLWLLGNWADRYLPIILLAIQLALVSFGLYPLAAVVSSEVLPTKLHDLLYSLASAVSWLLLFGMIEAFNAVKATIAPGLLLYLWVFAGASIFVGLISLPLLPETRNRRPSAVQRELGYVDDGGVAKGSAVTNGHIATHI

SEQ ID NO: 18862 - DNA, 3896 bp, DROSOPHILA
taagataatgaggtaaatcctgattctggccgggcatatggctcccttaaacattatactgccccgattccagctctatatattaaccatatatctatgtgtgtatacatatatccaattccatacaagtttccattgttcgtttttgtaaacagtgaaatgtttacgagttgaacagtaaagtcatttgtttaaacaaccttttccagaacagcgaagtattatgcataggcttcctttggcttttcttcgttatccggaaatacacgtttttcccaatacaataccgtatattgtcattatttgctgaattttagtgcaattttcagttactttatttgttttgggaccaatataatgatcgcggtttcctactctatgtatgcactttggagaaaagttctacatttcgaatatagattccatatttcctatgtgcctttatgaatccatctatccatgagtcacacacaggtgtggacttggcctatctgggaatgggacggctcaattaattgccgagtcattaaacctgagatgtgtgaaaagaactacaactatgagtactatatttatttttattaaaattgtcaccaatttcatttattattgtagataagtaatgctaaatactattcgaaatcatgagactttgtggcatgaaaacacgaaataattcaagacacataaatagaaattttccgtttcgatatgaaacgttcatatattgcgtaaaacccattatatccataaaatgaattgccgacttaaatgactgaattaccaatcataaatccagaacgaggtattttgacccaattttatatttctactgatttgttgtttattttttacttttgctatataaggtcttataaaagttgcctgataaaccagtttaaattgcaaataaaccacattcatgagtgccttccttcatttaagtatatttaacatgaattttcaatgcatttatttcatttttgttatcgtttcaacattccagagcaataacacatgggccagggcaaagtacacagccaccaacacccgcagttccaattctgagtcctagtagctgagcttcttcaggcgcacattccttagaattccacaaaatggcgaagagcgtgccactgacccaggccattggtggttacattttcggcattctccaggcctgcattcgctttgttttccggctgatctatggccaaaagggtgagagtgttccaccgatcacagatgccattctcttggagtccgccacatcgttggcacggaaaatccgcaaacaggaggtgagtgtgtgcaatcgtttcatctacaaaacacctaactttcactcatcttgagcagctgagcagcgtccaggtcttggaatcatttatccggcgcatcaaagaggtgaatcccattctcaactgtgtcgtggatgaacgttacgatcaagctctcaaggaggcagccgaagcagatgccctgatcaagtctggacaatacagcacggaggagttggagaaggagaagcccttcctgggcgtgcccattaccaccaaggattgcatatccgtcaagggtgcgtagctcccataagtttcttaattggattaccattgctatagctcaatcatgtgtttggctttaggcatgctgcacacagctggactcttcgaacgtcgggatgtgcgtgctgcgcgggatgcggacgctatggccttgatgcgcaaggcgggagccattcccatagccctcacaaatgtttccgaggtgtgcatgtggtgggagagcaacaatacggtgcacggcaggacaaggaatgcctacgacactaaccgcattgtcggtggctccagcggtggcgagggctgcatacagtcggcggctgcctccgcctttggcttgggctccgacattggcggctccattcgcatgccagcctttttcaatggcatctttggccacaagcccagcaagttggtcgtctccaatgtcggtcagttcccagcgcccttcagtgccgagcagaactccttcctcggcctgggacctatgtcacgatttgccgaggacctgcgacccatgctaaagattatggctggcgagaaggcggccctgcttaatctggacgaggatgtggacctaaccaaaatgaagttcttctaccaagagtccgatggcggcggccgcttggtttccgccgttgatccagacttaagagaggtaagataaatgaccttctttcttaattaaatcctctaatctgaaatctttcttgctgcaggccatgaaccgcgtggcacagcacttgagagagaagttcggcaatcagaaagtggagcgcatccagctgccccacttccggcagtcggcggccatttggtttgccaacatgcgcgacgacagtggccatggattcgcctaccagctaggcaacctgaatcatgacatcaacacgtacctggagctcttcaagtggttcttcggcgcttccaagcacacattcattggcctgtcgacagctatcatggatagtgcacagtgcaagcacggatctcccaagtacgatcatctggtgcgcaaacgaaatgagctgagggaggagttgcaaagcctgctgggcgataatggtgtgctgatctatcccacgcatcccacggtggctccataccacaatgagcccattacgcgacccattaactttgcctacactggtattgtcaatgtgctgggcttcccggccaccgctgtgccgctgggcaagctgggcagcgagggtctgccactgggtgtccaaatcatcgccaacttcaatcaggatcgactttgtttggccgttgccgaggaattggagcgagcctttggcggttgggccaagcccgaagttcggctctaggagcagtctcaaacgtgcaagtatgcagcttagctagcttttagatagtagtggtcaggttaacgtcctggtctccccccacccattactaactacccctacccacccgagcattcgcctggcgatgaaaggtattccttgtgtactccagtgcctcattgtaatatcaattttcgatgtggatttatctattttgtatgtgtttttaaatgtaatctaatcatagatccgcgcggatccgttcccgttttgcatttataataaataattgcaaccaactgatatctttgttttcattaattggcgacaggcgcccattgaccaaacaagcagagaagtcagaattctgaattcgaagccaacgcgttttgtggctaaacaaatctttattttgaaagaccaaccttaaaaatatgccgactcaccgcctcaattgcttttagtttgcttttgttttttaaacattttcattcggcaaggaaaactaaacccactacaactagcgatatcatggatatcgtattcacatatgtaattccgatgctcctctcattcttcggcaacgagttacattcgtaatttggtcacttaaaaactactcggctgtgggcggttcggcagggcaatcctcgctagcctctagcccttgccgcccagcgacaggatgagtttcagtagctcggtgcgcttcgccttcacggtgtcgatgtgcagcgacggcagtccgtcgatcacctcgtatctgtttaggtaatcggcaatgtggtcggtcatgcagataacatggatgccacagtcgtagccgttcgcctgctgtaggcagcgcatgggccggaatttggccattcggacgccaagcaggtccttgatcttgttcatcagctccagggagttgcccgtgttgttgttcccatacgaatcgaagtgatagaaggtcttctccggacgcgagaagaccaacagtgaccagtggctgccaccagcatcggtggtttcgttg

SEQ ID NO: 18863 - DNA, 1708 bp, DROSOPHILA
ttccagagcaataacacatgggccagggcaaagtacacagccaccaacacccgcagttccaattctgagtcctagtagctgagcttcttcaggcgcacattccttagaattccacaaaatggcgaagagcgtgccactgacccaggccattggtggttacattttcggcattctccaggcctgcattcgctttgttttccggctgatctatggccaaaagggtgagagtgttccaccgatcacagatgccattctcttggagtccgccacatcgttggcacggaaaatccgcaaacaggagctgagcagcgtccaggtcttggaatcatttatccggcgcatcaaagaggtgaatcccattctcaactgtgtcgtggatgaacgttacgatcaagctctcaaggaggcagccgaagcagatgccctgatcaagtctggacaatacagcacggaggagttggagaaggagaagcccttcctgggcgtgcccattaccaccaaggattgcatatccgtcaagggcatgctgcacacagctggactcttcgaacgtcgggatgtgcgtgctgcgcgggatgcggacgctatggccttgatgcgcaaggcgggagccattcccatagccctcacaaatgtttccgaggtgtgcatgtggtgggagagcaacaatacggtgcacggcaggacaaggaatgcctacgacactaaccgcattgtcggtggctccagcggtggcgagggctgcatacagtcggcggctgcctccgcctttggcttgggctccgacattggcggctccattcgcatgccagcctttttcaatggcatctttggccacaagcccagcaagttggtcgtctccaatgtcggtcagttcccagcgcccttcagtgccgagcagaactccttcctcggcctgggacctatgtcacgatttgccgaggacctgcgacccatgctaaagattatggctggcgagaaggcggccctgcttaatctggacgaggatgtggacctaaccaaaatgaagttcttctaccaagagtccgatggcggcggccgcttggtttccgccgttgatccagacttaagagaggccatgaaccgcgtggcacagcacttgagagagaagttcggcaatcagaaagtggagcgcatccagctgccccacttccggcagtcggcggccatttggtttgccaacatgcgcgacgacagtggccatggattcgcctaccagctaggcaacctgaatcatgacatcaacacgtacctggagctcttcaagtggttcttcggcgcttccaagcacacattcattggcctgtcgacagctatcatggatagtgcacagtgcaagcacggatctcccaagtacgatcatctggtgcgcaaacgaaatgagctgagggaggagttgcaaagcctgctgggcgataatggtgtgctgatctatcccacgcatcccacggtggctccataccacaatgagcccattacgcgacccattaactttgcctacactggtattgtcaatgtgctgggcttcccggccaccgctgtgccgctgggcaagctgggcagcgagggtctgccactgggtgtccaaatcatcgccaacttcaatcaggatcgactttgtttggccgttgccgaggaattggagcgagcctttggcggttgggccaagcccgaagttcggctctag

SEQ ID NO: 18864 - protein, 529 aa, DROSOPHILA
MAKSVPLTQAIGGYIFGILQACIRFVFRLIYGQKGESVPPITDAILLESATSLARKIRKQELSSVQVLESFIRRIKEVNPILNCVVDERYDQALKEAAEADALIKSGQYSTEELEKEKPFLGVPITTKDCISVKGMLHTAGLFERRDVRAARDADAMALMRKAGAIPIALTNVSEVCMWWESNNTVHGRTRNAYDTNRIVGGSSGGEGCIQSAAASAFGLGSDIGGSIRMPAFFNGIFGHKPSKLVVSNVGQFPAPFSAEQNSFLGLGPMSRFAEDLRPMLKIMAGEKAALLNLDEDVDLTKMKFFYQESDGGGRLVSAVDPDLREAMNRVAQHLREKFGNQKVERIQLPHFRQSAAIWFANMRDDSGHGFAYQLGNLNHDINTYLELFKWFFGASKHTFIGLSTAIMDSAQCKHGSPKYDHLVRKRNELREELQSLLGDNGVLIYPTHPTVAPYHNEPITRPINFAYTGIVNVLGFPATAVPLGKLGSEGLPLGVQIIANFNQDRLCLAVAEELERAFGGWAKPEVRL

SEQ ID NO: 18865 - DNA, 4788 bp, DROSOPHILA
gagacgtgggatctgtggataggtacagaatgagcaaatgcagagggtaagcactaaatcataatacctattagcccgtaagacaataatttgttaaccgaggccaaggctagactagtcaacggacccgtggcgtccgccgtgcgaatcacctcaagaaacggagccaggaagacctgaggctcgatctgacgcaggtcctcgatccgatttagctcatgcttgaggtcaatgaacagcttcagcagcgagtcattctcgtcgtcctgtggatgtgcaaaagggccatatactttctattcgcagtgagcattaggggcactatttaccacgtaggcggtggcattccaacgcgttccacgtcgcatcgccgtcatcagggtggccatttcgccccgcaccacgtagatgccgttgcctggaagcgccatggtgtccgcgtgtcctccgttgcggtgtctctacgactgcagctagttggcttccagttccagggctagcgctgaaaattgcagttttcgtggggcagggcagctcctcctcccttcccgacgaccttcgcatatgttttggcactcgccacttgcccactcgcacactcacgctgcctggacgaatctgggcgtgctgcctagttgggcatctctcactaatcctaactaatcgaactggtaagctgctaatttttggtgacgtttacgtgtcgtttatgttcttgtgtgcagtccgaatattttgcacaagcgtcttccaacaccggcgcggcagttcgtcgcttcgcagcactggcacagctgtagatgccaactcgatgcggaaatttcaatagattaaattgaaatacagctgcaagcgtatataaaaaaaatataaccttgtttttaaaataaaatatgttgccaagctgtcgatcaaattgatttaatcaaattgatatttgaatatgagggccaaaacaggtgagcataatcagtcacgcacgcatcttcagtcgtgagcgttacacccaccactaagttacactggcatttggtgcgtaggcgaatttctaattggaatcgttcgatttttgaaaaagaatcgcattaaatgcaaagcattcctgttccagactactgcgcacacttgcactgaggcgatcgagcacggggcaggtggatttacaggactcagcgataccaaagcagcccacaggccgaacaatatgggaaacacggactccaagttgaactttcgcaaggcgattgtgcagctgacgcagaagaaccagaagatcgaccccagcgacgagcagttctgggagcagttctggcagggccaccagacgacgctggaggatgtgttcgcgctggtcacctcgagcgagattcgccagatacggaacgagaatccagccaacctggccaccttatgctacaaggcggtggaaaagcttgcccaggcggtagacagcagttgtcgcacgcaggcggagcagcagtgcgttttgaactgcgtgcggctgctcgtccggtgtctgccgtacattttcgaggacgaaaagtggcgcgacttcttctggagcagcctgccatcgcaggacaagaccatgccgttggctcagtcactgctcaatgccacctgcgaccttcttttctgtcccgacttcacggttacggccacgcggcgtgcgggccccgagaaggccgaggagttggcgaacatcgatagctgcgagtacatttgggaagcgggcgtgggtttcgcccagtcaccgccccacaacgcccacatggagcgcaggcgcacggagttgctgaagctattactcacctgcttctcggagcccatgtaccgatcgccgcagcagtccgaggagcccaacaagtggatagcatatttcacctcggccgacaatcgccatgccctgccgctgttcacctcgtttctgaacaccgtgtgctcctacgatccggtgggcttcggcgtgccctacaatcacctgctgtttgcagacaccacagagcccctggtggaagcgtgccttcaactgctcattgtcaccttggatcacgatatggtggtgcagcagcaactcacacaacccggacaggcgtcctacgacgagggcaattgcggcgacaacttgttcattaactatctttcgagggttcaccgcgacgaggactttcactttgtgctcaagggcataaccaggctgctgaacaacccactggtccagaactatttgcccaattccacaaagcgacttcattgccaccaggagctgcttattttgttttggaaaatatgcgactacaacaaaaagtttctgtattttgtgctaaagagctccgatgttctggacatcctgattcccattctgtatcacctaaactactcccgagcggatcaatctcgagtgggcttgatgcatattggagtattcatactgttgctcctatcgggtgagtcatatgtcatatgttttgttcgtggaatcagtgcacttacacttaaataaatgtttattgataggtgagcgaaactttggggttcggcttaacaaagcatactccgccacggtgcccatggatatacctgtgtttactggaacccatgcggacttactcatcactgtgttccacaaaataatagccactggccaccagaggctgcagccgcttttcgattgtctgctgaccattctggtaaatgtctcaccatatctgaaaaccctctcgatggtggctagtgtaaagatgttgcatctcctggaggcttttagcacaccctggtttctgctatcggcacccagcaatcatcatttggtgtttttcctgctggagatcttcaataacattatacagtatcagttcgatggcaactcgaatctagtctacaccataattcgaaagcgtcatgtgttccatgccatggcaaatctcccgaccgatatggctggcatagccaagtgcctgagtggccgtaaaacaggtggaaagtttaacttgccgcgggtaccacagcgaagaacgccagctgtgtcccaggaactgccctcggcccacgtgccagaagagtacaacgaagaagacgaggatgaggacgaggaggagataattaatgaagagcccaaggcggaagaggatctcgaatcggagacagagtctcatgagcgatctcaggcgggggagctgcagtcggacgttctcacggcgcagccagccgagccaggaacactgaaaacgtccttgttggacaccccgggcattactcagatgacggagcgggagcaggcgcatccaaatgacaagcctcaggtggaggattctacagacattgtgccctacgacagatcagccgcttcgacgccaactgacgaacgcaagtccacctcacccacggaattgtcccgcttgtcggtggcccacagggccagcattcgcatggtgcctggcgagagcgatcgttggacgcccacgcccgagtggatcgtctcctggcgctccaagctgccgctgcagaccatcatgcgactgcttcaggtcctagtgccccaggtggagaagatctgcattgacaaaggactgaccgacgagtcggagatcctcaagtttctgcaacacggaacgttagtgggactgctcccagtgccgcatcccattctcatccgaaagtaccaggccaatgcgggcacaacggcatggttccgcacctacatctggggtgtcatctacctgcgcaacgtggagcctgccatctggtacgatacggaggtcaagctcttcgagattcagcgcgtctaggtcagtaagtggactcccagctacaccagcagcgcaatcgtagcttacacgctttggcatttactgtagttaatttatttagtacatatttcattccaaatgtttttgtgaagaatcagtgtgtaatgaactacctttcccacaattttgcttattggcaacaaaaaaaatgaggcttatcagttacgatgtggcattgagatccattcaacagatttgttatcggcttttagcattgatatttaattgctttcctaatttgttttgaagagtgttctaaaaaacagtataagcacaaagtgtttttattttagttaatgactaaattattaaacaactcatgtttttgtaatctgtgacagaaaatgttccttgtgccgtatattttattgcatggttttatttattttatattttaataatttaaaaatttcctgtttttacttatgtatgtatttaaggtgcaaataccaagaataaattactttcactcagccactctacaaacgattcgctttatccaaacaaatttgtaactgcacctattgacaccataaaaagctttacgttctcttgtaatgattaggaaactttagttgagtccaatgaactgctttgtaaacttaattaaatatagacattaatgatagaattgagaaagtgtattaatttactgtctacgtgtgcttataaactatatacacaaactaaacttatgacacctatacaagtcagtttatataaatcatttacgaaatatagagcagaacccaagataagtaataaataataaataaatttcataaaacgaattgaatcttgtattttaatttataagaatggccaaatatagagccaaatgacagttactaaaaagcagtttcatatcaatcgattttacattcttgtaggttgcgttcacggtggagagaaaggacttcatcctttcttttacgcttcttcagtcgttctgcttgctctcgatcctccaatagtttga

SEQ ID NO: 18866 - DNA, 2639 bp, DROSOPHILA
ttacacccaccactaagttacactggcatttgactactgcgcacacttgcactgaggcgatcgagcacggggcaggtggatttacaggactcagcgataccaaagcagcccacaggccgaacaatatgggaaacacggactccaagttgaactttcgcaaggcgattgtgcagctgacgcagaagaaccagaagatcgaccccagcgacgagcagttctgggagcagttctggcagggccaccagacgacgctggaggatgtgttcgcgctggtcacctcgagcgagattcgccagatacggaacgagaatccagccaacctggccaccttatgctacaaggcggtggaaaagcttgcccaggcggtagacagcagttgtcgcacgcaggcggagcagcagtgcgttttgaactgcgtgcggctgctcgtccggtgtctgccgtacattttcgaggacgaaaagtggcgcgacttcttctggagcagcctgccatcgcaggacaagaccatgccgttggctcagtcactgctcaatgccacctgcgaccttcttttctgtcccgacttcacggttacggccacgcggcgtgcgggccccgagaaggccgaggagttggcgaacatcgatagctgcgagtacatttgggaagcgggcgtgggtttcgcccagtcaccgccccacaacgcccacatggagcgcaggcgcacggagttgctgaagctattactcacctgcttctcggagcccatgtaccgatcgccgcagcagtccgaggagcccaacaagtggatagcatatttcacctcggccgacaatcgccatgccctgccgctgttcacctcgtttctgaacaccgtgtgctcctacgatccggtgggcttcggcgtgccctacaatcacctgctgtttgcagacaccacagagcccctggtggaagcgtgccttcaactgctcattgtcaccttggatcacgatatggtggtgcagcagcaactcacacaacccggacaggcgtcctacgacgagggcaattgcggcgacaacttgttcattaactatctttcgagggttcaccgcgacgaggactttcactttgtgctcaagggcataaccaggctgctgaacaacccactggtccagaactatttgcccaattccacaaagcgacttcattgccaccaggagctgcttattttgttttggaaaatatgcgactacaacaaaaagtttctgtattttgtgctaaagagctccgatgttctggacatcctgattcccattctgtatcacctaaactactcccgagcggatcaatctcgagtgggcttgatgcatattggagtattcatactgttgctcctatcgggtgagcgaaactttggggttcggcttaacaaagcatactccgccacggtgcccatggatatacctgtgtttactggaacccatgcggacttactcatcactgtgttccacaaaataatagccactggccaccagaggctgcagccgcttttcgattgtctgctgaccattctggtaaatgtctcaccatatctgaaaaccctctcgatggtggctagtgtaaagatgttgcatctcctggaggcttttagcacaccctggtttctgctatcggcacccagcaatcatcatttggtgtttttcctgctggagatcttcaataacattatacagtatcagttcgatggcaactcgaatctagtctacaccataattcgaaagcgtcatgtgttccatgccatggcaaatctcccgaccgatatggctggcatagccaagtgcctgagtggccgtaaaacaggtggaaagtttaacttgccgcgggtaccacagcgaagaacgccagctgtgtcccaggaactgccctcggcccacgtgccagaagagtacaacgaagaagacgaggatgaggacgaggaggagataattaatgaagagcccaaggcggaagaggatctcgaatcggagacagagtctcatgagcgatctcaggcgggggagctgcagtcggacgttctcacggcgcagccagccgagccaggaacactgaaaacgtccttgttggacaccccgggcattactcagatgacggagcgggagcaggcgcatccaaatgacaagcctcaggtggaggattctacagacattgtgccctacgacagatcagccgcttcgacgccaactgacgaacgcaagtccacctcacccacggaattgtcccgcttgtcggtggcccacagggccagcattcgcatggtgcctggcgagagcgatcgttggacgcccacgcccgagtggatcgtctcctggcgctccaagctgccgctgcagaccatcatgcgactgcttcaggtcctagtgccccaggtggagaagatctgcattgacaaaggactgaccgacgagtcggagatcctcaagtttctgcaacacggaacgttagtgggactgctcccagtgccgcatcccattctcatccgaaagtaccaggccaatgcgggcacaacggcatggttccgcacctacatctggggtgtcatctacctgcgcaacgtggagcctgccatctggtacgatacggaggtcaagctcttcgagattcagcgcgtctag

SEQ ID NO: 18867 - protein, 837 aa, DROSOPHILA
MGNTDSKLNFRKAIVQLTQKNQKIDPSDEQFWEQFWQGHQTTLEDVFALVTSSEIRQIRNENPANLATLCYKAVEKLAQAVDSSCRTQAEQQCVLNCVRLLVRCLPYIFEDEKWRDFFWSSLPSQDKTMPLAQSLLNATCDLLFCPDFTVTATRRAGPEKAEELANIDSCEYIWEAGVGFAQSPPHNAHMERRRTELLKLLLTCFSEPMYRSPQQSEEPNKWIAYFTSADNRHALPLFTSFLNTVCSYDPVGFGVPYNHLLFADTTEPLVEACLQLLIVTLDHDMVVQQQLTQPGQASYDEGNCGDNLFINYLSRVHRDEDFHFVLKGITRLLNNPLVQNYLPNSTKRLHCHQELLILFWKICDYNKKFLYFVLKSSDVLDILIPILYHLNYSRADQSRVGLMHIGVFILLLLSGERNFGVRLNKAYSATVPMDIPVFTGTHADLLITVFHKIIATGHQRLQPLFDCLLTILVNVSPYLKTLSMVASVKMLHLLEAFSTPWFLLSAPSNHHLVFFLLEIFNNIIQYQFDGNSNLVYTIIRKRHVFHAMANLPTDMAGIAKCLSGRKTGGKFNLPRVPQRRTPAVSQELPSAHVPEEYNEEDEDEDEEEIINEEPKAEEDLESETESHERSQAGELQSDVLTAQPAEPGTLKTSLLDTPGITQMTEREQAHPNDKPQVEDSTDIVPYDRSAASTPTDERKSTSPTELSRLSVAHRASIRMVPGESDRWTPTPEWIVSWRSKLPLQTIMRLLQVLVPQVEKICIDKGLTDESEILKFLQHGTLVGLLPVPHPILIRKYQANAGTTAWFRTYIWGVIYLRNVEPAIWYDTEVKLFEIQRV

SEQ ID NO: 18868 - DNA, 3043 bp, DROSOPHILA
gaatgtgatgaacttccctcaagtatattattaccattcgactttagcttgcctacaacctgggcgtaattggcgatgcccgcaaggcttccatgcacgaggatttcttcgccaacctgagcgagtccgccatgtatttgcttagcattcgttactacggcgagatgttggaacacactaaggtgcgtctaaagactctggccgagagctatgcagagctgaacgagctgtacgtaaagcaagacgggattatagcgtatataagcgggggaacgtacatgactcggctggaggagagcattgatgagcagcttgagacggcaagagatacaagggataagctgggcagcgcactggagcagtggcgcatctgtggattactacttagagcagccgcgaattcctcgacgcaggcattaaaacaatggcgacagcttggacggataatgtgggtaaattaattccccacttagaacttgttgacatgttatttctcgttcagagatcccaagcaaaagcttcagtgggcgttggactgtcgaagtctgttacacgcctccacgatatccctagaggcggctcagctggctctgccgcacgtggaactcaagtacatgagtcatcggcaagtcctagccgtcaagcactgcaacacctacctaatcacggatatagcaaacaaagcgcggtaagttaatatatagatttctctagaatcttctacaaagggaaacgaatcccttttaggtacgagcacaccagtcgggtcttcaccagttacgaatcaaacatgtccaaaacctgcacgtggctctacgaaacctttaacagcacgctgcgcccagactacgacagggcggaggaaactgtatgcgggctggccaagacgctccgggatcatcgcgaggaggtcttcaacacggtgcgcaagtgacattaaacttattgctcaattatatgggtattttgtacattactttaataaacagtaggcataacattagtaccaatagctcttgactggcgtgcgttcctctttgatgcccatttcctccataatgtccatctcgaatgtggacaacttgggctgaaaggtgatctcgcccacaacagcgcctgaaaaggacagacttgtatgactaggaacatattgaaatgcgataatagcccatacctggcgtatccttctccctttcgatataggcgtttggtgttttataatcgtgcgtctggttgttcgtctccgggatgggtatgattcggccagatcgcaaggacacccgcactttctcgccctcctccgtgaaacgccactcaaagtcggtgccctgaagatccgatgggtcaaccagacgaatgtccttggtgacgtgcaaaggtgcctcggacttgataatgataccgggaaactccttctcaccgccaaccttgcgatagtgccagttcaggccctctacaattacccaattgcgctcgggtataacctgggtgacaattccctgctttcctttgtctttacccacaaggacttcgatacgatcgccgcggaaaaagctccagtcctctgaaaaggatatacaaccatgttttattaggttttagaggtcaaggcttcttattccttaccaattggttccactagcaccttgcgacgcacggttccgggcatattttgctggcggaactgacccgtccatgaacgatttgtggtgtagcggaatctctttcgctccacggtacgcggtaggtaattaatctccttcggagtttgccagtacacctgtgttgagatgaaaaaaaatattttaataaatgtgaaacattttccatgcgatgtgttacgtgagccgctgttcacaagttgttcaatgaaaaagactcttcctgttacctgttttttgctgcgctcgatgtattccttgggcagattggaaaagttcttcaacttgctggccaaatattgcgttaaacgcattttgaaaggttaattcaattattaataataagaactagtaaattaaatgcggcttgcaatcagctgttgagaactgaagaatagccattcacaggaaggcccaacaattttatttatatttaatgtttatgcgactctaaagattatgaacacttgatgtaggcttgtaaaatatttaaattaattattttcgaggtttaagaaaatatcttagcttatatattgttaaacattatgatatagaaatttaagaactagcaattatttccccgtgtaaacgtggttcgctgtgactggcaagaagaggtaagaagaagcagctgctatttgtggactactcttggtgttttatatcgttcgccgtagccctaaattgcaatgcaaaccggctttatataaacaaaaggtaagtgctagaccatataaatgtgggcacgtgcgggcgcaacatcattggaagacggaatcgcaaccggagagcgtctattccggccagctcagtccaaccgtttgggaagggcctttcaacgcttagtcatatccatatctcagcgcacaccgagacaatccagttcctacccacccataagttcctcatttaacaagcaatatgtcccaccacatagatatggaagaccgcactgatacggagcccgtgctgctctccaagcacgccaagaatctgctccgattccttaatctcctgccagctcgcatggcctcgcacgataacaccaggtaagtgcatcctggcctcgtatttaacttttggttaaccatttccttgtccatcaggagcaccattgtgttcttcgccgtctgcggcctggatgtgctaaactcattgcatctggtgccgccacaactgaggcaggacatcattgactggatctacggaggattggtagtgccacgcgacaacgagaaaaactgcggcggtttcatggtgagcataaattcgcgtctgtcaggtgtacaaacagtcgttgacaagccaaacagaaccatcttccgctcccacatccactcccaatcaagttccttatctccatacgtggccaggtagca

SEQ ID NO: 18869 - DNA, 812 bp, DROSOPHILA
aacagctgattgcaagccgcatttaatttactagttcttattattaataattgaattaacctttcaaaatgcgtttaacgcaatatttggccagcaagttgaagaacttttccaatctgcccaaggaatacatcgagcgcagcaaaaaacaggtgtactggcaaactccgaaggagattaattacctaccgcgtaccgtggagcgaaagagattccgctacaccacaaatcgttcatggacgggtcagttccgccagcaaaatatgcccggaaccgtgcgtcgcaaggtgctagtggaaccaattgaggactggagctttttccgcggcgatcgtatcgaagtccttgtgggtaaagacaaaggaaagcagggaattgtcacccaggttatacccgagcgcaattgggtaattgtagagggcctgaactggcactatcgcaaggttggcggtgagaaggagtttcccggtatcattatcaagtccgaggcacctttgcacgtcaccaaggacattcgtctggttgacccatcggatcttcagggcaccgactttgagtggcgtttcacggaggagggcgagaaagtgcgggtgtccttgcgatctggccgaatcatacccatcccggagacgaacaaccagacgcacgattataaaacaccaaacgcctatatcgaaagggagaaggatacgccaggcgctgttgtgggcgagatcacctttcagcccaagttgtccacattcgagatggacattatggaggaaatgggcatcaaagaggaacgcacgccagtcaagagctattggtactaa

SEQ ID NO: 18870 - protein, 247 aa, DROSOPHILA
MRLTQYLASKLKNFSNLPKEYIERSKKQVYWQTPKEINYLPRTVERKRFRYTTNRSWTGQFRQQNMPGTVRRKVLVEPIEDWSFFRGDRIEVLVGKDKGKQGIVTQVIPERNWVIVEGLNWHYRKVGGEKEFPGIIIKSEAPLHVTKDIRLVDPSDLQGTDFEWRFTEEGEKVRVSLRSGRIIPIPETNNQTHDYKTPNAYIEREKDTPGAVVGEITFQPKLSTFEMDIMEEMGIKEERTPVKSYWY

SEQ ID NO: 18871 - DNA, 5270 bp, DROSOPHILA
gcccaatctgcaagagcccaatctgcaggaacccaatctgcaggagcccaatctgcaagacgacactctgcaggaacccaatctgcaagaacccaatctgcaagagcccaatctgcaggaacccaatctgcaagacgccattctgcaggagcccaatctgcaggaacctaatctgcaagacgccactctgcaggagcccaatctgcaagacgccactctgcaggagctcaatctgcaagacgccactctgcaggagcccaatctgcaagagcaggagatgtcccaaccacgtggtcgcatctttgagccactgcagcatcaactgctcgacggcttaattcgccccgccatttagtgcgcttgcgctatcaactacaacatccaaatattcgtcctacagatcctgcgcgtccacaaaaagtcgcaaattccctgccaccctcctctgcgattgcgaagacaccagcgatcccaagaccagcgttaaacatccaatttgaactacaagaacccaacccaaatatcaacccaacccaacacatcccaaaggagaacgcttagcatggaaattcttaagatgaacaaaccaaatttgttgtaaccgttggccaaatggcattgttttttgtacccatacatatgtaaaaagtaatggcagaaatctggttaagtctcgtttagggcggcggtttgatcaatcgactagcttcgattggtttaagaatctgaaactggcacaattaattgagatgatttggatttttagggcagggtcgaagttgcagatacatttatgcgttcttttgcatttaaatatttaaaaatactggttattcaggaagtatgcatgctttttcgttataaaaatcgtgaaagcacgcatactctcagattttcaaactcagtttttgccgctgcgtggattccgtaggtttcctagtagattatctggtacatgtcgtttagtcgcatcaagaagctcgttaagaacggttggggtttttagtagtccagattgtgtgtgttccataaaaggtacccataagtttaatgaatgtgtggtgctggttgcagatcaaatagtgcgtttttgagtgagataaaaagaataaaataatgaaattggtcccacaaactttggctttatgtatgtaccttgatcccggccaattatgataagacggcagaccacaagtgaagcatccaaatcttctcaagagcttgtgtcaacatttttcgtctggctgttagatttgaatcgagttgacgaaccgtgtgtacatttggctcctaacactttgcagtcgacaggcatgcgttcagataagagattcttctggcgattcttcggattccacagatatttgggcataccttggttccagagttgcagaacatagacgacatgtcaagtgctgtgatttgtgatcgcattgaactctcgatgattgcaattttgcctatcagtcaactgcagcaagactcataaattactttttgagataggtataattaatttgtgcaaacaagtggattaatagccagcctggtgtgacacttaaaaataattgagctgaggtatttaaacagcaaatgaggcaaaaaagaggggcctggggccattatatcgatgactagatatataattttatgcaaatttctgccaatgatcgttatcataaatagggattaagtttgagtttctattttcggaccagctaaacgatctagagctataaaattcaaagtaaacaaattcataaactaacgtattaacgaaagtcacccgttgtcaaagcttgacattagcctaacattgttgaccaactagttttttggcgaactggaaatagcttaatcgcgtgatttggtgacgagcccttaagaatagcgtcatggagtccacatagccatgaacttgttatactcgtccactgatctatataaactgagctattgtgttgcaggccgtcttgtgtcttgtagtcttccatctggatgcatttgagcttttgtgttgtctgctgcctgcatttcatttgttgccttgtaccacaaattagctgtaaatctaaaaaatggatgatgatgcagaataccagaagctccggcgaaacatgcagggagctcaaggatcgagagaaggacatccaggatcaaatgatggcatcagcacagtaatctacagcgcggaaggagaagaggtgggtatacttggatccttcggacatagagactcgcttaacagatcctgcaccctaatagcttaccataaattgtgaggccgaatccgagtcatccggccagcgagatcagtggagcaggggagtggagttcctcttctcctgcatcgccctatccgttggccttggcaatgtctggcgatttccgttcattgctctggagaatggcggtggcgcctttctcataccctacgtgattgtgctcctgctgattggcagaccggtttactatctggaggtcatcattggtcagttctcgagccgtggttgcatcagagccttcgatatggcacctataatgaggggtgagtgagttgaatggagcacattcccaacatggttgcaatttctttatttcgtttaggtattgcctatggtcaggtgtattccaccgccttggccaccacctactacgcctgcattatggccttgaccatcagatatttggtggctagtttcagtgaagtcctgccctggacatattgcctcgtggaatggggcaaaagttgcgtggcgacgggagccacagctgccaatgactcatccattgtgcagggggtttcctccgccgagctgtttttcacgtgagtgtgttgtttgatcgtttcggaatatagaatccttagttaacctacctactgaatacaggcaaacagttctgagggagcccgaatcgctggacgataatggcctgggtactcccagttgggatctggtcttgtgtctcctggccacttgggtgatcatcggcacgattttgtcaaagggcattcgcagttctgggaaagcttcctatttcctggccctgtttccctatgtgatcatgatcgtactgctcattcgggcggtcactttaccaggtgcctggcagggaattgtgtacttcctgaagccccaatggtcccagctgctcaatccgcacgtgtggtacgcggccatcacacagatgttcttctcgctggccatctgcttcggaacgctggtcatgtacgcctccttcaatgatttcaacaagaatgtgcacaagtaagttgagtaacctctttggtttcagatcatctttatgtgtcattcctttccagagatgtgataataatcaccactatagactcgcttacatccattctggctggttgcatcatctttggaattctgggcaacctggcctttgagaccaacaccaaggatatttcgcaggttgtcaaaggtggagctggtctagcgttcatttcctatccagaggccattgccaaattcaagtaccttccccaactgttcgccgttctgttcttcttcatgctcctggtcctgggcattggatcgaatattggaatggcttcggctgtggtgaatgtggttaaggatcgattcacccatttgccccactggctgctggccgtgagtgcttcgataattggattcctctgtggcctggtgtacatgactccgggcggacagttcgtactgaatctcgtcgacttttatggctgcacttttatagccctggtcttggccattgcagaattggtggcagtgggctggatttatggtgtgaagcgcatctgcagcgacattgagttcatgctgaatgtgaagaccagcttctattggcgcatctgctgggccattgtggcacctggtctgatgttcctggtcctcgtctatatgctcttcagctacgaacctctgacgtaccgaggtgttcagtatccgccggtctactatatggctggatggattatctggggactgggtgtgctgcagttgcccttctgggctttggtgacgatttaccagcagccaggaaagacttttggcagtgtgagtaaatgggttatatatttttgaaaatataaatactacatgtgtgtaatgttcaacagaaattcggactggccatgcaacccactgccaattggggtccattgcagacgcagaagttcgaggcctacataatccatcgaaaacgcgaggcggactttaagagcccacgtggcggatacttgttcgacaatatctttggctaaaggactactctagtgtattttagtgttacgctttattattaatgcaattggtaattaatatattcttaggctttaggcttagcataagcattgagagttatctgtttttaggtaatctaattaattggatttgttttcaaaaaaaaaaaaaacacacacagaccagtgaatattcaatggtagctaaatgatattgtctttgactgggtgaaattattgtatgttctatggctgggattatccctattcattggttttcattacttttattttctttgcattggcggctctgctctgctttagtttaattatcacagcactttttgattctgttgttattgtgcaaaattatatagttctcaaatatgtataggccaggaatctggcgttttttgtgtattcggagcaagtgccttaaaaattcatcaaactatttacaattgttataaatgtaagtggcaagctgtagccaagcaataattagtcaatgttttgattgaaaatcgtatttggcttaatcatttgcttagatatataaaatatgcaattttaaacaattgtttgattcaaattgagtttagatttgcttatatctttggcagatttctgttagatttgggcaaagttagctatatcccccatccctctgatgaaaccctttcaattaaattcattccccagcttgacaatcatttaggtttttaatgctaagaattgacttttggtttgcagatttcatagcctacatttcagcgcaaaattcagcgttcaaatatgtgaattactactatgatatatcggtatacatatatagttcccactgtggctaaaatggaagttctttgctaccaactcacactagatatggtcctattaattgggctggcctctatatgatttatagaaaaatctagcacacgatatgaagttaccttgagtatattgtctactacttaagttagatgcctaatcgagggttaaccagcacattaaccccctg

SEQ ID NO: 18872 - DNA, 2036 bp, DROSOPHILA
ttttagtagtccagattgtgtgtgttccataaaaggccgtcttgtgtcttgtagtcttccatctggatgcatttgagcttttgtgttgtctgctgcctgcatttcatttgttgccttgtaccacaaattagctgtaaatctaaaaaatggatgatgatgcagaataccagaagctccggcgaaacatgcagggagctcaaggatcgagagaaggacatccaggatcaaatgatggcatcagcacagtaatctacagcgcggaaggagaagagcttaccataaattgtgaggccgaatccgagtcatccggccagcgagatcagtggagcaggggagtggagttcctcttctcctgcatcgccctatccgttggccttggcaatgtctggcgatttccgttcattgctctggagaatggcggtggcgcctttctcataccctacgtgattgtgctcctgctgattggcagaccggtttactatctggaggtcatcattggtcagttctcgagccgtggttgcatcagagccttcgatatggcacctataatgaggggtattgcctatggtcaggtgtattccaccgccttggccaccacctactacgcctgcattatggccttgaccatcagatatttggtggctagtttcagtgaagtcctgccctggacatattgcctcgtggaatggggcaaaagttgcgtggcgacgggagccacagctgccaatgactcatccattgtgcagggggtttcctccgccgagctgtttttcacgcaaacagttctgagggagcccgaatcgctggacgataatggcctgggtactcccagttgggatctggtcttgtgtctcctggccacttgggtgatcatcggcacgattttgtcaaagggcattcgcagttctgggaaagcttcctatttcctggccctgtttccctatgtgatcatgatcgtactgctcattcgggcggtcactttaccaggtgcctggcagggaattgtgtacttcctgaagccccaatggtcccagctgctcaatccgcacgtgtggtacgcggccatcacacagatgttcttctcgctggccatctgcttcggaacgctggtcatgtacgcctccttcaatgatttcaacaagaatgtgcacaaagatgtgataataatcaccactatagactcgcttacatccattctggctggttgcatcatctttggaattctgggcaacctggcctttgagaccaacaccaaggatatttcgcaggttgtcaaaggtggagctggtctagcgttcatttcctatccagaggccattgccaaattcaagtaccttccccaactgttcgccgttctgttcttcttcatgctcctggtcctgggcattggatcgaatattggaatggcttcggctgtggtgaatgtggttaaggatcgattcacccatttgccccactggctgctggccgtgagtgcttcgataattggattcctctgtggcctggtgtacatgactccgggcggacagttcgtactgaatctcgtcgacttttatggctgcacttttatagccctggtcttggccattgcagaattggtggcagtgggctggatttatggtgtgaagcgcatctgcagcgacattgagttcatgctgaatgtgaagaccagcttctattggcgcatctgctgggccattgtggcacctggtctgatgttcctggtcctcgtctatatgctcttcagctacgaacctctgacgtaccgaggtgttcagtatccgccggtctactatatggctggatggattatctggggactgggtgtgctgcagttgcccttctgggctttggtgacgatttaccagcagccaggaaagacttttggcagtaaattcggactggccatgcaacccactgccaattggggtccattgcagacgcagaagttcgaggcctacataatccatcgaaaacgcgaggcggactttaagagcccacgtggcggatacttgttcgacaatatctttggctaa

SEQ ID NO: 18873 - protein, 629 aa, DROSOPHILA
MDDDAEYQKLRRNMQGAQGSREGHPGSNDGISTVIYSAEGEELTINCEAESESSGQRDQWSRGVEFLFSCIALSVGLGNVWRFPFIALENGGGAFLIPYVIVLLLIGRPVYYLEVIIGQFSSRGCIRAFDMAPIMRGIAYGQVYSTALATTYYACIMALTIRYLVASFSEVLPWTYCLVEWGKSCVATGATAANDSSIVQGVSSAELFFTQTVLREPESLDDNGLGTPSWDLVLCLLATWVIIGTILSKGIRSSGKASYFLALFPYVIMIVLLIRAVTLPGAWQGIVYFLKPQWSQLLNPHVWYAAITQMFFSLAICFGTLVMYASFNDFNKNVHKDVIIITTIDSLTSILAGCIIFGILGNLAFETNTKDISQVVKGGAGLAFISYPEAIAKFKYLPQLFAVLFFFMLLVLGIGSNIGMASAVVNVVKDRFTHLPHWLLAVSASIIGFLCGLVYMTPGGQFVLNLVDFYGCTFIALVLAIAELVAVGWIYGVKRICSDIEFMLNVKTSFYWRICWAIVAPGLMFLVLVYMLFSYEPLTYRGVQYPPVYYMAGWIIWGLGVLQLPFWALVTIYQQPGKTFGSKFGLAMQPTANWGPLQTQKFEAYIIHRKREADFKSPRGGYLFDNIFG

SEQ ID NO: 18874 - DNA, 2534 bp, DROSOPHILA
taggacagaatcactaggaatgcataataatagccaataaaccgtacaagctactgcatgaatcgtaatgaggtgatgaagtttcttcggaaatattcattgccatgtggttgtgtaacctggcatacaccatattttcgcccccgtttgaaaaactcgaggctgttgcaagtggacctacaattgctccgctctctgtgtgcgggtgtatttgtggttgccggatgattttgactttttgtgcaactgtacgtccgtcagtctgtgcggctttggcataaaatgtttcaagtgtcatttatattcattttcattcttttttttaaatgccggctgcagccacgcccaccgcccacaagccagcccagaccactggacgtctgtgcaaattaaaatgtttccgttgtcgttgtcgcaaattcacacacagacagacaccctcagaaggaatgagagagagacccctagtcggacgagattgaattttatggcccgacgtcgggcgccagagtttctgcgagtcctgtggatcgtgggcaggatgtcagggttgtccggatgcggattacactaattatgaaatgacatcgacaacggcgtcgttgattttaatggttttctgttgtcaacccaattaacaaattttctcgcctttcgcttcgattgcaggaaggatgctgctgatgtcaccgccgttgcagtagcaacaccaatccaaggaagccgaaggaaaatcatcatctgctgcacccactcctccccccgagaacaagccacacacatgttgctgccacagctacgatgctcagcgctgccaatgcaactgcaacagcaacacatggagcagcagcagtcgcgattgccgcagccgagacttatgtcataacaaacaaacagcagcaacagcagcagcaacaagtatttgttgttgccgccaacaaaatggtgataccagcaacgggagcaacgatcgccggtataccaacagcaacaacaacagcagccgccgagtcaacagcaacgcagcagcaccagcaacaccaacaacagcagcagcagcaacaacatgtgctgttccagccgcacctacagacaacaaccgcaactgcagcaacctgcagcacacctcagcaacagcaaccacctcagccgcggcagcatcccaagaagcgaaagttcgatccagccgagctggacaagaccgagcagcatccccagcagcagcagcagcagcaagtgagtctgcagaagcagcagaaacccgccgaaacaactgggaacggcgatggcctggccaacggcaatcagcagcatcgcatgatcgtgagttgcggtgcaggcgccggcaacaacagtagcaacagcagcagcagcaacaacagcagtcacagcagcagcgatatcaagcagcagcagcagcaacgtattatcattgcatccccgcaacatgccagcggtagtacttacaagcaacatgttgccagcggcaacaatagtcacgcagccacaatcaatcatcaacaacgcacacacacgcccacaaccgccgtctactaccaacagcagcagcagcagcaacaacagcaacaacaacaacgttttagctttaactcaaacaatcagcaacatttacaggaacaacaccagcagcagcaacagcagcaatccctgctcgatctcagcgagtggaacaacacgcgtgtcctagccaaaatccagaataactatgcacccgggataatacgccacgcccaggaggcgtctcccgactcaatactcgtggaattcgattccaccgacttgggattactgttatatacggatgtgttgcaccagggtcgtaaccatgtgatactcgatgccagcccgcccatggcggatgtgagtactccgaatacggtctcttttgtcgccctaaatgctaaggtcatttcccctttttcgattagattacgctggatgcccgtgtctgcgtgcggcagcgggtggaaggtcgtggctccggaagcttcgtctacgtagagggcatcattacggacattaaccaggccacgaagcaatacagtgtgcaactgatcggcgatgaaatggtaagggcattcagcttgcttaactttaagcttttagagttttaagttgcgaattgataagaattagtttttagttatacgaaattcccaacttataataccttgcattgttacaggccaccacaaaggttgtgcgccgtgccgatttgcggctcctgcagccgccttggtgggacgagctcaacgaactgacaacctcgggtggagcaagtgctccagcctccagtgccaagcgaaaggtgccggcagcgggtgcgggagcaggaacaggagcagcaggttgcgaggcgatgaccgtgcccagtggcaatatcgtttacccgaagacggcgaccggcgcgccattgtccttcgtggctacgcgctacgatggcaagctgcccacggcaccacccacgtcctcccaccagcaggcgcagcagcaattggtgaaacaagaagagt

SEQ ID NO: 18875 - DNA, 534 bp, DROSOPHILA
tgtgtgtgcgttgttgatgattgattgtggctgcgtgactattgttgccgctggcaacatgttgcttgtaagtactaccgctggcatgttgcggggatgcaatgataatacgttgctgctgctgctgcttgatatcgctgctgctgtgactgctgttgttgctgctgctgctgttgctactgttgttgccggcgcctgcaccgcaactcacgatcatgcgatgctgctgattgccgttggccaggccatcgccgttcccagttgtttcggcgggtttctgctgcttctgcagactcacttgctgctgctgctgctgctggggatgctgctcggtcttgtccagctcggctggatcgaactttcgcttcttgggatgctgccgcggctgaggtggttgctgttgctgaggtgtgctgcaggttgctgcagttgcggttgttgtctgtaggtgcggctggaacagcacatgttgttgctgctgctgctgttgttggtgttgctggtgctgctgcgttgctgttgactcggcggctg

SEQ ID NO: 18876 - protein, 143 aa, DROSOPHILA
MIDCGCVTIVAAGNMLLVSTTAGMLRGCNDNTLLLLLLDIAAAVTAVVAAAAVATVVAGACTATHDHAMLLIAVGQAIAVPSCFGGFLLLLQTHLLLLLLLGMLLGLVQLGWIELSLLGMLPRLRWLLLLRCAAGCCSCGCCL

SEQ ID NO: 18877 - DNA, 4141 bp, DROSOPHILA
aaattttttgtctgtgtactgatgtgtatacagtgttgcaaaggtaaattggattgagaaattgaaatcgcattcagcggcaaagggggcaggcgggcggatggcgagaaatagggggcaagagcaaaggagatagaggaaaatcttttccgttttatttaccttattgattttcccttttgaacaggtcgctctccatgtatttgtgcacctccggccgagataatcgagctgaagttgcatttcccactttgctggcgaaaagtttaatggatttttccaccattcaacaccgaaaggtgtgctttaaaaactttcctgctgtcacttatttcccatttcgttcgtacacctgccgcatttgccatttgttcgactaacttaggcttgacaattctcaaaacattcatcaaagtccggcgctaaaaccatttccgtgttctcatttctccccccgcaaacattttgtcaaacatgaaacattcgcctagtgacgtcacaactaattagagtggaaaaagaggaacttttctttgtcaccaagtcaagttatttgtttctgaatgctttgcctaattagtgacttcaactttgctaatattatgaacaaatctataattataagaaataaagaaactatcttatgttcagtcttactctacttttaagttttattgagaactattagctcttctccatatagccaagtttaaactttcataccttgaaagttttaataataactacaaatccttaatgcttgacttcaaaatgtttattcggtaaatatgaatatgaaaacactatatatctacgacaaacatgtttcagttatttggtcttcagtgtgtgtgtgtgtatgtgtttgtgtttgtatctgtaatgcaaaatgacttaaataacaataaggtttctgttcgcgattggtgcaaacgtgttggtagttagcctaacccaagcacccaaatcccagatccacgtggatgcggccccatggatctcagtaatggcgctgcatcaccctgtccagatcgttccaactgcatgagtagtcgatctgcagtagacccttcttgctcagtccgaatttacgtgcgtaaattcccgagtagagcgacgagtcaccaccgctggaatgatggggcgatgagcccctaacccgactgccatcaccacccaccaagccgcccatggttccgtagagggcggagggtgcggcatagatctgctgctggcattcgctgcaatccggtatgctgcagtacggcagtgaagcatagggattacagtagtcgtaggcgggcgaaagtggcggcggtgcggggaaatcgatctgcggcggagcggccatgggcgccgccttaccgcttcgcttgcgccgcggatggggggcagttccatagctgccgaccatgttggtgctccgctgcatctcgctgggcacggagcggcgttgcatcgtggccgcgcgtcgttggagaacgggctgctcatcgccaatggaggagggatgctccgtggaactggtgctggagaagcctgaaacgtgtgagattacacggcattagtgaaagctatcaaaatcatttggtattttacaacagctacatttatatttaagcactcgatgggtttaaaatcaataaaacatttatacttacatatagtttgaaaaggattagtaatcaaaatatataacaaatactaagtaattaatgatccccaagtacagaaaatcaaatttcattagtcaagctcaaaaatcaatgattttgccagagatttgcaattaaacgttaatcgaattgccataaaagacgcactgcgtaaattgtaacaatcaaatggaatcgaaaatgaaatctaaatgcatttgtgtgatttgcatacaaagctaactaaataaattggttattacgaaacaaaaggaattttaaattaaaatctagttttaaaggggtttcgaatttgcatttgctatttgcgtttttcactcacctccaaagccattgtacagttgccgctgctcctcgccgtaaagatcttccggctcctcatcctcgccgttgtccaggtgcaactgcctggtcatggtggccatgtagtcctcatagcggctgggcacaccgtaaatatcgctcctggccgtatagagtggctccttgcgagcgctgcggctacggcgacgagtcctttggggcacacagcactcaagttggcactgggcacgcgacacccggcgactttgggtgtgggggcgtggcattgtggccgacatgcccacacccatacccgcaccggcggcacccactccgtatccgtatgtgggactggtcgtcagcgagttgccaccacctccgtaggcaggttcaattgcctcaccatcaccatcaccaccaccgccaccggtgacatcatcgatcttcttgcgaacataatcatagttctccagatcccagggatccacatagcagcgctgcgagggcagcagcgtggtgccatatatatcctccgtgttgtcaatggtataatagggggattccagggcgcccactccctccgaggagctgccaccaggtaaggcctgttttggaccggctcgtcgccttcttggggtcgtttgactgcgttcacgcatgctgtaagaaaaaaaggcaaagaaaaaatacataaatattggttgggaaaatgcggagatggtgcgcgtggtgtgggaaagccatgagcaagtgcatcaactggttgcttacgcaacgcactttgtggccaatactgaaaactcttccgtcaacgaatcgaacccgttcttcggcgttggccgcgaattttccgcggcattaatgccggcttaaaattgcacaccggcttggctatatcttttgcaggtgttacacttcacgacttcagattgcaaccattagccggtttatggatctgcataacttagcatggccaatcaattggcattccaattgccaataagccgagatattccattagccaacagactggtttacgtcaaaggaaaactaacaaaaaacccatccacccgtttcgggcatcgaaaacaaattgctttacttatcaaatttcattaaaaaaacaaaaaactatttaattaaaatctgaaatggagcccgtcggcaactgtataaatttataaaaatatgcgatacaaaatcaagtggaataagtgccatgcaaaaaatacacaaatttccattttgtcgagaaggttaactagattttcgatcaggcttgtcagttgcagtgccatcgaaatggaattaaaatacaccgagttttccattgtaaaactaaataaatgaaaaacgttcagtttttttttaactgcatattcatttcagagtttatttaacataaaagacaatatcaacatgtaataagcgaaaaacggttcacatttctttcattcgattaaatctctaccgaaatctgaatgaaaagcatgaatgggcacagaaaatattaatattaatgcatctgtttccgcaaagttaaaaaaaataccttaaaaaatattaaattaaatttttaggcaaatttttcggctgatattttacataggcttttggttttctccggggttttccccttaattatttctacaatataaaacgcccatttcaaaaaagggttttgcgcaatcttttcgaggcatttgtgatttgtgcatttgcataaaaatgttgagttggttttgtttttgcctggtttgttttaatctcttcggttatcgattaacatttgtatggcctgatcaagaaaaaaggtttccgatgggaatatattttttataaaatacacaaactgtaccgcgaaaaaaaaataaaacaacgtgacttggctgtgacacgcaaatgaaatcgtttatctgtgtatctttcagggtctataaactttttatggcatatatccaaacaaaacaaaatatgcacacagaagcccatctgaatgcactttcagtgatttgcacgcgagtgaaaatggtttagggcttgttttttaagctatttattatttaaaggaactccaaaatgtagtcaatccaaaacaaacaatgtaggcatacaaattctgcactctatacttgatattccagttattattctagataact

SEQ ID NO: 18878 - DNA, 1682 bp, DROSOPHILA
acgggctccatttcagattttaattaaatagttttttgtttttttaatgaaatttgataagtaaagcaatttgttttcgatgcccgaaacgggtggatgggttttttgttagttttcctttgacgtaaaccagtctgttggctaatggaatatctcggcttattggcaattggaatgccaattgattggccatgctaagttatgcagatccataaaccggctaatggttgcaatctgaagtcgtgaagtgtaacacctgcaaaagatatagccaagccggtgtgcaattttaagccggcattaatgccgcggaaaattcgcggccaacgccgaagaacgggttcgattcgttgacggaagagttttcagtattggccacaaagtgcgttgcgtaagcaaccagttgatgcacttgctcatggctttcccacaccacgcgcaccatctccgcattttcccaaccaatatttatgtattttttctttgcctttttttcttacagcatgcgtgaacgcagtcaaacgaccccaagaaggcgacgagccggtccaaaacaggccttacctggtggcagctcctcggagggagtgggcgccctggaatccccctattataccattgacaacacggaggatatatatggcaccacgctgctgccctcgcagcgctgctatgtggatccctgggatctggagaactatgattatgttcgcaagaagatcgatgatgtcaccggtggcggtggtggtgatggtgatggtgaggcaattgaacctgcctacggaggtggtggcaactcgctgacgaccagtcccacatacggatacggagtgggtgccgccggtgcgggtatgggtgtgggcatgtcggccacaatgccacgcccccacacccaaagtcgccgggtgtcgcgtgcccagtgccaacttgagtgctgtgtgccccaaaggactcgtcgccgtagccgcagcgctcgcaaggagccactctatacggccaggagcgatatttacggtgtgcccagccgctatgaggactacatggccaccatgaccaggcagttgcacctggacaacggcgaggatgaggagccggaagatctttacggcgaggagcagcggcaactgtacaatggctttggaggcttctccagcaccagttccacggagcatccctcctccattggcgatgagcagcccgttctccaacgacgcgcggccacgatgcaacgccgctccgtgcccagcgagatgcagcggagcaccaacatggtcggcagctatggaactgccccccatccgcggcgcaagcgaagcggtaaggcggcgcccatggccgctccgccgcagatcgatttccccgcaccgccgccactttcgcccgcctacgactactgtaatccctatgcttcactgccgtactgcagcataccggattgcagcgaatgccagcagcagatctatgccgcaccctccgccctctacggaaccatgggcggcttggtgggtggtgatggcagtcgggttaggggctcatcgccccatcattccagcggtggtgactcgtcgctctactcgggaatttacgcacgtaaattcggactgagcaagaagggtctactgcagatcgactactcatgcagttggaacgatctggacagggtgatgcagcgccattactga

SEQ ID NO: 18879 - protein, 392 aa, DROSOPHILA
MRERSQTTPRRRRAGPKQALPGGSSSEGVGALESPYYTIDNTEDIYGTTLLPSQRCYVDPWDLENYDYVRKKIDDVTGGGGGDGDGEAIEPAYGGGGNSLTTSPTYGYGVGAAGAGMGVGMSATMPRPHTQSRRVSRAQCQLECCVPQRTRRRSRSARKEPLYTARSDIYGVPSRYEDYMATMTRQLHLDNGEDEEPEDLYGEEQRQLYNGFGGFSSTSSTEHPSSIGDEQPVLQRRAATMQRRSVPSEMQRSTNMVGSYGTAPHPRRKRSGKAAPMAAPPQIDFPAPPPLSPAYDYCNPYASLPYCSIPDCSECQQQIYAAPSALYGTMGGLVGGDGSRVRGSSPHHSSGGDSSLYSGIYARKFGLSKKGLLQIDYSCSWNDLDRVMQRHY

SEQ ID NO: 18880 - DNA, 6195 bp, DROSOPHILA
gattgatgggcaaccacatttccactggcaaggggtgtagtattatagggtggccatgcggttattggagtacgaaatgaacaaattgctcaacttgtattcaattactatttgtggcaaacatttgaaaagccaaccgtaattatgcagacacaatgaatcagaagaccaaactcgaatcgaatttcactgtttatattaaaatttccgccttattcatttgtgggggacacatatgcggcagatacagatacagctacagatacagatacacaggccgcattcagatatgaatccatcaactcgactgcgaacaatgcgtgaatcggaaaatgtggactgggaatgaatctggaaccgaaatgagtgtgagaagctcgcccggaattcagttatccaattaaattggcaactcaaggggtttcaagggtgatgtgatgcgtgttcttcttgggggcggaatgatgacttacaataatctccatcttaattctgtaactgtcgagagccgggccaaagtccactgcccacaggggcaagtgacaccgaggcgttgacagggctgatggagaggagtgcccactacaagtttatccaattaatggtctgcttggatgatgccctattcagcgtcgtagatcaaagagattttatggcagctctgagatttcctagcaatcgtgttagagcccataaagttttgtaaagtttatggggcatacttttcggctttgctttgtttttgatcacttcaaagctaattgttatgacattaatcttacattatttaatggaatttaggcccagaatattctaatattttctgcaattttatagattatatagatttatattggaacgatttgaataaataaaaatattccaaatcgaaggtacaaatataatttttggtagcttatatatctaatgctttcagaaattgaacaaaacgcgaacagttcgcttctgctgtcaaggatacgagggaaatttgtcggatagtcaagccacatgcaagcccatttgcaggggcggctgtgggcgtggcagttgcgtaatgcctgacatttgcagctgcgaagagggctatattggcaaacattgcacacagcgtaagtatatttccgtgtaatttccgtataactttctggtttaatgaacttttggtaggctgtgatcacgatcgctggggactggactgcaagaatctatgccaatgtcaaaatggagcagcctgcgacaataaatcgggactttgtcactgcattgccggttggacaggacaattgttagtattacccttataatccttagatccaaaattatcaatattgtaaatacttaattccttgtagttgcgagctgccctgtccacagggaacttacggcatcatgtgccgcaaggcttgcgactgcgatgagaagccttgcaatccacaaacgggtgcttgcatccagcaggatcaacctctccaactgaatgtgagccacgtcatcgtggagactgtgaactccacgctggagaaaatgggtattataccgcgtcccaccacgcccgttcccctgccggaggtcatagtaattaagcaaccgaccagcaatgaaaatgcccaacactcaccaaagatcattgtccaccaatcgagcagtgacctactcgagaatctccatacggctgcagccgccggtgttcccactccggaggtcatacacgtcatcaccaatgggatcacctcgccacaggagcatttggccggattcgttggaggtgaggccaattcaagtcagacggcgacagctgatcatcagtccggcttggtggtcacactggtcagcataatgctcctcctgctggtcgccattgcggtgggttcactgtatgtgtaccggaggtatcaccacaaaaatgccgcagtatacaatgccaacggaacggtgaccacgctgcctgcaaatccggaagtggttctcaccgaagccgcggtcctgggaaaaaacttccacgaaccactgcctgaaccgcccgtggcctttgcggtcacgccccaatcaaacgagggtatgtaagtgtctctgccgaccttaaagtagctagccacacatctatacacactttatatagattattaattgaatttcgactaagattaatacactttcctttaaatatgaaattcacttaattatttaaatattataatcaaaagaaatcatatattttcacagcacaaccagagctatatgatagtcccagcaacaactcctcaattaaaaccccaccttacgcctatgccaggaaggagtcactctactcggtggtttcgcccaagtctcgaaagggaagcctggactcgcatctgtacgacgagattcgctaccaccaacagcaccaccatcagcagcaccacccacggagccatcagcatgttcagcactccacaaccgcctctcagtttttgccggcgaggccacagatcatgcccgcgaacgaccagttctccaatggaagtgttcatccgcatcagcggtcgcatcatgtcacccacttgataattccgccacagaactcaaacttcttgcaggttcctgcccaaatcacagccaaaagagttgcccacctgtaaactttattgctgacacaaaggatttttctgaacatatgaaaattcgttagacctttggtaacttttacatattgtacaaatctatttcaatttaaacttgaaatgtgcccttctaacatataccaggtaattttatatcatatttatccaataatttgtcccaaaactcacatttaaagtctgcgagtttttacaaccacacttatttttataacatactttagatcagtaataaatttatgtacagaagccaaatgttaagtgagcatacattttgattacatcattattttaagctgcccacgaattattataacattatattatggaagatatgatatgaactgggaaaaataacattaattaaacataaaaaaaaaaattaattcataaatcatataagaattggattggcgattatcaaactaatagagtttcacctaatttctattactttttaaaggtgatttgcatggttaaaggtttctgcattatttaagggtagtctttgattagatttaacacttttatatccataaaaacctatgtgttagactttaagtttctttaaagtctacgattgtggcgtgtgtagtttccgcatagttgtaacgttttaaatttttaaaagtatgtttgctgtagcaacagttttaaaaataaaaaatgttatgacttcaaaaaatatataaaactaattatatttatagttaaaaataaaaaacagctataataacattactatattataaaacatattatatttatgcaaaagctgattcataaaataattattagaataaagccatgtagccacattttgtaagttaaagactattatttaataaaatcgtctaataaaacaatatgtgctggattgaaaagggcaacttaatgttttcatttttctctgaatgttttcgtttcgagactgagagttgatgctgataaggtcttttgagtagattcaaacccctggactgcctgttcattcgctactcgacatcgaagctcagaacaccaagacgggatgcactgtagtggaccgttggccgggcttaccgctctactgacgctggtggcatttcctgtccagattaagaccgattccacggtttccacggagctctacggcgacatagagaatacggagtacggcgattttgagtcactaagtcaaactcgcgagcgtcagcaacatctgtgccatcgcgaggtgccgtgagtaaaaggaagttttaaaaaatatggaaaataaaacaaagcagcttaatgccaaacaaacgttcattaataaacaaatatatatatatttatttgagcgcatgctgggagaaatgattacaagcgcccattgattaattcgatttgatgattacagttctgtgtttttccaaaccgagcgggattccccggtgcgtggtaatggatccacgatctacttccatcgcatagaggtctgttgtgcaggctaccgtcgcgatccgtatgccaatgaatgtgtgccggactgctccgcatcttcgccagacaactgccgtaatggcttctgtcgcagtcctggcgtttgcgagtgcttcgcagagtttgtccgtaacgaacatggtgcctgtattcacacctgtccgattgcctgtcagcatggcagatgttatttaaatggcacctgtgtctgccatcagaactttgtcctggatcaggagacccggcagttctgccggccgaagtgttcgcagtcatgtggcacccatgaggagtgtgtggcgcccggccagtgcgactgctcacccggctaccggagaacgccggacttgggatgccaaccggtttgtgctccggactgcggatttggcaagtgcgtggcgcccaaccagtgcgagtgcttcgccgggttcattaaacggcccaattggaatgtatgcgaagctgagtgctacctgtaagagtatcgatatatctttatctaaagtatcttaaatttgtccgccaatttaagccatttgcttatcgcttccaggaactgcgagaatgggctctgtgagtcgcggtacaagtgtcactgccgcgaaggatatcgctacgacgtgaacaccaccagctgtttgccggagtgcagcgacaactgtggccaaggaaatggggtgtgcattgcgcccggagtgtgccgctgcttccgaggatacgaggtccacggtgccgagtgtcggccaaagtgtgagaggtctgttacccggagcaaaagctgtgttcaccttcatgaagttccgcttattcagcagattctgcggcaaatacgggcgttgtgtggctcccgaaatctgcggctgtggtgagggtcaacagcattgccggaacggaagctgtgacgatatcgagcactgcagttgcccatcgggggaaacccacttcatcgatcgctgtttgaaggcggaccgcctcagtcagcatctcaacactagcgaaaagagaaagcacttcaatcgccaacttgcttatgagtttaatgccctgatagggcgtctatttaatttctgatccaagacgaaacaataaagtgcgaaagtctaagttagacggcctggcaggtctggcgtcccttgatgccgctcttgatgaatcccggcctgcagatgcagaagtttggggcactgcagtaaccgttctggcatccctgcgggcagtgtggctggcagatgttccgctggtgctcgtccctcacatatccggtcttgcagtcgcactggttgttgcccacacagacgccgttcaagcacggaaggtcacacttcggcagacactcggccgacttccggtcccactcgaaaccggaagcgcactcacagatgtccggtccaatgcagcgtccgttcttgcagggtctgaaatagggaaataattaaattatctaaactatacatcgcaagcagatttcattgttttttaaaggccacacttacatggagcaaatgggttcgcagcgtccttggagctttaggtagcctgcgttgcagttgcagtgtcctggagccgtgcacttgccattctcgcaactgtcgcacactggttcgcaggatccatcggcggccaggcggtatccgtcgaggcaggcgcacttgttgggcgccacacagcgtccaaaggagcagccgggcttgcattccggctggcagtacttacgagtctccggctcaagcgagtatccctcgcggcacttgcactcattccgctcgtcgcacactccgttgccgcagcccaggggacaggtggagatgcacttgccctcggcggtgcgaacgtggccgggtatgcagacacaggtattcggagcagtgcatattccattccggcagtcatccgcgcagatcggctcacagcggcggtagatgtgcggatttcgctcatagccatcgcagcagacttggatgcgactcatgtccggagtggtgccattgccaacgaactgatcccgcgaattgcggagcagtgacgcggttctggatataaacaaggaaaacattaggtttacttaaacaacttaaaatcatgaatgcaatgacatatatttttccta

SEQ ID NO: 18881 - DNA, 2592 bp, DROSOPHILA
agtcaagccacatgcaagcccatttgcaggggcggctgtgggcgtggcagttgcgtaatgcctgacatttgcagctgcgaagagggctatattggcaaacattgcacacagcgctgtgatcacgatcgctggggactggactgcaagaatctatgccaatgtcaaaatggagcagcctgcgacaataaatcgggactttgtcactgcattgccggttggacaggacaattttgcgagctgccctgtccacagggaacttacggcatcatgtgccgcaaggcttgcgactgcgatgagaagccttgcaatccacaaacgggtgcttgcatccagcaggatcaacctctccaactgaatgtgagccacgtcatcgtggagactgtgaactccacgctggagaaaatgggtattataccgcgtcccaccacgcccgttcccctgccggaggtcatagtaattaagcaaccgaccagcaatgaaaatgcccaacactcaccaaagatcattgtccaccaatcgagcagtgacctactcgagaatctccatacggctgcagccgccggtgttcccactccggaggtcatacacgtcatcaccaatgggatcacctcgccacaggagcatttggccggattcgttggaggtgaggccaattcaagtcagacggcgacagctgatcatcagtccggcttggtggtcacactggtcagcataatgctcctcctgctggtcgccattgcggtgggttcactgtatgtgtaccggaggtatcaccacaaaaatgccgcagtatacaatgccaacggaacggtgaccacgctgcctgcaaatccggaagtggttctcaccgaagccgcggtcctgggaaaaaacttccacgaaccactgcctgaaccgcccgtggcctttgcggtcacgccccaatcaaacgaggcacaaccagagctatatgatagtcccagcaacaactcctcaattaaaaccccaccttacgcctatgccaggaaggagtcactctactcggtggtttcgcccaagtctcgaaagggaagcctggactcgcatctgtacgacgagattcgctaccaccaacagcaccaccatcagcagcaccacccacggagccatcagcatgttcagcactccacaaccgcctctcagtttttgccggcgaggccacagatcatgcccgcgaacgaccagttctccaatggaagtgttcatccgcatcagcggtcgcatcatgtcacccacttgataattccgccacagaactcaaacttcttgcaggttcctgcccaaatcacagccaaaagagttgcccacctctcagaacaccaagacgggatgcactgtagtggaccgttggccgggcttaccgctctactgacgctggtggcatttcctgtccagattaagaccgattccacggtttccacggagctctacggcgacatagagaatacggagtacggcgattttgagtcactaagtcaaactcgcgagcgtcagcaacatctgtgccatcgcgaggtgccttctgtgtttttccaaaccgagcgggattccccggtgcgtggtaatggatccacgatctacttccatcgcatagaggtctgttgtgcaggctaccgtcgcgatccgtatgccaatgaatgtgtgccggactgctccgcatcttcgccagacaactgccgtaatggcttctgtcgcagtcctggcgtttgcgagtgcttcgcagagtttgtccgtaacgaacatggtgcctgtattcacacctgtccgattgcctgtcagcatggcagatgttatttaaatggcacctgtgtctgccatcagaactttgtcctggatcaggagacccggcagttctgccggccgaagtgttcgcagtcatgtggcacccatgaggagtgtgtggcgcccggccagtgcgactgctcacccggctaccggagaacgccggacttgggatgccaaccggtttgtgctccggactgcggatttggcaagtgcgtggcgcccaaccagtgcgagtgcttcgccgggttcattaaacggcccaattggaatgtatgcgaagctgagtgctacctgaactgcgagaatgggctctgtgagtcgcggtacaagtgtcactgccgcgaaggatatcgctacgacgtgaacaccaccagctgtttgccggagtgcagcgacaactgtggccaaggaaatggggtgtgcattgcgcccggagtgtgccgctgcttccgaggatacgaggtccacggtgccgagtgtcggccaaagtgtgagagattctgcggcaaatacgggcgttgtgtggctcccgaaatctgcggctgtggtgagggtcaacagcattgccggaacggaagctgtgacgatatcgagcactgcagttgcccatcgggggaaacccacttcatcgatcgctgtttgaaggcggaccgcctcagtcagcatctcaacactagcgaaaagagaaagcacttcaatcgccaacttgcttatgagtttaatgccctgatagggcgtctatttaatttctgatccaagacgaaacaataaagtgcgaaagtctaagtt

SEQ ID NO: 18882 - protein, 832 aa, DROSOPHILA
MPDICSCEEGYIGKHCTQRCDHDRWGLDCKNLCQCQNGAACDNKSGLCHCIAGWTGQFCELPCPQGTYGIMCRKACDCDEKPCNPQTGACIQQDQPLQLNVSHVIVETVNSTLEKMGIIPRPTTPVPLPEVIVIKQPTSNENAQHSPKIIVHQSSSDLLENLHTAAAAGVPTPEVIHVITNGITSPQEHLAGFVGGEANSSQTATADHQSGLVVTLVSIMLLLLVAIAVGSLYVYRRYHHKNAAVYNANGTVTTLPANPEVVLTEAAVLGKNFHEPLPEPPVAFAVTPQSNEAQPELYDSPSNNSSIKTPPYAYARKESLYSVVSPKSRKGSLDSHLYDEIRYHQQHHHQQHHPRSHQHVQHSTTASQFLPARPQIMPANDQFSNGSVHPHQRSHHVTHLIIPPQNSNFLQVPAQITAKRVAHLSEHQDGMHCSGPLAGLTALLTLVAFPVQIKTDSTVSTELYGDIENTEYGDFESLSQTRERQQHLCHREVPSVFFQTERDSPVRGNGSTIYFHRIEVCCAGYRRDPYANECVPDCSASSPDNCRNGFCRSPGVCECFAEFVRNEHGACIHTCPIACQHGRCYLNGTCVCHQNFVLDQETRQFCRPKCSQSCGTHEECVAPGQCDCSPGYRRTPDLGCQPVCAPDCGFGKCVAPNQCECFAGFIKRPNWNVCEAECYLNCENGLCESRYKCHCREGYRYDVNTTSCLPECSDNCGQGNGVCIAPGVCRCFRGYEVHGAECRPKCERFCGKYGRCVAPEICGCGEGQQHCRNGSCDDIEHCSCPSGETHFIDRCLKADRLSQHLNTSEKRKHFNRQLAYEFNALIGRLFNF

SEQ ID NO: 18883 - DNA, 4361 bp, DROSOPHILA
agattttattttttgtgcgactgaactggaaaaccgaatgaccaacaaatcaaatagcggaaaacttttattttgcaaaagttttgctcatgcttccgtcggatggccggatttttgggtggcttttctttagccagcgcgaccatcttgggccccataaataagctagcaaattgcatgcttcactgcctcattggatccttggaaaagtgatgggggggggggggggcgatggggtttggtatagtgggcctggcaaattgatggctttgtagcagttgcggtaaatttgttggccctttgggccgtttgctgtgttcgcttcttgtttccttgaactctgaccagcaaattgtatttatgcgttaattatttcattaacgccccattgagtagcgccttcttgggctttggctttggctacggttttggttcaggggtcagcgcatcccctctctctctctctccaattattccagtctattgcattcaagtgactttgattctcggccccgggggcgtggttccgcccacctcgtctctcgccttgcgtgattcggtgcaatcgcatggaaacggaagtgccgcccatcgaaggtctcattaggcgacacagatggacaggaaatcccgcggggtctgtccaaatgtattttaattaaatgccttcaattgggcgagggaattggacaggcagtccaattttggagggggatcctttgctcaataaatgaattgaattccttaacaggaattaattgaacgataaaggcactttaatatactttcccataggtaaaagtagtataacgccacaaatcgtattttaaaacgcagtctcttttaacttggaaaaaggtaagttacctgtatgttaacttatgctaaaagtgagttacattagggtcaccttaagtgggtttgaaattattcatttgaaaaaggttagcttaggcaataaaagagaatttgaaatgtacataatacccatttggaatttcacaaagttgggtcaccaatgcccaaaacacatttaaatatatttatgtacctcatttattatctatttggtcacagattacaatcaacttcttaaaaatatttattgtcacaatatatgccattcaatttgatatgatttcaaatttgagtaaggctgtaggtagtaaatggaatcacccctcataaatccgtcaccatgcgtatgttcatgtccatgtcctcaaagtaatccaaatcctcgtcgaaggcactgcacaaatgctgatccatgccgttgcaattttgggacaatcttctcggttttctcagcccctcgaatgcctttttgaaactaactaccttctcgttatctcgacttgagttcttgctaagaattttacacagttgtttgagattggccacaactatcaccaggattacgccgatgagcaggtacatgactatcaaagctggatgcggaatatttgtgttcatgtccaactgacctgcgatgtcctcgtggtaatcctttctcgaacgatcagttgtagtggtaactggaatatatatatatatatatatatatatatatagttataaaaaaattgattataactcttattcttacctgtaatgtgctggctactaaatattgaaggttgagacaactttttgtttcttgttggtattgttgaagtttctgttaaagtttcatgggtgttcagtaactttttagtacttatttgagttcttggaaatgttgtcgaatttgtgctcgtccttggtgttgtaaaacttctgcttgcctctaaagaaatgctaaatactttttccgtcgttgtatttcttgatattgatgtagttgttgtgttcgctgagtttagaaaaacattagaccctatgtccaactccttcacacacttttcaaaatagttgggacaacaattattgttcagaatacaggagtcgtcacagccgcagctcatgacaataccctcgtcggaaaaaagtggactgcccggactgatggatccacagcgaaacgtacagctcatcatgtcgaagaccaggggctcctcgctgctggacatcgccgaggatgctgattcggtggtggtggtggtgctatacccatccactccacattcgctgcccgtcatcagtttgacgtcatcgatggcaatgtccccgaattgtgacctcgcatccgtggctgtgaataccacctggaagtcctcatgcatcttgtcgatggtgattgtgttctccagccaatgggttccctgcgagccagttatttcaaatttgctggaactggaggaaaataaactttcagtatataaaagcagctagtataccatatggttgtagtaactcattcgtatacaattttcttgaagaaactaaattgagctgtttacatacttcgacctaaagctgttccacatgtcatcgatctgcagcgaggctggcttcacggacaacaccagtctatccactccagctccgaacatgaagtagtgaaaccgaaagcagcaggcgacattcaaacagagagatctcggatataccggcgatacgaagtggtaactgccataagcctcgatctgggtctccatgcgcatatagtgtccacccgaagtgtttccaaaggtgtgatcgtatcgtggtcctgttctggggtggtgaaaatccgtcaccgcactgatcctcttccagggcaaccagatggtctcctccgcagaccagccgcactgatcctcgctctcgaagtcgcaggagtggtccatcgtgtggttgcttctccggcaagctcccagctgtgtgctccacttttctccatcgcagaaggcagtgcgacttccgtatagaacgaaaccatctaaacacacgatttccgcctttacaggattatctaaaacatatccgtttgtgggatcctcaggcttatcgcatcctttcccttaaaattaaaatgaaaaaaatcaaaattttgttgataactagtatgatgatatgaaatgttcttgtttcatattcttagttcgatttgaaagggtgtacattttcgaaaactgtcaacactcactggcacaaaatggtttcttctcgcgaagtcgaccatcccgatcgcaggtgtgtattgaatttccctgcaacacaaatccgcgattgcattggaaaatcactaaattgttcgatcgtgtgaagaatcgtccattttccaaatctaacgatccttcgcagcttccgtttgcggtatccaaactgtaggctaaaatcaatgtcagagccaagaaaaattgcatagctccgattttttttttcttcaattctgtatgtatattaaggagattcgaaaggacagtgactgctacctgatgctcaactgattcgagtcctgattcaagtcgagtccttaagggcgggttcgtcaccagctgatttttcgcagctgcaaaaaaaaagatgttaccgttcattaaatcgttttgaatgtaaatcaacatctttaccgttgctggcaatcgatgtatagtgtggccatataaacaaaaaaatgtttcatttaataaataagattttatttaaaaatacaattatttgacaattatttgaaaaaaatacatttttctaaaatgcgaatgtatataaaaacgtatttttgaaacgtaaacagcctgaaatcaacagtcaatccttgcaattctttaatttactgacatccaaatttttcacataatgataacgcacaatttctgtcattaagatctataagggtgctcagaagtggctagggagggagggaggttctcctccaaggagcacataagaataagccaaacatcaggtgtaagtaaatgaaagaccgagtaagaatgcgaggaaagcaaaacgccaacatgagcagctcataaaaacccaagaaggcgaaatgtttaggtttaagtgggcgtcctcttggaggagatggcgacgtggatgggtggctgggttctaagatggctgggaggggggttctgttgtccgggttgacttaccggaatgaagccgcctgcatgccgtggcatgcccggcctgcatttagctaatccacaagtttagcacaacaaaggcaaaagccatggaaggcacaactcaaggtccttgcgatgacgacgatgactacgagtggaaatggccgaggacgatggtgagaatgtggacgagggactggtactgggactggcgtaagtggatgcgggacgacgactacttgacagtcttggctcggctttgtttttttttttttggtggaacgaaggcaccacccattttctcgtcgcccaccaaaacgctggctgcatcttaaattgtgtttcttgaattttagtatttcc

SEQ ID NO: 18884 - DNA, 2053 bp, DROSOPHILA
aggtagcagtcactgtcctttcgaatctccttaatatacatacagaattgaagaaaaaaaaaatcggagctatgcaatttttcttggctctgacattgattttagcctacagtttggataccgcaaacggaagctgcgaaggatcgttagatttggaaaatggacgattcttcacacgatcgaacaatttagtgattttccaatgcaatcgcggatttgtgttgcagggaaattcaatacacacctgcgatcgggatggtcgacttcgcgagaagaaaccattttgtgccaggaaaggatgcgataagcctgaggatcccacaaacggatatgttttagataatcctgtaaaggcggaaatcgtgtgtttagatggtttcgttctatacggaagtcgcactgccttctgcgatggagaaaagtggagcacacagctgggagcttgccggagaagcaaccacacgatggaccactcctgcgacttcgagagcgaggatcagtgcggctggtctgcggaggagaccatctggttgccctggaagaggatcagtgcggtgacggattttcaccaccccagaacaggaccacgatacgatcacacctttggaaacacttcgggtggacactatatgcgcatggagacccagatcgaggcttatggcagttaccacttcgtatcgccggtatatccgagatctctctgtttgaatgtcgcctgctgctttcggtttcactacttcatgttcggagctggagtggatagactggtgttgtccgtgaagccagcctcgctgcagatcgatgacatgtggaacagctttaggtcgaattccagcaaatttgaaataactggctcgcagggaacccattggctggagaacacaatcaccatcgacaagatgcatgaggacttccaggtggtattcacagccacggatgcgaggtcacaattcggggacattgccatcgatgacgtcaaactgatgacgggcagcgaatgtggagtggatgggtatagcaccaccaccaccaccgaatcagcatcctcggcgatgtccagcagcgaggagcccctggtcttcgacatgatgagctgtacgtttcgctgtggatccatcagtccgggcagtccacttttttccgacgagggtattgtcatgagctgcggctgtgacgactcctgtattctgaacaataattgttgtcccaactattttgaaaagtgtgtgaaggagttggacatagggtctaatgtttttctaaactcagcgaacacaacaactacatcaatatcaagaaatacaacgacggaaaaagtatttagcatttctttagaggcaagcagaagttttacaacaccaaggacgagcacaaattcgacaacatttccaagaactcaaataagtactaaaaagttactgaacacccatgaaactttaacagaaacttcaacaataccaacaagaaacaaaaagttgtctcaaccttcaatatttagtagccagcacattacagttaccactacaactgatcgttcgagaaaggattaccacgaggacatcgcaggtcagttggacatgaacacaaatattccgcatccagctttgatagtcatgtacctgctcatcggcgtaatcctggtgatagttgtggccaatctcaaacaactgtgtaaaattcttagcaagaactcaagtcgagataacgagaaggtagttagtttcaaaaaggcattcgaggggctgagaaaaccgagaagattgtcccaaaattgcaacggcatggatcagcatttgtgcagtgccttcgacgaggatttggattactttgaggacatggacatgaacatacgcatggtgacggatttatgaggggtgattccatttactacctacagccttactcaaatttgaaatcatatcaaattgaatggcatatattgtgacaataaatatttttaagaagttgattgtaatctgtgaccaaatagataataaatgaggtacataaatatatttaaatgtgttttgggcattggtgacccaactttgtg

SEQ ID NO: 18885 - protein, 599 aa, DROSOPHILA
MQFFLALTLILAYSLDTANGSCEGSLDLENGRFFTRSNNLVIFQCNRGFVLQGNSIHTCDRDGRLREKKPFCARKGCDKPEDPTNGYVLDNPVKAEIVCLDGFVLYGSRTAFCDGEKWSTQLGACRRSNHTMDHSCDFESEDQCGWSAEETIWLPWKRISAVTDFHHPRTGPRYDHTFGNTSGGHYMRMETQIEAYGSYHFVSPVYPRSLCLNVACCFRFHYFMFGAGVDRLVLSVKPASLQIDDMWNSFRSNSSKFEITGSQGTHWLENTITIDKMHEDFQVVFTATDARSQFGDIAIDDVKLMTGSECGVDGYSTTTTTESASSAMSSSEEPLVFDMMSCTFRCGSISPGSPLFSDEGIVMSCGCDDSCILNNNCCPNYFEKCVKELDIGSNVFLNSANTTTTSISRNTTTEKVFSISLEASRSFTTPRTSTNSTTFPRTQISTKKLLNTHETLTETSTIPTRNKKLSQPSIFSSQHITVTTTTDRSRKDYHEDIAGQLDMNTNIPHPALIVMYLLIGVILVIVVANLKQLCKILSKNSSRDNEKVVSFKKAFEGLRKPRRLSQNCNGMDQHLCSAFDEDLDYFEDMDMNIRMVTDL

SEQ ID NO: 18886 - DNA, 3282 bp, DROSOPHILA
gcaggcaatggccacggccaggacagttaggaacagcttcatgttgattacttgagtgcaagtggatactccgccgacgggcagtgatttatataccccccaaatccgacgtattcatatcgctagagatcttcaccattcgccactcgaaagttctaaacactccggtcggactaatcttatcaaattaatttcgcacgcctccaaaatgcggcactatcattacagggtactccaatgatctacccatccgatttggacactttccggctcatgacttgccaccactcaatctgacgattgcccactgccactcattcattagaagattgtccgaccctatcaacatggacgtgcggccactcggagctgatcttaagataggtgccaataagcccccattcatgcccagagccacaactcaatggaacactcgaacaggagcgcacagagattagggcacacgtcctgtggtcattcaaaagtagtattacagtataattcgcttagctgcatcgatagttagctgcatcggcaagatatctgcattatttttccatttttttgtgtgaatagaaaatagaaaatagaaaaaaaaaaattaagttagctgcatttttaagttacctgcatcgaggcattgtgcaaagtactcgaggcagctaagcgaattatactgtacttaacgttcgtaagtgcgctacattgtttaggttttaatattaaacgcactcccattaaagttattaaaattaaaatttaaaacaataaactaaacatttacaagtaaaaagtgaaatattttaaagacgaaagttgtattattttttagaaatatatttcatatatttaataaatatatcacttcgcttttgtgatttgtcagtataataatcctttggaatatataatcttttggtaaatatatatattatttcattatctgattattgactagtatagaccacagttgctagtattcctacttatgtctatcatggctacatatatagtgtttaatcatgttttccagataacaagtgttcgattgccaagaaaccatcccatttcttagccattcatggcttcttatctataagacgtttattatagattcggattctgcatgactagacttttgaaacttaaaaatatccatgtgattttttaaatgtaataaaaccagaaacataaaggcgtcaaattaattgttatgcatttcgtttatttaaaaataaagataatcaagcttagtagtaagcaacgccggagttgtcgcggatccagtccagctggttggtaacacgggtgaatccggagggcaggccagcggtgcaaccgttgccggaaacccaggaggtgacacccaccaggcggccaccgtcgtggagaaccagggggccaccggagtcaccggagcaggtggactttccgccggaggtggacacacagaggatgccatcgggctgggtgccgtaggtgcgggagcattccgagttgctaatgatctgcaggtcgacgcactccatccaatcgggctgggatccggcggtggtcagtccccaaccgcaggcgacggcccaatagttgtcgtacatgttgtagcgatcgttgaagctgggcagctccaccttgttaaccatgtgccagaagtccacgtggggggtgcggatcaaggcgatgtcgttgccgttctggttgggccagttgtggttctggatgaagtcgccgctgccgacggtgtgggtgaactgggcgttggtgcgccaggtggctccgtagtagatggtcacctgggaggcgccgttggtgcagtgagcagcagtcaggacccaatcgtgggcgatgatagaaccaccgcaccaccagccgccgttgccgctgaagcccagacccacggtgtagggagccttgccctcgtaggctggatatccgttcacaatgcggccattgatcttggtgtccttgggcaggtccttgggatgaacctgctggacagtctcggcggagacagcggccaaagccagagccagtacaacgaacactttcatggtgattggatcaatcgtggtctgcgccagacttccatccgtttttattgcgccccttatcgctgtctggagtagcccccactcggcgttatcctatctctaagaaattcgccctctgataccaatggaaattaattgatagcacgtctaagaacatcttgataggcaaaaaaaataataactcgcttttaggaaaaattctaagctgattatcttcgcttacaaccgacgtaggcaatataagaaaacagaaatgattttaatttaatttaaggactaaataatttatacataatatatacataataatgtatacatagagtatgtaaaatgtaaaaataatttaaaataggcgcccaatgtaagatgtaaggattgaaaaatggctcacctggtcacacagagccatgcatttattgtttatatattccgccaaattttatcaattgatgtcgcagcatgtccacttgcagttcatccgagatagcggagaagaagcgcattgcgctggccaaattgcaggccaagaaatcccagctgctggccagcgcacccgcaaccaatggaaaatcaacaacgtctgcaacaggtgcgacgcaacatgcgaataatggaaaatcaaatcccaatcaaccgcaggccaaatccccattgaatttctaccgatcaccgacgggggagcagaagaagatcaacaggagcggtcccacgcccggtgacaacaagagctcatcctttctgaacgctctgaaagcaatcaaacagacatccaaccgggaattgtcccgcggagcagcacatccttaccagcggccaaatggagggaacgaaagaaacaagcccactctttcactgagttcggataaggagaaaccggtggctgtgctactcggaaactccatcacgtgtaatctctacttgatcagcacacatcggtttgctgcccaaacctcaggatatcacgaacagctcgtgaccgtgttcaagaacatgcccaccaagtgctacgatggccaaacccgtatctggagtttcgatctgtcggactaccaatccctgaaaactcatgcagcggatctaaagccatatgttcacatgaatggcattccgaagaaggtgctggatctctgcggccagccgccagtagttccggaaagaagtgttttagcttccatagaaccgaagctggcggaccagctaatgcccttccaacaggatggggtatggtaag

SEQ ID NO: 18887 - DNA, 1282 bp, DROSOPHILA
cgtcggttgtaagcgaagataatcagcttagaatttttcctaaaagcgagttattattttttttgcctatcaagatgttcttagacgtgctatcaattaatttccattggtatcagagggcgaatttcttagagataggataacgccgagtgggggctactccagacagcgataaggggcgcaataaaaacggatggaagtctggcgcagaccacgattgatccaatcaccatgaaagtgttcgttgtactggctctggctttggccgctgtctccgccgagactgtccagcaggttcatcccaaggacctgcccaaggacaccaagatcaatggccgcattgtgaacggatatccagcctacgagggcaaggctccctacaccgtgggtctgggcttcagcggcaacggcggctggtggtgcggtggttctatcatcgcccacgattgggtcctgactgctgctcactgcaccaacggcgcctcccaggtgaccatctactacggagccacctggcgcaccaacgcccagttcacccacaccgtcggcagcggcgacttcatccagaaccacaactggcccaaccagaacggcaacgacatcgccttgatccgcaccccccacgtggacttctggcacatggttaacaaggtggagctgcccagcttcaacgatcgctacaacatgtacgacaactattgggccgtcgcctgcggttggggactgaccaccgccggatcccagcccgattggatggagtgcgtcgacctgcagatcattagcaactcggaatgctcccgcacctacggcacccagcccgatggcatcctctgtgtgtccacctccggcggaaagtccacctgctccggtgactccggtggccccctggttctccacgacggtggccgcctggtgggtgtcacctcctgggtttccggcaacggttgcaccgctggcctgccctccggattcacccgtgttaccaaccagctggactggatccgcgacaactccggcgttgcttactactaagcttgattatctttatttttaaataaacgaaatgcataacaattaatttgacgcctttatgtttctggttttattacatttaaaaaatcacatggatatttttaagtttcaaaagtctagtcatgcagaatccgaatctataataaacgtcttatagataagaagccatgaatggctaagaaatgggatggtttcttggcaatcgaacacttgttatctggaaaacatgattaaacactatatatgtagc

SEQ ID NO: 18888 - protein, 266 aa, DROSOPHILA
MKVFVVLALALAAVSAETVQQVHPKDLPKDTKINGRIVNGYPAYEGKAPYTVGLGFSGNGGWWCGGSIIAHDWVLTAAHCTNGASQVTIYYGATWRTNAQFTHTVGSGDFIQNHNWPNQNGNDIALIRTPHVDFWHMVNKVELPSFNDRYNMYDNYWAVACGWGLTTAGSQPDWMECVDLQIISNSECSRTYGTQPDGILCVSTSGGKSTCSGDSGGPLVLHDGGRLVGVTSWVSGNGCTAGLPSGFTRVTNQLDWIRDNSGVAYY

SEQ ID NO: 18889 - DNA, 8258 bp, DROSOPHILA
tcatactgctggccggatttgaaacctcctcagccctgatgggattcactctctatgagttggccaaggctccggatattcaagaacgactgaggagtgagctacgagaagccttcatctccactgctaccctaagctatgacacactgatgactttgccctatctcaaaatggtgtgtttggaggcactgcgtctctatccggctgctgctttcgtcaacagagagtgcaccagttcggcatccgagggattctcactgcaaccgcatgtggatttcatagtgccaccagggatgccagcatacatctcaatactcggcctccatcgcgatgaaagggttagatttaaaaccaaaggtgatgattatcccaacttacttatgtcaatctaaattccagttttggccggagccctgcgtctttgatcccgagagattcggtccggagcgatctaggcacatccacccgatgacctacataccctttggagcaggtccacatggctgtattggtagtcgcctgggcgtactccaattgaaactgggcatagtgcacattttaaagcaatattgggttgagacttgcgagcgaacagtatcggagattcgctttaatccaaagtccttcatgttggagtctgagaatgagatatacctaagattctgcaggagtagtttgtagagttataggcatcctaaaacaatcggctgtgatatgtaatcacctttgttcctataatctaaatagaatagataatctaaatagctccctaaaatttgaacttaaaacgaaactgaaagtatttatgatagtatatttaaggtttccttacactcctggatcaatgaatcacaatagaaaattatcttcatgcaagttacttattcatttttgccaaagttagatgttttcttttaacgcttacccccttttataaaatctacccaaggcagattttttggccacacacacatccttgaaatgcttatattaatatgacttaattctgtggattcaacttgcttagcttgtcttcgatgtccttgatgcgacaccggatttccggcgccgaatcgcgctggaacttttccaaattcgattcaaagctctgcttgatcaacctcagtggctgctggtttccgtttccgcttccgctcagccgcttgatcagcataagaacgatgttgagcgcctcctttttcaaaccggaatgaggaactccagcggcaagagcaactgcagccaaaacatctgtgcatatcttctcgacaatggcctctcgggtttttggcgccgtctcctctgtcttgatcttcttctcctggtttatctgagtcaaatccggcacttgagcagactcatcaaagacatgaagtctttcgatgtacttagtgagtgctgccagcagactgacttgcactgggcgagtgctctccgccagaatgctcgtacagttttcggcaaagaagagttggtagcggtgctgcgtctcgatggagtgacgcggccaggatttgcccagtgtctcccacacaacctcctttagtcgattgagtgtttgagcccgcttgttgcgctcgtcggcagacagttcctgactggtgttgggctcgtcctcgtcgtccgactccttgcgcagttccttcttttccagcaggttccagctcatgttgtacacttcctcaaagcgatccgcttccagttgatcgagaatttcgccaagagaagccagggccatggtgcggtaaacaggttccctctttcttgcttccctcatggccgcgtcgataatgctggaacagatttgatggttccgatccaatcctttggtgagtgcggccaaagcttgcaatagccgctctttgccctcaaaagtgcgtccttgcagaccgcttagaaggagtttgatcagcctcaatcggtcgggctcatccaaggagctacttaggcgagtggctatcgtttggatcgcattcgctgcctgagctttacgcgaccagctggcatcggttagagatgactccagtttgggtataatcacatttaaattgagacggatgcccgcgtcacctgggctaacgtcgtgccatagatccttccacagctcgacattagctttcgtctcttcattgggctcttcgtgcatggcaaagaagatcagcggcaacatactgtccatgtagtccttgagcagttcatggtgacgcttgttaatggactgaatggtaagtgcaatggagcgatttcctggctgctcggcatataactcttccagcttagtgaatagacttttaatcgactgctctttggccaagcccaacaggtggccaatggcactggcgttgtacttgcgcacagtggcgttgcgattcttgatgcccacaaagcaggcacgaatgtattttcccaccaatggtgtcatctccttgcctaagcgaatgctaatctgtaatgatttcgatgctgtaaacgatttaaatctatgcataataatacctaccagacaaacaaaatgggcacagccaatcttggttccgaggttgacactacccttcatgagctccagcacttcgggcgtcatcttctccaaaacgctatagtcgatataacggacacacttcccaatggtttccatggtatgaagcgacttggcggcctccgctcgtagcgtatccaccgcctcctgggcctcgttgtccgcacccaagcgagtggatacgtaggagagcttggtgttctccaactcgccagtggctcgtagcaggcagggaatcagggtggcgagatgcggggcaataagcgatcccgaggaatcaatcatgtcggaaatggtcttaatgctaactctacgtatctcgggcactttgtgacccactccggtttctagcagaaatggcagtatcgatgacgctacggctgtcccggatttgccatgatccgatgacgatgcgatgacacacagcttgccgaggaatgaagcagttccgtgggcagcgacccgtgtgccctcatgaatgtcatccatcacacgaaacagctggaaccatagctctttcagctccggctcagggacctcatccacttccatactgttatcggggagagcacgacgaaccggctcctccgagcgtagcttaagcccgttgggtcggtttaggagatcccttactgccaggcagcaggcgattcgcactcgccactccttgcaagtgagattgtccagcagctcgcgtaatatttcccagtagtaacgctcggtcacttccttcgagtcagtcacaatcgtatcccaaatggagatcatcgagttctgaatcttgggtgtgggatcgtacttgtaccgatagaggcgcggaatgatcttgcccagatatggctccatcttctgccttgactcggcagaaagggttttcaatccgaaagcagcacccagtttgctggtccatgtggcattatgattggccagctgcatgaactgatagatcatgtccggctgattgagatcggatgccagggaacacagctccttgtaggtggtaatgttgcctcccgttggagttttacccagcattccttcggcaaagagttcagtgtctgcggttacttgattgacctttcgttttcccccaatcagttgatccaacagcgagtttgccaaatcactttggcttccagaatccgatatcgagtagaccagccccaggccgcgagaagccacgtcctgaacaaactctgtcaaagtaacacagaaagtttgtcaatattgcacaaaatatttaaggtcttaattaacctaccgctgtcatctgaaagaagttcggtaaaagcgaactgcaacagctcttttttggccaatacagctggacgttggctgcagtgctttaccacagctagaagccacacggatatggcctgacgggaatgcggattgggatcggtgaccagacgtattagagagttcaggaactgatcaaagtcgtcatcgttgcagtgcttattaacaaacttctcatcgggttgccccttgttcacatcatagccacaaagtgtgtttacgatcgcttccgaaatggctatgtttagagcagcatccttttgaatcttggtcagggtaagaaacttatccaggttgcgtttggtgaagtgttcgccgtcgccaatggccagatatccgagacatctggctgagtcctcgcgaatcttttgacgcgctgaggagcttcgcagtaattgaaagacgacgccaaagataacaagttttgtcgaggaatctatgctcgtatactcggtcatctcctcgtcgtcgtcgtctccatctttggatggaacctggatctccacggggacatttggtatttccacagccttgccgatcatagagatgcatttcactgctgctgacaccagcaaccattgggattcacagaggcattttgctgaataaaaacaaagttacagatatttttgtgcatcatcctaaaatgtcgttgcgataacttacagattatttttaccgcattaacaaactgcggccaggcagcaaagtccttggtcttattctcctgcttaagcatagcaattttgcgattgaacgtgtgacccaccacgagaagccatccatgcttgtgctccaatgttttttgcgttaagctattcaggcattcacccacttcttcatcgaatttctcatcggagagaccaaaagcccagagaataccatagacttgagccacgttgatacgcatagtctccgatacatctttcaaagtgttgcccagtggttccagcaaatgcagctgcttagcagcaaagagttccggagcggcattcaacagatcatataggcaaatgagattggattcacctaggaattaaaaatagttataaatttacatttcaatccctttgctaacgtacttctcttggcctctacgcttcgctgcacaaactgcgcatattgatggagtgcattatcctccgtatcttcgtaatgcaaggtgatgtactcgcgcagctcatgggtgtacttctcgtcgccgggagcggcaaccactccagccgagtaccacaagcacagacgcagataatctagaagctcctcgtatacctccaggctgtagggcagctttgtacggccaactaccacgcaggccgtgttcttttttaggcgtttttcggccatctcatggacgtgcgacatcatcacctggaagctgggtagcataaccctacgctgctccagggacaagtgattaaagtcacttatagactcgctgcttatgcggttcttagaatgatcgatggaagagagcatgctgtaatttatgtgatccttcttcgaggtgccgtacaagtaagtggtcacattctcgcgtagggaatttctgataaatgcaaatcataattaattacagaaattagcttcatagaactataacaaacataccgctctcctgcgatgagtagcaaaaggtatctggctggtgcatagtactccggatagcagctggtgaggaaaacactggtcacattctgcacgatctgcactttggactcagcattgtccagcagcatggccaatagcaggtgctgttggccatccagtttcacgcttgaggaatcgacattcttatccacctccattgcatcgctcttctccttggtcttccaagcgaatgcgggagccatcgaaaccaatgcttcccttatggatgaatgcaattctggtgcacagctggccaggttgttgaagtatccaaggactagtttcagatcctggcttacgtcttgcggaaaactgcgagcgtgttgcgccaaagcggaatatgctgcattttgtacatcgttcggttcgttggagtcacgtccaatgattttggtgatgccggtaagtattaccttggaaaccttcgagaccagctcgcggggaccactagggtaacaaaaacgtatttaattatatgggttggaaatttttataaacttactctctgaggagcagttccataaactgtagcgctaggaccttgcacttctggttggtgtttgtgccaaagaagccatcaaaggtcacctgcaagcccttggtgacgttaatgcttttgccacggcacttgatgaggtactgcagcaatttttggcgcactcgggcgcagcagggacgtgtctggcggtcagttatcttgctttggttgccagcgaacagagtgtacaacggggcagtcaccgctgggttgctgaaatccagcattgtacagagcttgctcagctctgtgattgctggagtggctacgctgaaacgtgtgtccgcggaagccaccaccagtggcacgaatatctgcaaatcactaaacacactggcgcacaggaaacgaactattcccttcttgaccttttccagttcttcggcccgccaattgtaggcgatgatgcgtgtaaaactgtacgggctcagacccggaggcacatcctgttcctgggtgatgccatagggcaggaggagcacatcctggagcagtgccaaaaagtttgcacagatggctggcttgtcctgcagatcaagtagctttgagcgctgcgtcgggtcgtcgggaatcttcatgtccgacagtacgggcagcagcagggcgaacagcttgtcctggtagctctccagcttgtcctcgcagcccaccactttgctggccagcgcagtctgttgttccaacgccaggcgcggaaagcccatggtaatgaatatgatggcgaagttcttgaggaaggtgctgctatcctgggcggcatactgatccagcagtgcctctacgggtatttgcacatgtccgcgcgacgacaggcgcctcttgatatgggtgagcacttctacgacctaaacaaaatttagtgcattagtcaaccggtcaattttgcaatgtcacgatgcgagaagggtgtacaaaaccacccagccaatcgttgtttgaccatccacttgcctttgtgcgcaccacattgtggggcgagttcattttgaggatcaccggggtcaggaacttgcccacagcggcttccagcttctcatccgagtccgcatttcccagacgcaacaggacgcgctccagaagctctgaaatcgaaggattgggtgggttttttttttttggcacagctttggtgtattatcagcccatctcttctattcgctgatgaaacataaagtttgatgcacacaatgctaattataatttttaccaatttctgcattcggtccagtttccattttttttgctttatttttgtttccctctttcagtgttaccagctgttgtgctgaacatttcacagatgccaatttttggctacattcgaaagctttgcaacactcgaacttttcgaaatgaaaccgccgccaaattcaaaatgtaaagcgaaaatctttgccattgaaatcattcaataaaaacataatttgtaatcaatcaacttttatttaagaaaatcatattaataatgtacattcaatgcaattcgtgtccatattcttgcggtcatctttagtttctgtaaaaaataagaaatcgtgtcattagtatggagtatttgcatttatttcaatatgcttttctttgataaatatcagtattctcatttttattgagaagagtcaaggttcttcagcaatttgttttatgaagaccgtcatgattttatcatcagaatgccagttaatagctgccttacaaaataatatattttacacaccttttaatggaatagctggctgcacgactgctgaaatgctgtggaaactgagagaagaactggagaaaacccatggttaaagttacttttttttgttttattcaaaaagaataattgctacaaatattatcgcccgaatggtagttgtccgctctagtacttcttgaagctcttcttggctccctgacccttgctgactttcaggacgttgaagcgcacagtcttggacagaggacggcactcaccaatggtgacaatatcgccatgctcaacatctctgcaaattaagaaatagcacggattagtaggaggccctacagtataagcacaaagctagcgcacaaggcttagtttcagtatttttacatttagtaaaaagagtcaagttctttcagcaatttgttttatgaagaccgtcatgattttatcatcagagtatgaggtattaggtctctttttacatcttccatgtcatgaagatggaaaaagggttttagctctagctttattgatatgtt

SEQ ID NO: 18890 - DNA, 5673 bp, DROSOPHILA
atggaaactggaccgaatgcagaaattgagcttctggagcgcgtcctgttgcgtctgggaaatgcggactcggatgagaagctggaagccgctgtgggcaagttcctgaccccggtgatcctcaaaatgaactcgccccacaatgtggtgcgcacaaaggtcgtagaagtgctcacccatatcaagaggcgcctgtcgtcgcgcggacatgtgcaaatacccgtagaggcactgctggatcagtatgccgcccaggatagcagcaccttcctcaagaacttcgccatcatattcattaccatgggctttccgcgcctggcgttggaacaacagactgcgctggccagcaaagtggtgggctgcgaggacaagctggagagctaccaggacaagctgttcgccctgctgctgcccgtactgtcggacatgaagattcccgacgacccgacgcagcgctcaaagctacttgatctgcaggacaagccagccatctgtgcaaactttttggcactgctccaggatgtgctcctcctgccctatggcatcacccaggaacaggatgtgcctccgggtctgagcccgtacagttttacacgcatcatcgcctacaattggcgggccgaagaactggaaaaggtcaagaagggaatagttcgtttcctgtgcgccagtgtgtttagtgatttgcagatattcgtgccactggtggtggcttccgcggacacacgtttcagcgtagccactccagcaatcacagagctgagcaagctctgtacaatgctggatttcagcaacccagcggtgactgccccgttgtacactctgttcgctggcaaccaaagcaagataactgaccgccagacacgtccctgctgcgcccgagtgcgccaaaaattgctgcagtacctcatcaagtgccgtggcaaaagcattaacgtcaccaagggcttgcaggtgacctttgatggcttctttggcacaaacaccaaccagaagtgcaaggtcctagcgctacagtttatggaactgctcctcagagatggtccccgcgagctggtctcgaaggtttccaaggtaatacttaccggcatcaccaaaatcattggacgtgactccaacgaaccgaacgatgtacaaaatgcagcatattccgctttggcgcaacacgctcgcagttttccgcaagacgtaagccaggatctgaaactagtccttggatacttcaacaacctggccagctgtgcaccagaattgcattcatccataagggaagcattggtttcgatggctcccgcattcgcttggaagaccaaggagaagagcgatgcaatggaggtggataagaatgtcgattcctcaagcgtgaaactggatggccaacagcacctgctattggccatgctgctggacaatgctgagtccaaagtgcagatcgtgcagaatgtgaccagtgttttcctcaccagctgctatccggagtactatgcaccagccagataccttttgctactcatcgcaggagagcgaaattccctacgcgagaatgtgaccacttacttgtacggcacctcgaagaaggatcacataaattacagcatgctctcttccatcgatcattctaagaaccgcataagcagcgagtctataagtgactttaatcacttgtccctggagcagcgtagggttatgctacccagcttccaggtgatgatgtcgcacgtccatgagatggccgaaaaacgcctaaaaaagaacacggcctgcgtggtagttggccgtacaaagctgccctacagcctggaggtatacgaggagcttctagattatctgcgtctgtgcttgtggtactcggctggagtggttgccgctcccggcgacgagaagtacacccatgagctgcgcgagtacatcaccttgcattacgaagatacggaggataatgcactccatcaatatgcgcagtttgtgcagcgaagcgtagaggccaagagaagtgaatccaatctcatttgcctatatgatctgttgaatgccgctccggaactctttgctgctaagcagctgcatttgctggaaccactgggcaacactttgaaagatgtatcggagactatgcgtatcaacgtggctcaagtctatggtattctctgggcttttggtctctccgatgagaaattcgatgaagaagtgggtgaatgcctgaatagcttaacgcaaaaaacattggagcacaagcatggatggcttctcgtggtgggtcacacgttcaatcgcaaaattgctatgcttaagcaggagaataagaccaaggactttgctgcctggccgcagtttgttaatgcggtaaaaataatctcaaaatgcctctgtgaatcccaatggttgctggtgtcagcagcagtgaaatgcatctctatgatcggcaaggctgtggaaataccaaatgtccccgtggagatccaggttccatccaaagatggagacgacgacgacgaggagatgaccgagtatacgagcatagattcctcgacaaaacttgttatctttggcgtcgtctttcaattactgcgaagctcctcagcgcgtcaaaagattcgcgaggactcagccagatgtctcggatatctggccattggcgacggcgaacacttcaccaaacgcaacctggataagtttcttaccctgaccaagattcaaaaggatgctgctctaaacatagccatttcggaagcgatcgtaaacacactttgtggctatgatgtgaacaaggggcaacccgatgagaagtttgttaataagcactgcaacgatgacgactttgatcagttcctgaactctctaatacgtctggtcaccgatcccaatccgcattcccgtcaggccatatccgtgtggcttctagctgtggtaaagcactgcagccaacgtccagctgtattggccaaaaaagagctgttgcagttcgcttttaccgaacttctttcagatgacagcgagtttgttcaggacgtggcttctcgcggcctggggctggtctactcgatatcggattctggaagccaaagtgatttggcaaactcgctgttggatcaactgattgggggaaaacgaaaggtcaatcaagtaaccgcagacactgaactctttgccgaaggaatgctgggtaaaactccaacgggaggcaacattaccacctacaaggagctgtgttccctggcatccgatctcaatcagccggacatgatctatcagttcatgcagctggccaatcataatgccacatggaccagcaaactgggtgctgctttcggattgaaaaccctttctgccgagtcaaggcagaagatggagccatatctgggcaagatcattccgcgcctctatcggtacaagtacgatcccacacccaagattcagaactcgatgatctccatttgggatacgattgtgactgactcgaaggaagtgaccgagcgttactactgggaaatattacgcgagctgctggacaatctcacttgcaaggagtggcgagtgcgaatcgcctgctgcctggcagtaagggatctcctaaaccgacccaacgggcttaagctacgctcggaggagccggttcgtcgtgctctccccgataacagtatggaagtggatgaggtccctgagccggagctgaaagagctatggttccagctgtttcgtgtgatggatgacattcatgagggcacacgggtcgctgcccacggaactgcttcattcctcggcaagctgtgtgtcatcgcatcgtcatcggatcatggcaaatccgggacagccgtagcgtcatcgatactgccatttctgctagaaaccggagtgggtcacaaagtgcccgagatacgtagagttagcattaagaccatttccgacatgattgattcctcgggatcgcttattgccccgcatctcgccaccctgattccctgcctgctacgagccactggcgagttggagaacaccaagctctcctacgtatccactcgcttgggtgcggacaacgaggcccaggaggcggtggatacgctacgagcggaggccgccaagtcgcttcataccatggaaaccattgggaagtgtgtccgttatatcgactatagcgttttggagaagatgacgcccgaagtgctggagctcatgaagggtagtgtcaacctcggaaccaagattggctgtgcccattttgtttgtctgattagcattcgcttaggcaaggagatgacaccattggtgggaaaatacattcgtgcctgctttgtgggcatcaagaatcgcaacgccactgtgcgcaagtacaacgccagtgccattggccacctgttgggcttggccaaagagcagtcgattaaaagtctattcactaagctggaagagttatatgccgagcagccaggaaatcgctccattgcacttaccattcagtccattaacaagcgtcaccatgaactgctcaaggactacatggacagtatgttgccgctgatcttctttgccatgcacgaagagcccaatgaagagacgaaagctaatgtcgagctgtggaaggatctatggcacgacgttagcccaggtgacgcgggcatccgtctcaatttaaatgtgattatacccaaactggagtcatctctaaccgatgccagctggtcgcgtaaagctcaggcagcgaatgcgatccaaacgatagccactcgcctaagtagctccttggatgagcccgaccgattgaggctgatcaaactccttctaagcggtctgcaaggacgcacttttgagggcaaagagcggctattgcaagctttggccgcactcaccaaaggattggatcggaaccatcaaatctgttccagcattatcgacgcggccatgagggaagcaagaaagagggaacctgtttaccgcaccatggccctggcttctcttggcgaaattctcgatcaactggaagcggatcgctttgaggaagtgtacaacatgagctggaacctgctggaaaagaaggaactgcgcaaggagtcggacgacgaggacgagcccaacaccagtcaggaactgtctgccgacgagcgcaacaagcgggctcaaacactcaatcgactaaaggaggttgtgtgggagacactgggcaaatcctggccgcgtcactccatcgagacgcagcaccgctaccaactcttctttgccgaaaactgtacgagcattctggcggagagcactcgcccagtgcaagtcagtctgctggcagcactcactaagtacatcgaaagacttcatgtctttgatgagtctgctcaagtgccggatttgactcagataaaccaggagaagaagatcaagacagaggagacggcgccaaaaacccgagaggccattgtcgagaagatatgcacagatgttttggctgcagttgctcttgccgctggagttcctcattccggtttgaaaaaggaggcgctcaacatcgttcttatgctgatcaagcggctgagcggaagcggaaacggaaaccagcagccactgaggttgatcaagcagagctttgaatcgaatttggaaaagttccagcgcgattcggcgccggaaatccggtgtcgcatcaaggacatcgaagacaagctaagcaagttgaatccacagaattaa

SEQ ID NO: 18891 - protein, 1890 aa, DROSOPHILA [sequence omitted]

SEQ ID NO: 18892 - DNA, 4128 bp, DROSOPHILA
agcaatttttggcgcactcgggcgcagcagggacgtgtctggcggtcagttatcttgctttggttgccagcgaacagagtgtacaacggggcagtcaccgctgggttgctgaaatccagcattgtacagagcttgctcagctctgtgattgctggagtggctacgctgaaacgtgtgtccgcggaagccaccaccagtggcacgaatatctgcaaatcactaaacacactggcgcacaggaaacgaactattcccttcttgaccttttccagttcttcggcccgccaattgtaggcgatgatgcgtgtaaaactgtacgggctcagacccggaggcacatcctgttcctgggtgatgccatagggcaggaggagcacatcctggagcagtgccaaaaagtttgcacagatggctggcttgtcctgcagatcaagtagctttgagcgctgcgtcgggtcgtcgggaatcttcatgtccgacagtacgggcagcagcagggcgaacagcttgtcctggtagctctccagcttgtcctcgcagcccaccactttgctggccagcgcagtctgttgttccaacgccaggcgcggaaagcccatggtaatgaatatgatggcgaagttcttgaggaaggtgctgctatcctgggcggcatactgatccagcagtgcctctacgggtatttgcacatgtccgcgcgacgacaggcgcctcttgatatgggtgagcacttctacgacctaaacaaaatttagtgcattagtcaaccggtcaattttgcaatgtcacgatgcgagaagggtgtacaaaaccacccagccaatcgttgtttgaccatccacttgcctttgtgcgcaccacattgtggggcgagttcattttgaggatcaccggggtcaggaacttgcccacagcggcttccagcttctcatccgagtccgcatttcccagacgcaacaggacgcgctccagaagctctgaaatcgaaggattgggtgggttttttttttttggcacagctttggtgtattatcagcccatctcttctattcgctgatgaaacataaagtttgatgcacacaatgctaattataatttttaccaatttctgcattcggtccagtttccattttttttgctttatttttgtttccctctttcagtgttaccagctgttgtgctgaacatttcacagatgccaatttttggctacattcgaaagctttgcaacactcgaacttttcgaaatgaaaccgccgccaaattcaaaatgtaaagcgaaaatctttgccattgaaatcattcaataaaaacataatttgtaatcaatcaacttttatttaagaaaatcatattaataatgtacattcaatgcaattcgtgtccatattcttgcggtcatctttagtttctgtaaaaaataagaaatcgtgtcattagtatggagtatttgcatttatttcaatatgcttttctttgataaatatcagtattctcatttttattgagaagagtcaaggttcttcagcaatttgttttatgaagaccgtcatgattttatcatcagaatgccagttaatagctgccttacaaaataatatattttacacaccttttaatggaatagctggctgcacgactgctgaaatgctgtggaaactgagagaagaactggagaaaacccatggttaaagttacttttttttgttttattcaaaaagaataattgctacaaatattatcgcccgaatggtagttgtccgctctagtacttcttgaagctcttcttggctccctgacccttgctgactttcaggacgttgaagcgcacagtcttggacagaggacggcactcaccaatggtgacaatatcgccatgctcaacatctctgcaaattaagaaatagcacggattagtaggaggccctacagtataagcacaaagctagcgcacaaggcttagtttcagtatttttacatttagtaaaaagagtcaagttctttcagcaatttgttttatgaagaccgtcatgattttatcatcagagtatgaggtattaggtctctttttacatcttccatgtcatgaagatggaaaaagggttttagctctagctttattgatatgtttacctgaacacaggggagcagtggacgctcatgttgcggtgacgcttctcgaaacggctgtatttgcgcacaaagtgcaggtagtcgcgccgaatgacaatggtgcgctgcatcttggccttgcggaccacgccggtcagaatgcgaccacggatcctcacatcaccggtccaggggcacttcttgtcgatgtaggtaccatcgatggcctatagcagggggagtatacgaatgttgttagtgaaggaattctacgcatttcaagggctatctcctgggcatcacctcacgtggggtcttgaaaccgagtcccacatcgcgggagcgacgcagcagcttcttcttggtgataccgggcttgaccttgcggtttaggttgacaccgaattgtttttggaaggcgcgctcgttctggttagttagtcgttcggttggaatcgtgtttggggttcaaggtggcggtggtggtggtgttgtcggatcaacaggcaggcggcaggcacgggcgggaacattcggcgtgcgtgggaaggcgtgaaatggaaaacaaacgaagggggcgcaacattagtcgtggtttgttcggcttcctcttacctccgccggagcgcggaagcccaggccaatttggcgatagaaacggggccttttcttcaagttggggctcttgcgacgcacaacgaccaccgcgtgttgcttgcggaacgagcgttcggtttgctgcaatatacatcatttcgtgttcactattggcgacaccatgcgctaaagtggggttagggcgaagctggtccaggctacgcttcccagtgcgtttgttcgctgctccataggttcatccattcactggtcacttacacttcagagggcatcttgttgcgggttcgcatcagccgtttaacccgcgtatttcatttatttagcacactctcgtggaatcttacctgatcagccatgttgatgaaaaaggaaagaacgattcagagtgaccgtttgctcaatggcgccgcaagtgggaccgtcgcacagcggtgccgaaataccaagctgatgaaggcggtaactcaggctctgttaaggtcaatgttaggcattttagcacagtggcttttattagtaaaatattgtggctaacatataactacatcatttgataacatacaacactataccctttataaaaactataatttaattaaattattatattattatttcaagtatattgtattattttgatttgaatattatcttgtgctgttaagctaaaacttattttaacattaacagatagtttaacattggcatttatccagtcctgtttgcagtacaaactcaaaccatggttgaaagctgtgctaagcaccaaacgtattccgaaagatggcgcccttgtgcaaatggggttttggctttttgaatattttatttggcgcactcgaatttgcatatctgctgattcagatagtttgtcgccgctattgaccttcatctactcgccattgactaagaatatttagtcaaagccaagccatgtttttctcaagcaccactcaagtacatagtgctccacgccaagaaaaaaaaaaggaaaatgcctttgtgcctgcattttgtgggctttcttttatttggcggcacacaaactcgccgcacttacaggcgaaatacctagagcgctaattctccacatgccccacgaatacgtcggattaaaagtaatgacaacgtaaacgagtgccagaagagcggccttgaaatgccgcccactttcaaggcgcaatcagcagccgcggcgggcgttgcagctgctataaatccgtttacggctaaacgtcacggatgtggcaaagaatgcaggacgaaggaggctgcattcgcccaggctctgcctggttttcattgccattgttaatgcagctgtctgcagcataaaattgcggcaagcattgctgcagctgctgttgctgctgctgcttttgctgctgctgttgctgc

SEQ ID NO: 18893 - DNA, 599 bp, DROSOPHILA
agcaaacggtcactctgaatcgttctttcctttttcatcaacatggctgatcagaacgagcgcgccttccaaaaacaattcggtgtcaacctaaaccgcaaggtcaagcccggtatcaccaagaagaagctgctgcgtcgctcccgcgatgtgggactcggtttcaagaccccacgtgaggccatcgatggtacctacatcgacaagaagtgcccctggaccggtgatgtgaggatccgtggtcgcattctgaccggcgtggtccgcaaggccaagatgcagcgcaccattgtcattcggcgcgactacctgcactttgtgcgcaaatacagccgtttcgagaagcgtcaccgcaacatgagcgtccactgctcccctgtgttcagagatgttgagcatggcgatattgtcaccattggtgagtgccgtcctctgtccaagactgtgcgcttcaacgtcctgaaagtcagcaagggtcagggagccaagaagagcttcaagaagtactagagcggacaactaccattcgggcgataatatttgtagcaattattctttttgaataaaacaaaaaaaagtaactttaaaaaaaaaaaaaa

SEQ ID NO: 18894 - protein, 155 aa, DROSOPHILA
MADQNERAFQKQFGVNLNRKVKPGITKKKLLRRSRDVGLGFKTPREAIDGTYIDKKCPWTGDVRIRGRILTGVVRKAKMQRTIVIRRDYLHFVRKYSRFEKRHRNMSVHCSPVFRDVEHGDIVTIGECRPLSKTVRFNVLKVSKGQGAKKSFKKY

SEQ ID NO: 18895 - DNA, 2839 bp, DROSOPHILA
ttttccgcttgttttcaaatctattactaactgttgccaagttaggctgaaggattctcgactattattaatttaatagacaattaataagaacaacaacaaaccaaaacttgatgcacaagtgtatgataaccctatatactcacaggtttttgataacaagaattacaagtgcttaaaaataaaatagtttacaattattgttcaagtgtaaacaaatgtttgaaagtgataataaaataggtgttggaaaaatgttaaaaacttgtgtgttattttcataaaaatgctgattgaacttctttacagcaaaattgtcaaaattactaaaaaagttagctgtcattgaagataagattaaatctagtacaaatctgtaaattattatttgcttgctattatatatagcttttgcttaaagtttctaaactatccaatcgttttaatacttacaaaaatatatccaaaataaaacagaaacaaaatatacatctgtatttaatattctaagaaaaactgaaatataaattatcattatttaaatgaaggaaaattttatttattataaacaagttaaacaaaatggagattttagccacatgcgtaaaccctttaatcttatcgaaggtaggtctgaaaaataaacaaatccctccaaatcaattgatagaaaactgagatagtaagagaaataaactagactggcactaacaacaaatgaaatacgcaattctttataacttataacactacttatctttctgatttaatttaaatatgaggcttaacatttaatcataaataataataaattggaaaccatatcattcgtattctatgaaaacattctatgaagatatcgaaaatcaatctaaaccatacaaaatcaagtatcttgatccttaagataatccattttagtttccccattccttaaatttaaactatcgaattaaaaaacaattatctattaaatgcagaagggtttatttcgagaacgaaattagtaggagatgccagtgtggtcgcggatccagtccaggtagctggtgacgcgggtgaagccatcgggcaggcccgaggtgcagccgctggcggccacaaaggaggtgacaccgaccagcttggagcggtcgtggaggaccagtgggccgccagagtcgccggcgcaggtggacttgccgccgggggtggaggtgcagatgacgttgtcggtgatcacatcggttccatagacgctggagcactcgtcgcgggtgatgatctgggagtccacgcagttcaggtagtcggagacgccacagctatcgcaaggcctgccccatccggaggctagagcccaccagccggcaaagctgtcgtggcgctcgttgccatcgggcagctccaccttgttgatcaggtgccagaagtccacgtgcggggtgttgatcagcgagatgtcgttgttcaggttgttggtgttgtagtccgagtgctggcggaagtggccgctgcccacggtgtgggtgtactgagcctggaggcgccacagagcaccgtagtagatggtgacggagtgagctccgtgggtgcagtgggcagccgtgatcacccaggtgtgaccgatgatcgagccaccgcaccaccagccaccgctgtcgctgctgaagcccagacccacgatgtagggcaccttgccctcgtaggcgggatagccgttggtaatgcgaccctcgatcgagccggatccggatcccaggacggcgtcctttaggggcaccggcttcaccttctcaggctgggcggcggcgcaggcaatggccacggccaggacagttaggaacagcttcatgttgattacttgagtgcaagtggatactccgccgacgggcagtgatttatataccccccaaatccgacgtattcatatcgctagagatcttcaccattcgccactcgaaagttctaaacactccggtcggactaatcttatcaaattaatttcgcacgcctccaaaatgcggcactatcattacagggtactccaatgatctacccatccgatttggacactttccggctcatgacttgccaccactcaatctgacgattgcccactgccactcattcattagaagattgtccgaccctatcaacatggacgtgcggccactcggagctgatcttaagataggtgccaataagcccccattcatgcccagagccacaactcaatggaacactcgaacaggagcgcacagagattagggcacacgtcctgtggtcattcaaaagtagtattacagtataattcgcttagctgcatcgatagttagctgcatcggcaagatatctgcattatttttccatttttttgtgtgaatagaaaatagaaaatagaaaaaaaaaaattaagttagctgcatttttaagttacctgcatcgaggcattgtgcaaagtactcgaggcagctaagcgaattatactgtacttaacgttcgtaagtgcgctacattgtttaggttttaatattaaacgcactcccattaaagttattaaaattaaaatttaaaacaataaactaaacatttacaagtaaaaagtgaaatattttaaagacgaaagttgtattattttttagaaatatatttcatatatttaataaatatatcacttcgcttttgtgatttgtcagtataataatcctttggaatatataatcttttggtaaatatatatattatttcattatctgattattgactagtatagaccacagttgctagtattcctacttatgtctatcatggctacatatatagtgtttaatcatgttttccagataacaagtgttcg

SEQ ID NO: 18896 - DNA, 839 bp, DROSOPHILA
tcaacatgaagctgttcctaactgtcctggccgtggccattgcctgcgccgccgcccagcctgagaaggtgaagccggtgcccctaaaggacgccgtcctgggatccggatccggctcgatcgagggtcgcattaccaacggctatcccgcctacgagggcaaggtgccctacatcgtgggtctgggcttcagcagcgacagcggtggctggtggtgcggtggctcgatcatcggtcacacctgggtgatcacggctgcccactgcacccacggagctcactccgtcaccatctactacggtgctctgtggcgcctccaggctcagtacacccacaccgtgggcagcggccacttccgccagcactcggactacaacaccaacaacctgaacaacgacatctcgctgatcaacaccccgcacgtggacttctggcacctgatcaacaaggtggagctgcccgatggcaacgagcgccacgacagctttgccggctggtgggctctagcctccggatggggcaggccttgcgatagctgtggcgtctccgactacctgaactgcgtggactcccagatcatcacccgcgacgagtgctccagcgtctatggaaccgatgtgatcaccgacaacgtcatctgcacctccacccccggcggcaagtccacctgcgccggcgactctggcggcccactggtcctccacgaccgctccaagctggtcggtgtcacctcctttgtggccgccagcggctgcacctcgggcctgcccgatggcttcacccgcgtcaccagctacctggactggatccgcgaccacactggcatctcctactaattt

SEQ ID NO: 18897 - protein, 276 aa, DROSOPHILA
MKLFLTVLAVAIACAAAQPEKVKPVPLKDAVLGSGSGSIEGRITNGYPAYEGKVPYIVGLGFSSDSGGWWCGGSIIGHTWVITAAHCTHGAHSVTIYYGALWRLQAQYTHTVGSGHFRQHSDYNTNNLNNDISLINTPHVDFWHLINKVELPDGNERHDSFAGWWALASGWGRPCDSCGVSDYLNCVDSQIITRDECSSVYGTDVITDNVICTSTPGGKSTCAGDSGGPLVLHDRSKLVGVTSFVAASGCTSGLPDGFTRVTSYLDWIRDHTGISY

SEQ ID NO: 18898 - DNA, 2808 bp, DROSOPHILA
tgtgctccagttcgcggcaatagttcccgatttggatgagcacctgatcggtgacactgggcgtatttgccagcgacaggacggtgagcttgttaagtttcctgaagaagataatcaagcagcgctctccaattgcgccgcaataggagatgtcgaactccaccagcttgctttggtgcagcgtcaaagcgtccactgctcccgtggtcagccactggcacttggacagcttgagtacgcgcagctccttgcactccactatgatcggctgcagcgaaagggccgtgatgttgacgcattcgttcaggttgacggcccacaggcgtttcttgttgttggccagcagtggcagcagcagctcatctgttagccatcggcagcaggccagatgaagcacctccaatcgttggcaacatcgggccagcactcgaaaggccacgtcgatattctttgtgttgttcccagagagatgaagttcctgccttttttccagcgcagcctccacaaagcgttgtgcggtacgggagcagcagcgcaggttgaagagatccttgagcgacaggtagacggcaacctgcgggatgagcacatcgtcccagcagacatcaaacagcgatcgtggtgctgcaatggaggcggtgaccaatggccttggactggccgtacgcgttggttgtcctccgctggccatggccatcaggtgagcttcctcctcggggtgcagagtgcacatgctgccgcctccggttacgtgatctacgcaccaacaaagcactcccaactcaatcctttggtgcacggcaaaaacgtaattaattgtttacttgatagcaatcagctgttgctttggcattcacacaaaactgctacaaaaattatttgtgtaatcttacgccgtggtttctacacacgagtaaaatttgttttacactgcgtaaaacaagtgtagaacacatacattttgttggtgaccccgatttatatactctcgaaacgtattgcttttaaaatgatcgatttatttagaaaaattagtaagagatgccagtgtggtcacggatccagtccaagtggtaggtgacgcgctggaatccagcaggagcacccgactggcagccgttggaggagacgaagttgctaactcccaccagcttggagccgtcgtgtgtgacaaggggaccgccagagtcacctccgcaaatggacttgccgtcgacggtgcgggtgcagatgacgttgtcgccaacgctgccgtaggtccagccgcactcttcgttgtggacgatctggagatcgacgcactgcagccagtcgggcagtgggctgccgtcgtaggtgccaccccatccgcaagcgacggcccaccattcgttgtagttgttgtaacggtcgttgtagctggggagctccaccttgttcaccatgtgccagaagtcgacgtgggggatgcggatcagggcgatatcagcgttggaatgcttgatgaagttgccgttgccaacggtgtgggtgaactgggcgttggtgcgccaggtggcaccgaagtaaacgatcacggaagcggcatctccgatgcagtgctcggcagtcaggacccagtcgtgggcgatgatggagccaccgcaccaccagcctccgctgaagccaagacccacagtgtagggagccttaccctcgggggcggcgtatccgttggtgatacgaccctcaatcttggtggccttgggcaggtcctttacgaagaccttctcgtcgaaggcggaggccgaagccacggccagagccaggatagctaggaacaccttcatgctgatgtttatactggattctactctcggatggcagccttttatacacattttcagctaaaaccatatctgcaactcgaaaagggctcgtaaataatcctcaagactcccataaacgatgtcatcgataagaatggaggaaccactctaccaagccagtagtagaaatcaaagaaactctaggggggactagaccccccccactagactatatatatttatatatattatattattttattatttaccatatattaagtatgcagcaataaacagccaaattattatctatctaaatggaataatattttgtggctaatcaaatatgtttgtagttttattcataattataaaatatatatttgtcaacctttgcgcagaccattctatcttatcatcatttttcagaacttaaaatttacaatgatctttggacaggaatgattttcaataaagttgtttgttaacttttacataaaatgtatgtctgctttttgtcctgataaggataatctgtaataatggctggaggttttccgcttgttttcaaatctattactaactgttgccaagttaggctgaaggattctcgactattattaatttaatagacaattaataagaacaacaacaaaccaaaacttgatgcacaagtgtatgataaccctatatactcacaggtttttgataacaagaattacaagtgcttaaaaataaaatagtttacaattattgttcaagtgtaaacaaatgtttgaaagtgataataaaataggtgttggaaaaatgttaaaaacttgtgtgttattttcataaaaatgctgattgaacttctttacagcaaaattgtcaaaattactaaaaaagttagctgtcattgaagataagattaaatctagtacaaatctgtaaattattatttgcttgctattatatatagcttttgcttaaagtttctaaactatccaatcgttttaatacttacaaaaatatatccaaa

SEQ ID NO: 18899 - DNA, 808 bp, DROSOPHILA
atgaaggtgttcctagctatcctggctctggccgtggcttcggcctccgccttcgacgagaaggtcttcgtaaaggacctgcccaaggccaccaagattgagggtcgtatcaccaacggatacgccgcccccgagggtaaggctccctacactgtgggtcttggcttcagcggaggctggtggtgcggtggctccatcatcgcccacgactgggtcctgactgccgagcactgcatcggagatgccgcttccgtgatcgtttacttcggtgccacctggcgcaccaacgcccagttcacccacaccgttggcaacggcaacttcatcaagcattccaacgctgatatcgccctgatccgcatcccccacgtcgacttctggcacatggtgaacaaggtggagctccccagctacaacgaccgttacaacaactacaacgaatggtgggccgtcgcttgcggatggggtggcacctacgacggcagcccactgcccgactggctgcagtgcgtcgatctccagatcgtccacaacgaagagtgcggctggacctacggcagcgttggcgacaacgtcatctgcacccgcaccgtcgacggcaagtccatttgcggaggtgactctggcggtccccttgtcacacacgacggctccaagctggtgggagttagcaacttcgtctcctccaacggctgccagtcgggtgctcctgctggattccagcgcgtcacctaccacttggactggatccgtgaccacactggcatctcttactaatttttctaaataaatcgatcattttaaaagc

SEQ ID NO: 18900 - protein, 258 aa, DROSOPHILA
MKVFLAILALAVASASAFDEKVFVKDLPKATKIEGRITNGYAAPEGKAPYTVGLGFSGGWWCGGSIIAHDWVLTAEHCIGDAASVIVYFGATWRTNAQFTHTVGNGNFIKHSNADIALIRIPHVDFWHMVNKVELPSYNDRYNNYNEWWAVACGWGGTYDGSPLPDWLQCVDLQIVHNEECGWTYGSVGDNVICTRTVDGKSICGGDSGGPLVTHDGSKLVGVSNFVSSNGCQSGAPAGFQRVTYHLDWIRDHTGISY

SEQ ID NO: 18901 - DNA, 3335 bp, DROSOPHILA
tccaaggacgccccaataagccagtggatacttgttattccttctggattggtgcatcgctatgtattctggacggcttcgaactaaccgattatgcccggaaccgagaattcattctgagcacacaggataagctcattgggggctttgccaagtggccgcaagccacgcctgatccgtttcacacatacctcggtctctgcggactagctttcacgggtgaacctgggctaagccccgtgaatcccagtctgaacatgtccatggccgcctacgctcacctgcagcatctgcatgagcagtggcggtccgcagatggccgaggcgacgaggatattagtgtaagctctgcattcaagcaacaactccacctgtcaaagggggtcgaggcgacatccacaacaactacctctaactcgccattaatttcagcacaatgatgggaagccgcacaaagcacgaggggaaagttaaagcacactattgtatttatattggccacattttagccacgctttttatgcccttgcagttagtatatttattttatcgaaaagtttgtagcgcagtggatgaggcatttgcgaccatataaactatatatcagtatcaccagcggagtcgatacggccatgtccgtctgtcagtttctatgccaaatagtctcttagtttagcaatctgcatgaacgggtcgttgtttttaatcggtataaatgttataattactgcaagggtatataagtttcggcttgccgattctagcttactttctggtttacatgtattttaatgcaaaaagctcgagcttttggagagagagatgaataagttagtatgtttattgtacagcctaaattaatgttaacaatgtgtaagattaagcttaaaagtaaattaaagcgtcccatgctgaggcatgtatttacagcaaaagtattggatagcctcgaaagcctccttggtacattggtaatattggcccggaatcagaattaatctcaaacctgcaggaacaggcggtgatgttgcacagttggcatgtagcccatgccgggccgatcgatgtggacccgtccacgaagtggggcgagcacacgctcggtgaccaatgggcagcgctgcaccatcagtgactgcagcagcgggcaactggaggtgagggcactgcggaagagggagaacgaagtgtgggctagtaaacaaggaaatcgctgggatagaagtcgttcaagttgtaagcgttgagccccacatccggctgtggcctatcgatgtaaagacgccgctggcggagcggcgccagggagagttctgtgacccgcggacaacgtcgaatgagcaaggtccgtagccgcaaacagtgcactgtcaaagcgctgaaaatacgcagatgcggatgcagatggagattggtttccccagaaacacacagacacaaggcacgcacaggtttactgacaatatgacaacagcttttagggataactacgagtattacttactgcacgccatagtcggagatagccgcacacccgatcacgttgatgtgctccagttcgcggcaatagttcccgatttggatgagcacctgatcggtgacactgggcgtatttgccagcgacaggacggtgagcttgttaagtttcctgaagaagataatcaagcagcgctctccaattgcgccgcaataggagatgtcgaactccaccagcttgctttggtgcagcgtcaaagcgtccactgctcccgtggtcagccactggcacttggacagcttgagtacgcgcagctccttgcactccactatgatcggctgcagcgaaagggccgtgatgttgacgcattcgttcaggttgacggcccacaggcgtttcttgttgttggccagcagtggcagcagcagctcatctgttagccatcggcagcaggccagatgaagcacctccaatcgttggcaacatcgggccagcactcgaaaggccacgtcgatattctttgtgttgttcccagagagatgaagttcctgccttttttccagcgcagcctccacaaagcgttgtgcggtacgggagcagcagcgcaggttgaagagatccttgagcgacaggtagacggcaacctgcgggatgagcacatcgtcccagcagacatcaaacagcgatcgtggtgctgcaatggaggcggtgaccaatggccttggactggccgtacgcgttggttgtcctccgctggccatggccatcaggtgagcttcctcctcggggtgcagagtgcacatgctgccgcctccggttacgtgatctacgcaccaacaaagcactcccaactcaatcctttggtgcacggcaaaaacgtaattaattgtttacttgatagcaatcagctgttgctttggcattcacacaaaactgctacaaaaattatttgtgtaatcttacgccgtggtttctacacacgagtaaaatttgttttacactgcgtaaaacaagtgtagaacacatacattttgttggtgaccccgatttatatactctcgaaacgtattgcttttaaaatgatcgatttatttagaaaaattagtaagagatgccagtgtggtcacggatccagtccaagtggtaggtgacgcgctggaatccagcaggagcacccgactggcagccgttggaggagacgaagttgctaactcccaccagcttggagccgtcgtgtgtgacaaggggaccgccagagtcacctccgcaaatggacttgccgtcgacggtgcgggtgcagatgacgttgtcgccaacgctgccgtaggtccagccgcactcttcgttgtggacgatctggagatcgacgcactgcagccagtcgggcagtgggctgccgtcgtaggtgccaccccatccgcaagcgacggcccaccattcgttgtagttgttgtaacggtcgttgtagctggggagctccaccttgttcaccatgtgccagaagtcgacgtgggggatgcggatcagggcgatatcagcgttggaatgcttgatgaagttgccgttgccaacggtgtgggtgaactgggcgttggtgcgccaggtggcaccgaagtaaacgatcacggaagcggcatctccgatgcagtgctcggcagtcaggacccagtcgtgggcgatgatggagccaccgcaccaccagcctccgctgaagccaagacccacagtgtagggagccttaccctcgggggcggcgtatccgttggtgatacgaccctcaatcttggtggccttgggcaggtcctttacgaagaccttctcgtcgaaggcggaggccgaagccacggccagagccagg

SEQ ID NO: 18902 - DNA, 997 bp, DROSOPHILA
gattgagttgggagtgctttgttggtgcgtagatcacgtaaccggaggcggcagcatgtgcactctgcaccccgaggaggaagctcacctgatggccatggccagcggaggacaaccaacgcgtacggccagtccaaggccattggtcaccgcctccattgcagcaccacgatcgctgtttgatgtctgctgggacgatgtgctcatcccgcaggttgccgtctacctgtcgctcaaggatctcttcaacctgcgctgctgctcccgtaccgcacaacgctttgtggaggctgcgctggaaaaaaggcaggaacttcatctctctgggaacaacacaaagaatatcgacgtggcctttcgagtgctggcccgatgttgccaacgattggaggtgcttcatctggcctgctgccgatggctaacagatgagctgctgctgccactgctggccaacaacaagaaacgcctgtgggccgtcaacctgaacgaatgcgtcaacatcacggccctttcgctgcagccgatcatagtggagtgcaaggagctgcgcgtactcaagctgtccaagtgccagtggctgaccacgggagcagtggacgctttgacgctgcaccaaagcaagctggtggagttcgacatctcctattgcggcgcaattggagagcgctgcttgattatcttcttcaggaaacttaacaagctcaccgtcctgtcgctggcaaatacgcccagtgtcaccgatcaggtgctcatccaaatcgggaactattgccgcgaactggagcacatcaacgtgatcgggtgtgcggctatctccgactatggcgtgcatgccctcacctccagttgcccgctgctgcagtcactgatggtgcagcgctgcccattggtcaccgagcgtgtgctcgccccacttcgtggacgggtccacatcgatcggcccggcatgggctacatgccaactgtgcaacatcaccgcctgttcctgcaggtttga

SEQ ID NO: 18903 - protein, 313 aa, DROSOPHILA
MCTLHPEEEAHLMAMASGGQPTRTASPRPLVTASIAAPRSLFDVCWDDVLIPQVAVYLSLKDLFNLRCCSRTAQRFVEAALEKRQELHLSGNNTKNIDVAFRVLARCCQRLEVLHLACCRWLTDELLLPLLANNKKRLWAVNLNECVNITALSLQPIIVECKELRVLKLSKCQWLTTGAVDALTLHQSKLVEFDISYCGAIGERCLIIFFRKLNKLTVLSLANTPSVTDQVLIQIGNYCRELEHINVIGCAAISDYGVHALTSSCPLLQSLMVQRCPLVTERVLAPLRGRVHIDRPGMGYMPTVQHHRLFLQV

SEQ ID NO: 18904 - DNA, 3611 bp, DROSOPHILA
tgcatcatgatccaaaggtattccatcacattgagaagttcataagccccctcctctaactatctggttattcctagtactggaccaatcccagccaattcgatccggagcgtttctcacccgcgaaccgcaagaacatagtggccatggcatatcaacccttcggatctgggccgcacaactgcattggcagccggattggcctgctacagagcaaactgggactggtcagcctgctgaagaatcactcagtgcgcaactgcgaggccaccatgaaggacatgaaattcgatcccaagggtttcgtgctccaggcagatggtggcatacatttggagatagtcaacgatcgcctctacgatcagagcgctccatcgctccaatgaatttgaatcgcatgaactgtgtgatctgtatggatacacatatggatacatatatgtacatatatggaataagtgattagttgatggggcaatcgccttctgacagctggcatttgcctgacttatgatgcagattatataatgataatccgtgtgttagaagcggcgcctagagtctactaaataaaaacaaaatcattatcaaattacatttaatctgcgtgctgagcagctagcagctactcaattgcgccaccaataaataaatgcaataaatgctatctttacgattataaatccagttcaaaggcatctcccaaatgtaacaaataacccaatagctctcatctgtggaataagtagagtctatacagatacgcttggatcttggagatgtattatatatgtatggatagtattgcattcactattcaccggcgatggaacacgcaatttgccaatcaaattgcctttaagatgcgacaccagctcaattttaaatccccaaacacgcgactccgctgcttagtttccattcagttgttgtaggctccatagtctcaccacccaggaaagaagtatccagattatcccatatcccatattcaggtgagttagacgcccaaagcatcgcgaaccagccgtaggtggatgccgcccttggcttgggttatgatggccttgggatccagctgcatgcgatggggtgtgcgctccgaggtggttatcatgtggttgcgcagcaggttaaccagacccaccttcgcctggagatatccaaaacgttctccgatgcagccatgcggacccaggccgaagggcatgtaggtgtagggcgtgtggagcttgcgattctcgggcgagaatctttcaggcagaaattttcgcggttgaggaaagtactggaaaagggtagtcgttgggtaatgtatgcaaaatgtatctcaacccacctggggatccatgtgcagggcatagcagggtatataaacgggcatgcccttgggcaccacgaactttttgtggaacggagccagcgagtaatccctcccagaagtgcactcgcgatccaaaaacggcagtggcggatacatgcgcagcacctccagcagaatcatttgcatgaactccagtgactcgatcatcttcagcgtcacctgacctccactttcgaccagtgcatccttgatctcctcccgcaggcgctgctgtacgtccgtatccttggccaactcgtacatcgcgaacgccatggtcgaggaggaggactcaaagccggcggtgaagaagagtaccgcctgggcgaccaggatgtcgccctcgaacacaaattgatccttgatacccgatgccttcgccagctgcgtgctcctacggaactcaatgagaatgtcgatgagatcgttgcgcttctgtccggatttttcccgctccgacatcacatagttgatggtcttgcgcagaaaacgagtggcctccgccggcaccaccttgaatctaacgaacgggaccaggtggggcaggaaaaacactagagtgaactccgcggcacgcagcaggttgaactcgaacacagaacgtccatggcggcggaactcgcacttcggatccgtgaaactgttggcactcactccgtacgctaccgtggctatcacatccgtggtgtagagagcacacagctccttggcctccaagtcgaagcagcgcatccgctcgttgtgcagcggctgctggcggagatgggcatccaagctggcgcccacctcctcgatcaggggaaacatctgcttcagtcgattgccggtgaagaagggcgatagcttcaaacgtacctccttccaggcgggattcttcaggaagaatatgttctgggatcccaaagggtcgcccttggggtcggagctcgagtaccggttggagaagccagcgaagtccttgaccaggatatttctcaccatttcggggtctctcaaaagcagcgccggcttgtggaacacatggatgcccacgaagggttcgttctccgcatcgggatggttatacaattgcgatatgaactccgcgggactcattcgcatgttgagcagtcccatcaggttgcccactatccatttgggcctgatttcgcgtactcccattcgccgccaataggagtaatgctgctgcagcgccagaaaggcaatccctattagggatgccacgaggatcagcagtaccagttccatgctaacgccaccaaacccaatgtccaactggctgaaatattgccagcaccatagagttaaagctttgggtaagcggaaactctactatgagatcatcaagatgatcctgagtgcaatgaatgaatctatttgtgaatggaagtgcttgtcgagatgttaagtgggtcaggttcaacttatgcatatggaaatgcatttcttgacggtcgtgaacaaggtctcctcctcattcaaaagaacgactttttggatcttagctatctttacctaatgctggtatatatttcatagttataatattctatcttatatcttatagacaccatgctgctcatctggctgctgttgctcaccattgtgactctgaatttttggttaaggcacaagtacgattacttcaggagccgtgggattccgcacctgccaccctcctcttggtcaccaatgggcaatttgggacaacttctatttctgcgcatttcttttggcgatctctttcggcagctctacgcagatccacgaaatggtcaggcgaagatcgttggcttcttcatattccaaacgccggcgcttatggttcgggatccggagctaatccgccaggtgttgattaagaatttcaacaactttctcaaccggttcgaatcggcggacgccggagatcccatgggtgcactgacgctaccgctggctaagtaccatcactggaaggagagtcggcaatgcatgtcccagctcttcaccagcggccgtatgcgggatgtcatgtacagccaaatgttggatgtggccagcgacttggagcagtacctcaacaggaagctgggggatcggctggagcgcgttctcccgttgggaagaatgtgccagttgtacaccaccgacgtgacggggaatctcttctacagcctgaatgtcggcggattgcgtcgtggtcgatccgagttgataacaaaaaccaaggagctatttaacaccaatccccgcaaggttttggact

SEQ ID NO: 18905 - DNA, 1560 bp, DROSOPHILA
atggaactggtactgctgatcctcgtggcatccctaatagggattgcctttctggcgctgcagcagcattactcctattggcggcgaatgggagtacgcgaaatcaggcccaaatggatagtgggcaacctgatgggactgctcaacatgcgaatgagtcccgcggagttcatatcgcaattgtataaccatcccgatgcggagaacgaacccttcgtgggcatccatgtgttccacaagccggcgctgcttttgagagaccccgaaatggtgagaaatatcctggtcaaggacttcgctggcttctccaaccggtactcgagctccgaccccaagggcgaccctttgggatcccagaacatattcttcctgaagaatcccgcctggaaggaggtacgtttgaagctatcgcccttcttcaccggcaatcgactgaagcagatgtttcccctgatcgaggaggtgggcgccagcttggatgcccatctccgccagcagccgctgcacaacgagcggatgcgctgcttcgacttggaggccaaggagctgtgtgctctctacaccacggatgtgatagccacggtagcgtacggagtgagtgccaacagtttcacggatccgaagtgcgagttccgccgccatggacgttctgtgttcgagttcaacctgctgcgtgccgcggagttcactctagtgtttttcctgccccacctggtcccgttcgttagattcaaggtggtgccggcggaggccactcgttttctgcgcaagaccatcaactatgtgatgtcggagcgggaaaaatccggacagaagcgcaacgatctcatcgacattctcattgagttccgtaggagcacgcagctggcgaaggcatcgggtatcaaggatcaatttgtgttcgagggcgacatcctggtcgcccaggcggtactcttcttcaccgccggctttgagtcctcctcctcgaccatggcgttcgcgatgtacgagttggccaaggatacggacgtacagcagcgcctgcgggaggagatcaaggatgcactggtcgaaagtggaggtcaggtgacgctgaagatgatcgagtcactggagttcatgcaaatgattctgctggaggtgctgcgcatgtatccgccactgccgtttttggatcgcgagtgcacttctgggagggattactcgctggctccgttccacaaaaagttcgtggtgcccaagggcatgcccgtttatataccctgctatgccctgcacatggatccccagtactttcctcaaccgcgaaaatttctgcctgaaagattctcgcccgagaatcgcaagctccacacgccctacacctacatgcccttcggcctgggtccgcatggctgcatcggagaacgttttggatatctccaggcgaaggtgggtctggttaacctgctgcgcaaccacatgataaccacctcggagcgcacaccccatcgcatgcagctggatcccaaggccatcataacccaagccaagggcggcatccacctacggctggttcgcgatgctttgggcgtctaa

SEQ ID NO: 18906 - protein, 519 aa, DROSOPHILA
MELVLLILVASLIGIAFLALQQHYSYWRRMGVREIRPKWIVGNLMGLLNMRMSPAEFISQLYNHPDAENEPFVGIHVFHKPALLLRDPEMVRNILVKDFAGFSNRYSSSDPKGDPLGSQNIFFLKNPAWKEVRLKLSPFFTGNRLKQMFPLIEEVGASLDAHLRQQPLHNERMRCFDLEAKELCALYTTDVIATVAYGVSANSFTDPKCEFRRHGRSVFEFNLLRAAEFTLVFFLPHLVPFVRFKVVPAEATRFLRKTINYVMSEREKSGQKRNDLIDILIEFRRSTQLAKASGIKDQFVFEGDILVAQAVLFFTAGFESSSSTMAFAMYELAKDTDVQQRLREEIKDALVESGGQVTLKMIESLEFMQMILLEVLRMYPPLPFLDRECTSGRDYSLAPFHKKFVVPKGMPVYIPCYALHMDPQYFPQPRKFLPERFSPENRKLHTPYTYMPFGLGPHGCIGERFGYLQAKVGLVNLLRNHMITTSERTPHRMQLDPKAIITQAKGGIHLRLVRDALGV

SEQ ID NO: 18907 - DNA, 2422 bp, DROSOPHILA
tcctgaccgaggagaaggaggcacgtttgggctacgaggagggactgaaggacggccaggagcagggcaacgaagagggctataaattgggctacgcccagggagtatccctaggcgaggagctcggcaagattctgggccaggtggtggcccagcagcagctgaaacacacggacaaggtgcgtcgcagcttggaacagttgcgttcgctcatcgaggagtttccccgcaccaacgatccgcaggcggacatagtgggtgctgtgcaggacattcgctcctcccatcgtcgccttcgcgcccagctgggatccaaaaaaacgcctggtgcagcgcctgcagagaccaattctgtcgagcacaaggactacagcttctagccttatagcaccatgtccaaggtgggagttgtgcagttgcagaggcgtctggatggcttactggccttcctcaatccgcactgggattttgtcaattgccacatggtgaactacttgacggaccagcactgggacggctttttatccgaaacgctgaaaagtgagatcgccggcaaggaagatgtggctctggccatagaagacctattttggaaaactgatgaatcagaaaggtttccggcatggcgagaattcctaggcaagagcaaacaagaacgcctgtcgcttcagagggtcaggggaactccacgcagctaagcattcgggagtttatgagcgccaaaaagtgccatgaggtaagtaaaccaaccattttaaatgagagtattttaggaattgattaatctctccgattaggtggatctaacagccgttctcgtggaccagcttgtgaagaactccggtcaagattgcttcattgtagacgcgggcgatggcaaagggtatttatcctcgcgcttggcgctccagtatggtcaccgcgtgctcggcatcgatgcgaacgcggcaaacaccgagaacgcattgaataggaatcgcaaattgcaggtaggccgggcttacaaaataaagttagctttatttcattacgtttgtagacttagaagtaaggtgtgggtgtatgtaggtgaatccattggctagtcgcgcatttcgccctcctcgtcgtcgtcctccatgcccttgatatacagcacgttgttgcagcggatgagcacctcgccaagattaccagtcacggagccctcgatcacttcctccgtgttcgccagctgcatgttcatgtagccgtcgacggagaccaggaagcccttgtactcctggccccacttcagcttcaccagcaccggttttcccgtcaggccgttcaggaagggcttggggttaatgggcataccagccgacattctgtttatttgatttttcctgccttttttataaaatattacaacaagcgtgccgaaaatcgccggcttttcgcgttttttttgtgtagtgtgaccacagctgcgctgtgtaaacataccagaacaagaagaagaatagcatagaagaagagtattgaaaaaccattcaaaagcgccaaaattaaaattttatttaatttcagcgcgcttggaatggccttacggaacgagcggagctgcaagtccagggaatcacgcccaagagacgtggtaaaaagtcgccagccagggagagcaccaagagtgcgcctgccttggaaaactacaagacaacggcaaagtttataaccaccgaacttaactttggtgccctgctggcggagaatttcactcagtttagaccggaagacagtccaaacatttgccttactggattgcatacctgtggcaacctggccgccacctgtcttcaggttttccacgcccaaacggactgccggttgctttgtaatgttggctgctgctatcatttgctgcgggagcgctattcgcagcaggagttctttggcaataagtccctgatggagctgcaaacagactatggattcccattgagtcagtacctgcgggagcgacaagtgcgaatgggtcgcaatgcgcggatgctggcggcccagtcaattgaacgcaccttggacaccaaggagctgcctaatgtaacgctctactatcgagctctcttggagattctggtttgccgccatgcgccggagctgaaaaacgaactgcaggtgggcaaggtacggaaattcgagagtttcgaggagtacattcaaaagtgtgccaccaaattggatgctccctggttggcagctgttgagaaagaagaacttcaatccctgctccaggaatatgccgtgcataaatacttcttggatctgttctatctgctgcgcatgtcctttgctccggtgctggagagtctaattctcctggatcgcctgctctacctcaaggaacttggctatgaacgcagctatctgatagatttatttgatcccgtcatttcgccca

SEQ ID NO: 18908 - DNA, 422 bp, DROSOPHILA
gcgaaaagccggcgattttcggcacgcttgttgtaatattttataaaaaaggcaggaaaaatcaaataaacagaatgtcggctggtatgcccattaaccccaagcccttcctgaacggcctgacgggaaaaccggtgctggtgaagctgaagtggggccaggagtacaagggcttcctggtctccgtcgacggctacatgaacatgcagctggcgaacacggaggaagtgatcgagggctccgtgactggtaatcttggcgaggtgctcatccgctgcaacaacgtgctgtatatcaagggcatggaggacgacgacgaggagggcgaaatgcgcgactagccaatggattcacctacatacacccacaccttacttctaagtctacaaacgtaatgaaataaagctaactttattttgtaa

SEQ ID NO: 18909 - protein, 84 aa, DROSOPHILA
MPINPKPFLNGLTGKPVLVKLKWGQEYKGFLVSVDGYMNMQLANTEEVIEGSVTGNLGEVLIRCNNVLYIKGMEDDDEEGEMRD

SEQ ID NO: 18910 - DNA, 2356 bp, DROSOPHILA
tttatttaaaaatctggacaaaaagaccagatagcgaccgctattgcacaattcaggtactttagtgtgaccacagtttaaagtggtcgaacgaactacagtgaaagacataaatatatgcacggattgctaaatttgcttgggaaaataagtaagtatactatgtatatttcattaatgtattaataacttaaaaaggcgacgtgtgagctttaaccgtagcccaagtcgcaaatggtggtacttaccaattccatatagatagatgggcttcgtgaacagcaagatatccgagctcgaataactcgtcgtggcagttcaaaattccagggctggatatcccctcgtcttatgtgctctaatacacactcggcgtgtagcaggttgtaagaaattcgcgtttaaaatcaaataacttagtgggcgctgccatgttttaaaatttattcgataaccgatccccgacttaaaaggaaaagtgtgaccatcaatttataaaatttagcttatattttgtaaaaaaattgttgcttctttgtttaggaatttttaagaaaaagcaattgtgtcgcagaacaaaacgatggctaaaacagtaattttaaaaaggcatacaacacatataaaattatttttaaggttaaagaaagatttttataacagaattaaaatcttctaattttaaagcaatattaggcgaacccaaatacatgccattgtacaatgtagaatttaatgttaaatcatctctatgttaaaataacaaaatataaacattgtcaattggaagaacgattcaaaataagcaactcgacctagatgaatgaaatagtacaatacatgccattttgttgctgaatgataagctaagattttgttgaattttggcttagttgcattcggaaatatatttacaacattttgagcacaccctccaagcacccaatttataaccagactttcttatctcaaacccaagccaaagatattacattgtattgtgtgtataaaatccgaagaaggggcatttatttcgctaaagatgcgcgtggaatcgtgaactacatgtaatctctttccggtccgggggccacctgccgctttctaggatcccacgatgatgttgttaatgggaatgtgaatcagcttgacgaagaagccgatgaagcccatgatggcgaagcccacggcggtggcgatggcgattttctggaactccttgcggtcgggttttgtgcagcgcttcaccaggcggattgagtccttggcgaaggcgcgtccgggttcggcgaatttgacaaccttgtccatttttgatttgtgagtatttaactaagaattaccaatgaactgaattgatatttattttgctgccgtgtcgcttcttgcagtgttaccaagttcctcagctcaaaacatactaaaaattaacgcctttcctttagttgttaataaattttttttttggttgaaatataagtgtatttgaattattttaatttattttgagtttttctttaaattgaacccattcaattattactttgaagcaaatcatttaatgaacagtttttaacaattgatttgggcacactaccctaccctagcgtcgatggaggaacggtggatttttgaacatatggacgttttctatttatttattttttcgtcatttggaagtgaattccaaattccgtgctccggaatggcgtgcttataggcttacatttgcctaatttagtaatgatcctgaataaatgatcccctgattaaaaaagttctcctaacagtgggatgagtttgaaaggtatttaaaaatgccgccttctctagtagaagtactacagccgatccgtgtccttaactgctttattaacagtaatagttttgggagacaccgcagtttatctgagggttagtttatctgaaggttagtttgtttcctggtggtttgtttatctggttagcttatctggggtctagtttacctgaatgataatttacgtgggagttagtgtaactgagggttcagttgactggtgtttcgtttagctaggggttagttaatctgaggtttcgtaattttaaaagaaatccatttaattattactttgaaccaaatcatttttaacatcttgtaaagcttttagagttggtcacactaccatgaacagcagtaaaattgcaaataaatatgtaattatttggcgatagaaaaatggaggagtcaccttacctgcacagcccctaccaggtggccattatagccaccgacctgcaccacgaggataccataatccaagcagcccagtccctggactgtctacacaaaaccataaactcgattttcgagcga

SEQ ID NO: 18911 - DNA, 356 bp, DROSOPHILA
attcagttcattggtaattcttagttaaatactcacaaatcaaaaatggacaaggttgtcaaattcgccgaacccggacgcgccttcgccaaggactcaatccgcctggtgaagcgctgcacaaaacccgaccgcaaggagttccagaaaatcgccatcgccaccgccgtgggcttcgccatcatgggcttcatcggcttcttcgtcaagctgattcacattcccattaacaacatcatcgtgggatcctagaaagcggcaggtggcccccggaccggaaagagattacatgtagttcacgattccacgcgcatctttagcgaaataaatgccccttcttcggattttatacacac

SEQ ID NO: 18912 - protein, 68 aa, DROSOPHILA
MDKVVKFAEPGRAFAKDSIRLVKRCTKPDRKEFQKIAIATAVGFAIMGFIGFFVKLIHIPINNIIVGS

SEQ ID NO: 18913 - DNA, 3872 bp, DROSOPHILA
gatgactcagatggtgggctataatgatctaatgagttaagttattcaactcattaaaaataacaattaacaatttttaaaattaacaaacagtaagtatccttttaaaacgttgttaagtgcaatgcagccaaaaccaagctttagatcttaaaaaccttaaagcaatttgaaaaatttattgctcttaagttataaaatcagcaacccgataaaggaaagtccttggtaattacttaacgacaatatgtttttgggattaaaagtcccatttgattttcttctaaagctgctgggaaataaaaccaaatcgatgtgctcacaaatctcaatctccctgcaaattcaaatgattcactttgtttttataaccaatttatagttccgtttttttttttttgtgatgagcactggaaacaaaactgtgacaacagcagaactgccaacgatattacttcgtaagaaatatacagagataatgccacacagaacacacacaatcaatatgggtacgggagaaaaacaataaaatggaaacatcaactcgagaagtcatcgatagatggatggcaggaaggaaacggaaagggacaggaggagcaggatgggcaggaggataaggaggagctggtggactatcgctgtttgcctcttggtttgccttttttttgctcgcccggacaatgacaacaatgagtagcaatgaaccaaaatgaatgagtctataaataaatgaatgcagcgtttcaatttcggttcaattggtccgaagcaaagacaaaaataaataagaacgaacgaacaattccaccaataatggtaagcaatgaaaaacctgctatcaacgaatttatacaattgatcaaaattgtatttttcaatagtttcttacggaaaaaattgatagggacttcaaggaatttcataaattcaagttgaagctcaataatattctaggcttttgcagtatttaacttgatattttgattgaaaatttcaatcattttgcaatacaatagattgaacttgctgatattttcagatctttggggttaaatgatggactcaccacgcagaacttctcgctcttcttggtgcactccttcaggtagagatgggcaatgtccgtggtgtagttggtgcagggcgtaatggagcccacgccctcgttgtactggccgcacatgtggcacttgagcccgtcggcgaatcccaagctgccgctgcacaagacgatggccaccagaatggccagcgttttcacatggtagctggacgcaatcgatcctggggctgatgaggatgttgaatgcatatgcattgacggggccttgtcctcgtccacgttcaccgagttgacagctgcttttgttgacattgcttcttggttgccgctcgacattttcatatgagttctgacctttaccgcagagttcacactcactaacacactggcacacacacactggcgagttggcgaactggcgaactgacaaatgggcagaatgacgaactgacaaactgcactcactgaaatcgcaattttcactttgttcctctcagtggaatcgttccgctttttggaagactttgtttctactgttgttagtcggttaatatattagcttaattgttgttttcgtttatttatattgcttaaagggttctgccaaagatcttcgacgatgttcgtgctaaaattgaaatattatactattaaggcaatcatttcgtgttgtagttgtgttatttctacaatgcaaaattccttttcaatgtagtcaatcaaaatttattttttaatgagaaattttataacattttcagaaaggagtgacaactattgctgtttttttgcagctcaggatgtcgcgtaaatcacaaaagccttcaatgctctgggaacttttgttgcatgcaccttttgtttggaatgttacaaattgccagcagatgccacgcccagctttccatcttttttttagcctataagcatgtaggccacgaccgcacggggccacacgtttttctcgaaactcgaaaaattgttttcaaattgcttttgttgtaagttaaatgcgcgaatgcgagtgtgtttgtgtgtgtgcgtgcgaggcgggggaggagggaagaggtaaaggggtgtttaaaagaacttttctatgcgttcagcgttgagtgtttccacgaatttttccgaaaatactttgaggaacggcaggagccaaaatcgtattacggatctcattgtgttcttttgttgcctacttttgggctttgatttgatttgctgaaatacatatgaggctccgggggaaaactgggtaaaactgggtaactgggggctggatcaatttggggcttgcagttctgctcttttattccgctcgagaatcagcaatccctagtatcacgcatacgccgtgtggccctcgcagtggcagcagcagccaattaacaagtcatttctgttcttccttttttacttgtttctgttttttaattaaacgaatgaatgcaatgagttttggtccgtcataatgggcgaccttccgcattcggtgctatggcaaatgcaatattttttgcacatttttggccgcctcaatggcaagcgtaataacacaaaaacagcagaaacatcgtcgacatgatctttggatttgaataaataagaaaaactgtgttttatgctcttcaaaatatttcacaagcgtttgtataaattgctttttcatgagatttcaatcgagattttcgatttatgtgttttttcttttcttttacactctgaattcaaacacaaaactaacggacacaaacttttgaattatttcaaactgcgtccgccaaaccgtgcgttccgtctgagttgaaaatgttgactgcagtgccagaagttgaaaccgcggccgtagaaccatcagcatgaagaagcatccgcagcagcagcagcagccgacggggcggatgagcgattcgattcgggtcgggtgacttcgtattggtccagtgacccagtgctactcaaactgtttacttcttcatttcagtgctaatgaaggtcggcagcacaaatatttgtagtcgagggagttgcagccatccctagaccatcgaaaaccgtaataagggtgatgaaatgtatggttttcattggcacagaaagtacatagcaatccagttggaagccgcttaattcttttgttcttactattaatgtactcgtaaaaagtaaaaaataatttaaaaataaatcaaaattcaattcgtccctaacaattaatattacgttaaattataaatgcgtacaatcattttaaattacagtttgatgaataccagaacctagcgccaatttcaactacagtttgatgaacaccataagtccaccaaagcactgctttgcactgcttgcctagtgataactaaaaccactgctttggcgccaaatcaacgttgtttcattagcagcaatagcaatatgctaattttatagttaagaatataattcctaagatttgtggccccttaacgcctttataataatggcacagataatttgcttatcgccccccaaggaacaggtaaatactgccaatctgattatttattaagtgctttaattttcaatttattgaacaatatactttgtgactaagccgatatgatttggttgcttttgatccagtcaacgtactggctaaccttacagtagacacccggatagggagccacggtgcagggcttaatgctccacgacacgatgcccacttgctggccattgtagatgaggggtccgcccgaatctccactgcactgtccctttcctccttcgtctactcctccgcatatgtgatatttgggatccg

SEQ ID NO: 18914 - DNA, 762 bp, DROSOPHILA
ctcagacggaacgcacggtttggcggacgcagtttgaaataattcaaaatataatatttcaattttagcacgaacatcgtcgaagatctttggcagaaccctttaagcaatataaataaacgaaaacaacaattaagctaatatattaaccgactaacaacagtagaaacaaagtcttccaaaaagcggaacgattccactgagaggaacaaagtgaaaattgcgatttcagtgagtgcagtttgtcagttcgtcattctgcccatttgtcagttcgccagttcgccaactcgccagtgtgtgtgtgccagtgtgttagtgagtgtgaactctgcggtaaaggtcagaactcatatgaaaatgtcgagcggcaaccaagaagcaatgtcaacaaaagcagctgtcaactcggtgaacgtggacgaggacaaggccccgtcaatgcatatgcattcaacatcctcatcagccccaggatcgattgcgtccagctaccatgtgaaaacgctggccattctggtggccatcgtcttgtgcagcggcagcttgggattcgccgacgggctcaagtgccacatgtgcggccagtacaacgagggcgtgggctccattacgccctgcaccaactacaccacggacattgcccatctctacctgaaggagtgcaccaagaagagcgagaagttctgcgtggtgagtccatcatttaaccccaaagatctgaaaatatcagcaagttcaatctattgtattgcaaaatga

SEQ ID NO: 18915 - protein, 133 aa, DROSOPHILA
MSSGNQEAMSTKAAVNSVNVDEDKAPSMHMHSTSSSAPGSIASSYHVKTLAILVAIVLCSGSLGFADGLKCHMCGQYNEGVGSITPCTNYTTDIAHLYLKECTKKSEKFCVVSPSFNPKDLKISASSIYCIAK

SEQ ID NO: 18916 - DNA, 4054 bp, DROSOPHILA
atttttaatgaattccagataacgagcacactatatcttcgtttgctttgtacataggaatcttttagtattttataattatttgtattattagctttagggagactagttccgttccccatttatattttactcaaagttttgtatttacctcttcgtctgtataatactcggtgcggtattttgtctgccaaccactccagaaagatctatgctggtatggtatcactctactcctttcgacatatctcttgtaagtaaccacctgcgatcggttacaaacattcaagccgatgggttgaatgaagtcgacgagtagcataaaaaaacccagacacacccaaaggcattggatgtgtgacattatggaaagagcagaaatcttgtaaaattcagctttgatctctatgtaaatgagttcggcgcaacgtttcaaattcaactgagctgcaaatgtaaatttatatatttcatgttgctccaaaatcagctacatccgttgaggactcgacaatctagacctatacatataaaccgcttgggattatctgagcatttgtttatcccaatattgcaagcaaaatatgtaagacagaagcaaacgctataatgtttccttcaactactgtatatatttcatcagccattcaaatatgccctaggttactaaagatacttaaatttattctaaatggttaatttcattgcggctagtcgagttgcaacatcaaatgttattgcttttttctacaaagaacaagaccgtaaataaataataattgcttgatatgacgattgacgaccgcctgcaataatgattagctcttatcatttatatgttagaactgtttatggtgaaagtgtgagtagtttactctcccagagcactcactcaggtatctcggtgattccacactgttgaatacctctcccaaattcaatgagcagctacaaatagagcagagtatctgattccacaacagacgccgtttagaactcgtcgcgcgtggacgtagattttagagcgatcgaaaatggttctgattactttgaccctggtttcgttggtggtgggcctgctgtatgccgtgctggtatggaactatgactattggaggaaacggggcgttcctggtcccaagccaaagctattgtgcggaaactatccaaacatgtttactatgaagcggcatgcaatctacgatctagacgatatatacaggtgagttatcccagctagaaaggttatattaactaccaaaattcaatggatcatcaactgtttcacaaagaaaccaagaaccattcttaaaacgcatttaaaaaattacgctttacttgaatttaatgcgatcattttattcaggcagtataagaacaagtacgatgctgtgggcatttttggcagccgctctccacagctgctggtgatcaatcccgcgttggcgcgtcgagtctttgtgtccaactttaagaacttccacgacaatgagatcgccaagaatattgacgagaaaaccgatttcattttcgccaacaatccgttctcgttaactggcgaaaagtggaaaactcgaagggcggacgtaacgcctggtcttacgatgggacgggtgaggcagttcatccagtggcaagcccgaaaagtactgatccaaccaatatacataattacagataaagacagtctatccggtgacaaacaaggtgtgccaaaagttgaccgagtgggtggagaagcaattgcgtctgggttctaaagacggcatcgatgccaagcacgtaagattccatctatactatctgttgtacgtattctatgaaaccaaacctgttttttttttttttttgctactttatcgtccacagatgagtctctgcttcacaacagagatggtcaccgattgtgttttgggtctgggcgctgaaagcttttcggataagcccacacccataatgtcgaaaatcaatgatctcttcaaccagccctggacctttgtgctgttctttatactgactagttccttcccatcgctaagtcatttgattaagctacgcttcgtgccagtggatgtggaacgcttctttgtcgacctgatgggcagtgcggtagagacacgtcgtgcccagttggcggcgggaaagcagttcgagcggtccgacttcctggactacatcttgcaactgggtgagaagcgcaacctggacaatcgtcaattgctggcctattccatgaccttcctgctcgacggattcgaaacgacggccacagtcttggctcacatactgctcaatctgggtcgtaataaggaggcacagaatcttctgcgagaggagattcgttcccatctgcaggatggcaccattgcctttgaaaagcttagcgatttgccctacctggacgcttgtgtgcagggtaaattaaataatttttcaagctgcaattattgtttttaaccgtatttacccatttattttatagaaaccatccgactcttcccgcccggatttatgtcgaataaactgtgcaccgaatccatcgagattcccaacaaggaaggtcccaacttcgtcgtggagaagggcaccactgtggttgtacctcactactgcttcatgctggatgaggaattctttcccaatccccagtccttccagcccgagcgattcctggagccagatgctgcaaaaacatttagggaacggggtgtcttcatgggattcggggatggaccgcgtgtgtgcattggttagtaaactatcttttctactataacactacaaaatcatagtgcctactgcagattctgataattgaaagcactcactacaattgaactttgaatttaatattattattattataacattttattaatttccttttcaggaatgcgatttgcgacggtccagattaaggctgctattgtggaactgatatcaaagttcaatgtcaagatcaatgacaaaacccgcaaagacaatgattatgaacccggccaaattatcactggtctgcgtgggggcatttggctcgaccttgaaaagctttagagattcaattacttaataactccccaccagcgacggaaactaatgtgaaaattgagtggcgtagttccccagtctatttttacagaatatttgatatgtatacccagtggtacacttaagctcgcaattggctgactttgttattgcatatgtatatttgttgtttctatattaaatatatttcgtatataaaattgtgtgtgtgcgacataaatataaggttgacatagtaacaacgtcgtagttacttgatattggggtaattgtattatattattatttaattataaattttcttcaaatgagtttggttagttgaaaattagttaagcacagggattttaaataatttttctatctatggtttattgaccagataaaaatgttttcattttgtagaatcctaagaattggatattgttaggcttgctattataaaaagctaccactaactaatattgatttaaaatagacaaccagagatgataacgataggcaaatcgagagctatttatttcgtaaattcaatgttaaggatctgaatgcgagtagactgcacttggacccgtatcgcaatctctggggctattgttctgcctgcaattgggttcaataaacacatatgagcttaacgcgtgggtatctgtcccacatgaaagacgatagagagaggaaaataatacgtttaaatgataagcgcttaagtccgagatacttacccatggcatccatgggaagtcaattggtgatcatttgtcgagcgtaacttaaaccgaacagttgatcaaagacgtttaatcgaggatcataataggattttaaaatttaaaatgcttcttctcttcttggttttactgagcggccttcaggtgcagggctgtgtcaaacaagctcagtgagtataaacgttcgaattttgaattgtttttatttaaattttccggttctggaacttaagggtggttaaaatgcgcggtactttggtaacaatgcgtaagca

SEQ ID NO: 18917 - DNA, 1552 bp, DROSOPHILA
tcgcgcgtggacgtagattttagagcgatcgaaaatggttctgattactttgaccctggtttcgttggtggtgggcctgctgtatgccgtgctggtatggaactatgactattggaggaaacggggcgttcctggtcccaagccaaagctattgtgcggaaactatccaaacatgtttactatgaagcggcatgcaatctacgatctagacgatatatacaggcagtataagaacaagtacgatgctgtgggcatttttggcagccgctctccacagctgctggtgatcaatcccgcgttggcgcgtcgagtctttgtgtccaactttaagaacttccacgacaatgagatcgccaagaatattgacgagaaaaccgatttcattttcgccaacaatccgttctcgttaactggcgaaaagtggaaaactcgaagggcggacgtaacgcctggtcttacgatgggacggataaagacagtctatccggtgacaaacaaggtgtgccaaaagttgaccgagtgggtggagaagcaattgcgtctgggttctaaagacggcatcgatgccaagcacatgagtctctgcttcacaacagagatggtcaccgattgtgttttgggtctgggcgctgaaagcttttcggataagcccacacccataatgtcgaaaatcaatgatctcttcaaccagccctggacctttgtgctgttctttatactgactagttccttcccatcgctaagtcatttgattaagctacgcttcgtgccagtggatgtggaacgcttctttgtcgacctgatgggcagtgcggtagagacacgtcgtgcccagttggcggcgggaaagcagttcgagcggtccgacttcctggactacatcttgcaactgggtgagaagcgcaacctggacaatcgtcaattgctggcctattccatgaccttcctgctcgacggattcgaaacgacggccacagtcttggctcacatactgctcaatctgggtcgtaataaggaggcacagaatcttctgcgagaggagattcgttcccatctgcaggatggcaccattgcctttgaaaagcttagcgatttgccctacctggacgcttgtgtgcaggaaaccatccgactcttcccgcccggatttatgtcgaataaactgtgcaccgaatccatcgagattcccaacaaggaaggtcccaacttcgtcgtggagaagggcaccactgtggttgtacctcactactgcttcatgctggatgaggaattctttcccaatccccagtccttccagcccgagcgattcctggagccagatgctgcaaaaacatttagggaacggggtgtcttcatgggattcggggatggaccgcgtgtgtgcattggaatgcgatttgcgacggtccagattaaggctgctattgtggaactgatatcaaagttcaatgtcaagatcaatgacaaaacccgcaaagacaatgattatgaacccggccaaattatcactggtctgcgtgggggcatttggctcgaccttgaaaagctttag

SEQ ID NO: 18918 - protein, 505 aa, DROSOPHILA
MVLITLTLVSLVVGLLYAVLVWNYDYWRKRGVPGPKPKLLCGNYPNMFTMKRHAIYDLDDIYRQYKNKYDAVGIFGSRSPQLLVINPALARRVFVSNFKNFHDNEIAKNIDEKTDFIFANNPFSLTGEKWKTRRADVTPGLTMGRIKTVYPVTNKVCQKLTEWVEKQLRLGSKDGIDAKHMSLCFTTEMVTDCVLGLGAESFSDKPTPIMSKINDLFNQPWTFVLFFILTSSFPSLSHLIKLRFVPVDVERFFVDLMGSAVETRRAQLAAGKQFERSDFLDYILQLGEKRNLDNRQLLAYSMTFLLDGFETTATVLAHILLNLGRNKEAQNLLREEIRSHLQDGTIAFEKLSDLPYLDACVQETIRLFPPGFMSNKLCTESIEIPNKEGPNFVVEKGTTVVVPHYCFMLDEEFFPNPQSFQPERFLEPDAAKTFRERGVFMGFGDGPRVCIGMRFATVQIKAAIVELISKFNVKINDKTRKDNDYEPGQIITGLRGGIWLDLEKL

SEQ ID NO: 18919 - DNA, 2990 bp, DROSOPHILA
tggggcttcgatgatgaggccaaccacctgttgcttcagcaggagctgcccgccgtgcgctgggttggcggtccggagatcgagctgattgccatcgccaccggtggacgcatcgtgccgcgtttcgaagagctcacgcctgagaaactaggtgttgcgggactcgttcgcgaaatgggtaggttttcattttatagtcggatttagttcattcctaagtgattttgattctttcagcattcggaacatccaaggacaagatgctggtcatcgaggagtgcaaaaactccaaggctgtgaccatcttcttgcgtggaggtaacgccatgatcattgcggaggctaagcgatcgattcacgatgccatctgcgtggtgcgttcgcttgtgaaggactcgcgtattgtttacggtggtggagctgccgagattagctgctcgttggctgtggccaaggaggccgaccaactgtccacgctggagcagtacgccttccgcgccttctccgtggccctggagagcattccgctggctctggcggagaacagcggcctgcatcccatcgagacgttgtcggagctgaaggccagacaggtggccgagaagaagtccagcctgggtgtcgactgcatgctgtcgggtgattcggacatgaagagccataacgtggtggagtcgctgcactcgaagaagcagcagattctgctctccacgcagctcgtcaagatgatactcaagatcgacgacgtgcgctccaagaacgaaggcggcatgtaacgaccgcccagcagcagcatcatacatcagatctagtttcagattcacatccccacgcttcgctatctcttcacgaacaacacccgcgtcaagcctcatctctatgtacatctgtattaattgtttaattttattaatccacaagttctttggaaaagaagaaaattacattaaacaaggggctatccctgttcaaatacactaaaacgaaactaagacatcgactagactttcttgccattgatggtggttagctgcttgcgattgatttgatcgaagaagagcaatcccgccgagcgttccacgctctctggcggcacctgaaacacactgatgggagtgtcgttgctgatcacctgattgggcatcacgtacgactccatgtggagtttgtggtccgcggactcgcccacaataaccttgtagaagtgggtgggaacagccacggtgttggcgccgatgacctcgtacttgacatacgatttcccatcgtcctccttgtgcggtaggtacagtggacccgtacagacgtacacattggagtaggtcttggtcagtctgcgcacgtgtgcctccagcgtgttccaggcatcccggttgaagccctggcccacctgtggcgccatgttcgataggtagaaggtttcgtcgcagtgcttctggtgcagtcggtgatttccagcggcggccatgtgcccgcgatcatagcccgatcgtcggtagtccgtgttctgtgacctgaagaacggatggatgctctcgtcctgcttgaaatcgcacttcgatctgtccacggcatcgttcttcgccaccgactctgccgtaaggtgctcgaacacccagtggggcacccggttcctccgatcgtaagacagcacgtagtccgaatgggagcgcacgtgatcgagtccgggaaatccatacttcatgatctgtccgatccgagacggagttgccgtcaagcttacattgttctcttgggcgggaatcaaactggcagccgaaacagttccaaaggtgggcagaccaggcagccgcggaaggccacttgtggagccattgtgctggcgttcgcgttccacgtgggtgcccagataaaaggcgcccagggcggtggcacccaaagctaatacgccacccactcgaggagcactcattttggcagttttatttaaaaatctggacaaaaagaccagatagcgaccgctattgcacaattcaggtactttagtgtgaccacagtttaaagtggtcgaacgaactacagtgaaagacataaatatatgcacggattgctaaatttgcttgggaaaataagtaagtatactatgtatatttcattaatgtattaataacttaaaaaggcgacgtgtgagctttaaccgtagcccaagtcgcaaatggtggtacttaccaattccatatagatagatgggcttcgtgaacagcaagatatccgagctcgaataactcgtcgtggcagttcaaaattccagggctggatatcccctcgtcttatgtgctctaatacacactcggcgtgtagcaggttgtaagaaattcgcgtttaaaatcaaataacttagtgggcgctgccatgttttaaaatttattcgataaccgatccccgacttaaaaggaaaagtgtgaccatcaatttataaaatttagcttatattttgtaaaaaaattgttgcttctttgtttaggaatttttaagaaaaagcaattgtgtcgcagaacaaaacgatggctaaaacagtaattttaaaaaggcatacaacacatataaaattatttttaaggttaaagaaagatttttataacagaattaaaatcttctaattttaaagcaatattaggcgaacccaaatacatgccattgtacaatgtagaatttaatgttaaatcatctctatgttaaaataacaaaatataaacattgtcaattggaagaacgattcaaaataagcaactcgacctagatgaatgaaatagtacaatacatgccattttgttgctgaatgataagctaagattttgttgaattttggcttagttgcattcggaaatatatttacaacattttgagcacaccctccaagcacccaatttataaccagactttcttatctcaaacccaagccaaagatattacattgtattgtgtgtataaaatccgaagaaggggcatttatttcgctaaagatgcgc

SEQ ID NO: 18920 - DNA, 990 bp, DROSOPHILA
tgcaatagcggtcgctatctggtctttttgtccagatttttaaataaaactgccaaaatgagtgctcctcgagtgggtggcgtattagctttgggtgccaccgccctgggcgccttttatctgggcacccacgtggaacgcgaacgccagcacaatggctccacaagtggccttccgcggctgcctggtctgcccacctttggaactgtttcggctgccagtttgattcccgcccaagagaacaatgtaagcttgacggcaactccgtctcggatcggacagatcatgaagtatggatttcccggactcgatcacgtgcgctcccattcggactacgtgctgtcttacgatcggaggaaccgggtgccccactgggtgttcgagcaccttacggcagagtcggtggcgaagaacgatgccgtggacagatcgaagtgcgatttcaagcaggacgagagcatccatccgttcttcaggtcacagaacacggactaccgacgatcgggctatgatcgcgggcacatggccgccgctggaaatcaccgactgcaccagaagcactgcgacgaaaccttctacctatcgaacatggcgccacaggtgggccagggcttcaaccgggatgcctggaacacgctggaggcacacgtgcgcagactgaccaagacctactccaatgtgtacgtctgtacgggtccactgtacctaccgcacaaggaggacgatgggaaatcgtatgtcaagtacgaggtcatcggcgccaacaccgtggctgttcccacccacttctacaaggttattgtgggcgagtccgcggaccacaaactccacatggagtcgtacgtgatgcccaatcaggtgatcagcaacgacactcccatcagtgtgtttcaggtgccgccagagagcgtggaacgctcggcgggattgctcttcttcgatcaaatcaatcgcaagcagctaaccaccatcaatggcaagaaagtctag

SEQ ID NO: 18921 - protein, 310 aa, DROSOPHILA
MSAPRVGGVLALGATALGAFYLGTHVERERQHNGSTSGLPRLPGLPTFGTVSAASLIPAQENNVSLTATPSRIGQIMKYGFPGLDHVRSHSDYVLSYDRRNRVPHWVFEHLTAESVAKNDAVDRSKCDFKQDESIHPFFRSQNTDYRRSGYDRGHMAAAGNHRLHQKHCDETFYLSNMAPQVGQGFNRDAWNTLEAHVRRLTKTYSNVYVCTGPLYLPHKEDDGKSYVKYEVIGANTVAVPTHFYKVIVGESADHKLHMESYVMPNQVISNDTPISVFQVPPESVERSAGLLFFDQINRKQLTTINGKKV

SEQ ID NO: 18922 - DNA, 4618 bp, DROSOPHILA
tgcccacctgctggccattgtagatgaggggtccacccgaatctccgctgcactgtcccttgccaccctcgtccacccctccgcagatgtggtacctgggatcggtgcgaccgccatggcgttcggtgcactcctcgtctgagtagaccttcaattccacctcctgcagtgtggattggatgtatccgccagtctaaagatattaacgcccggattagatccttgaacacaaaatataagatgaatgaaaaccaaccgcattgagtccccatccgatgagcactccctcgccaccggcatccgtttgaggtgtggcaaaggcgagctccggcaactttacgggtgcaaccgtgacgccatcaaactcgaatggctcctccacgagcagcagtgaaatatcgttggcatagttgttgtagggattataatcctcgtgctggatgatcttcttcacgcgcaccacattcggaccggtggcattaatcttagtcactccatactgaacagacaaatccgatgccttgcgtccatccgtacaatgagcagcagtcattacaaactgcttggaaataatggagccaccgcaggaatgcgagccactggatccacgcatcgaaatctgaaagatattaagataaacattattttcattccacccacattacgacacttgatccaacttaccacgaaggggtatttctccacgctggaatccgtgccattgaccacacgacccatttggggagctccatgggaaatgcccgcggtggtcaagagggcgaataccgccaggcagagatcctgattccgcgacattttttcagctaaaaatgagaaccctatcgtccgacagccgcttttataagccttctgacattgccaattcacattgattacgattatttacagcaattgataggacgagattaaaccttctcgattaaatgagagcgccactatcgcgttatcttgaccaacatcaaacgaaactgcttcgattatatttaaacaattttaatcaaattaagcacaatgaacagaatgaaaaaaatgagcggcggtttcgaccagccctggaatgtgatggttctcaatgaagtgcgcttaaaatagaaaatcaaagaatttaaaacttaacaacggattttagctgcaaacaagtgggtgggttagtatacaagtaaaaggccatcggtgttaggacttacataacaattacgaataggaatagcaatatatatagacatagggttcttggggagcgttacaaatagcggtaatgatactgctgtacatagaaagcgaatctagtagagacatttgtatatctgtatattgtatataagatcatagaagtctattgtactaagcgatgctccttgcacatcgacctacaaaaatactctaacaaatgcgcaccaggcgccgaattcaattcaatttttttttgtctattgtatgctgcagctgcgtaccgtggacaacttctgctcctcatcgtccaagtgcttggcgcttaaaatgctcttgatgctctccgcctccttcatccagaattccagcttaaatattgtttcttattggtgaatttattagcattaaatgcacattttgctaacctgctgcagcaacagattacggcgttcgccctttggttcattgtttacaaacggcaccagaatgcccaaagctgaagtatacgactccagtgctgcgtccagcttccgctcgtagaggtatagctcacccttccgtccgatttccaggccagtcttcatggacggacttgagttcgaaagggcatctaaaaaatggaggaggacggtatggaagaacatcaagtttacaaaacaaatcaaatcatacatagctgtttatagcgggaatccggttccagcatttctgcaacacgcgagctgcttggctgcgcagcgggcacctgggtagctgaagatggctcttggttagctgtggcagctgtagccgcctgccgttgacgttcagccaacattctgtattcgtcctcgattatgcaattcttgatttcctcggcgcgctttgtgtaggacaaggcacgattgcgcaatgccagccgcttggtggcgtccgtctcctccgtgataagcggcacaaaatactgcagggcactgcagtacagatagtaagcctccttgtaattgtgtttctcatcgtatgcgcatgcttgcgtgaccaaatcaatggccttttgcagagtgtgctccgtgggaaacgtcttgagatcgagaaagggatgcgcaaagaagtctgcaaacgaaatgcgcgccgtgggctcgtgggccaaaaggcggcgcaagagatcatggcactcgttgctgatccgagcgtttggtggcagtgttatggcctcggccttcctaatcctcagcaatagctcctcaatggttcgcgaactatacggcgccttgccgaataggcattcgtagaggatgaccccgatgctccagagatccgccttggcatcgtactgatgcttgcgcacaatctctggggccatgtagagcggcgatcccttcagctgttgattgatttcgcctagtttgaggtgctgagcaaacctacaacaaactagaattattagtataaagtatctattgtaatgctatttggctaactacccaaagtctgccaccttcagggacacattgttagctccccgggtaagcagcaggttctgtggcttaaggtcgaagtgggacacatcgttggctcgcatgtactgcacagcggcagctaattggcgcaaaaagtagcgacaggtgctctccggcaatgccttcttggttcgtataaaagcggatagattgccggcattgcaatactccaaaacgatgtaaatatttctgaaataaagtagacattgtagcattcttaattctgttcattgctagtatgttttctaacgaaaatcgatttcaattaactagttccgctgaattggtcaaaactggatgattaattgttggaacccgttccttgtaactgagtatgtcttgagtagaataagtgtacaaaactatcatttgaattgaagaactctaaagaaccaaacgttttttatgtacatatacatagtaggagtagagctatagaggattgttagctaatcctgccaccatgtcaactcctacatatatgctaatccttctagaaggatgaacatcgactgattgcatggaacgatgtcatacttgtcgtcccagaagaaatcctgcagggtcacaatgtacttgtgcttgagttcccggaggaggcgtatttcggtgattaggttttcccgcgaggtttgcgacaacgtcgacatttccacatacttgatggcatgataagtgcgctgtttctgcaatgacaaaacgtaaatattaagaccctttgctctatgtgatgtgtatgtaactggtgtcccactttgtgccgcgctttgtacacggtcgcatagctgcccgctccaagtttctcgagaatttcaaagtccgtgatccgcggcagtgacatgttgggccggtcatctagttctgataccaaatatttttaaaattatatgtttatgttttccattggtcgattgttttcgctctcctctgctcacacacacacgcgcgcgcaatccagggcttcgcaattcttaacgatatcacagtgaaattgctgaaacaaatcgatagcaatcaatcgaatttaaatcattcggcgatataaaaaatttgattttgttgaatatataaaaagtttttactcaggaatcagaattaaaatgtatatatgatttaactaatccagcagacataaatgaagttcggttatgttgttttataaacatggcaataacttcaaatttacaatgaaccaaatctatattatttttttcaattttataagtttatgaactgaacgtctcgtaaccatatgcatctcagttatgaataccaatttaatcatttttcttatatcctatattacatttaaactgataaataaacaggcgcccaactgcacagctgattagccaatgctgacaacatcgatagcacttgttgctctatcggtatttgctacttttgcttatcgcatccctggaaatatctaagccctgattcgtatgttttgtttttgatgcgttgcgtggtgattaatatttcgtttttttggggtaaataaatgctatggtatttcaattattgtttttcggagcctctgcagatactgcaacagtataacataaaaatatatgtagttaaccaccttggaaagtgtttaaaacgcggctaaagtcttcgaaaacgttaagccttgcttgacacacccaaaatacacaaattaagcaaacacgccctggtcaataaacgaaaatccacagaactcgcttactaacggttatgtttcaaatgttttagtagctgattaaaggattgataaaggacttgccttcttatacacgtgacgagacttaaaaggcttcatgatgaattacggtaggaaaacgccctccacatatcggtccaatccgtcggtttattcccatgccacgggaaggtaagtttcccttataacctttatagtaatatgaccaagctaatct

SEQ ID NO: 18923 - DNA, 1651 bp, DROSOPHILA
gagagcgaaaacaatcgaccaatggaaaacataaacatataattttaaaaatatttggtatcagaactagatgaccggcccaacatgtcactgccgcggatcacggactttgaaattctcgagaaacttggagcgggcagctatgcgaccgtgtacaaagcgcggcacaaaaaacagcgcacttatcatgccatcaagtatgtggaaatgtcgacgttgtcgcaaacctcgcgggaaaacctaatcaccgaaatacgcctcctccgggaactcaagcacaagtacattgtgaccctgcaggatttcttctgggacgacaaaaatatttacatcgttttggagtattgcaatgccggcaatctatccgcttttatacgaaccaagaaggcattgccggagagcacctgtcgctactttttgcgccaattagctgccgctgtgcagtacatgcgagccaacgatgtgtcccacttcgaccttaagccacagaacctgctgcttacccggggagctaacaatgtgtccctgaaggtggcagactttgggtttgctcagcacctcaaactaggcgaaatcaatcaacagctgaagggatcgccgctctacatggccccagagattgtgcgcaagcatcagtacgatgccaaggcggatctctggagcatcggggtcatcctctacgaatgcctattcggcaaggcgccgtatagttcgcgaaccattgaggagctattgctgaggattaggaaggccgaggccataacactgccaccaaacgctcggatcagcaacgagtgccatgatctcttgcgccgccttttggcccacgagcccacggcgcgcatttcgtttgcagacttctttgcgcatccctttctcgatctcaagacgtttcccacggagcacactctgcaaaaggccattgatttggtcacgcaagcatgcgcatacgatgagaaacacaattacaaggaggcttactatctgtactgcagtgccctgcagtattttgtgccgcttatcacggaggagacggacgccaccaagcggctggcattgcgcaatcgtgccttgtcctacacaaagcgcgccgaggaaatcaagaattgcataatcgaggacgaatacagaatgttggctgaacgtcaacggcaggcggctacagctgccacagctaaccaagagccatcttcagctacccaggtgcccgctgcgcagccaagcagctcgcgtgttgcagaaatgctggaaccggattcccgctataaacagctatatgccctttcgaactcaagtccgtccatgaagactggcctggaaatcggacggaagggtgagctatacctctacgagcggaagctggacgcagcactggagtcgtatacttcagctttgggcattctggtgccgtttgtaaacaatgaaccaaagggcgaacgccgtaatctgttgctgcagcagctggaattctggatgaaggaggcggagagcatcaagagcattttaagcgccaagcacttggacgatgaggagcagaagttgtccacgcgcacttcattgagaaccatcacattccagggctggtcgaaaccgccgctcatttttttcattctgttcattgtgcttaatttgattaaaattgtttaaatat

SEQ ID NO: 18924 - protein, 520 aa, DROSOPHILA
MSLPRITDFEILEKLGAGSYATVYKARHKKQRTYHAIKYVEMSTLSQTSRENLITEIRLLRELKHKYIVTLQDFFWDDKNIYIVLEYCNAGNLSAFIRTKKALPESTCRYFLRQLAAAVQYMRANDVSHFDLKPQNLLLTRGANNVSLKVADFGFAQHLKLGEINQQLKGSPLYMAPEIVRKHQYDAKADLWSIGVILYECLFGKAPYSSRTIEELLLRIRKAEAITLPPNARISNECHDLLRRLLAHEPTARISFADFFAHPFLDLKTFPTEHTLQKAIDLVTQACAYDEKHNYKEAYYLYCSALQYFVPLITEETDATKRLALRNRALSYTKRAEEIKNCIIEDEYRMLAERQRQAATAATANQEPSSATQVPAAQPSSSRVAEMLEPDSRYKQLYALSNSSPSMKTGLEIGRKGELYLYERKLDAALESYTSALGILVPFVNNEPKGERRNLLLQQLEFWMKEAESIKSILSAKHLDDEEQKLSTRTSLRTITFQGWSKPPLIFFILFIVLNLIKIV

SEQ ID NO: 18925 - DNA, 28918 bp, DROSOPHILA
gacatgggcgaagccaagtccctggccatgcgaatgtcccgcgaggagggactcctgtacgtgaatggctacgatcatccgcacattatggccggccagggaactattggtttggagatactcgaacaggtgccggaaccggatgcagtggtggtgccagtgggcggcggtggactgattgccggtattgccacagccgttaaagctttgtcccccaaaaccaagattattgtaagctatatttttattattactttctttgtatgtcaccttattgttttttaacagggtgtggagtcggagaagtgcgccagcttcacccgggccatggaaaatgatggacctattcacacgcccatcaagaacacattggctgatggcttggccgttcctaaagttggctataatgcctatgccaccgcaatgccgctaatagatcgcatggtggtggtcaaggaggagtggatcgcagtggctatcctaagattggtggaggaggagaagtgcgtcgtcgagggagcgggtggtgcgggtctggcggccattctggccggacacttggatgagctcaagggaaagaagtgagtgctttcagtttacttaactataatttctaaacatttctttgttttttttttatgatagagttgtggtgcttctgtgtggaggaaacatagacaccaccgtttttggacgttgtttggagcgaggtttggctgccgttggacgcctggttaagtttaatgtggaggttagcgatcgtcctggcggaatcaacgatctttgcgccctgcttgtccgagtaggcgtgtccattaaggacatcatgcacgagcgagcctggctgagggatgtttataccgtggaagtgaaggtcgtgtgcgaaaccgtggactggacccatagtttgcagctaaaaaacgagctgaagaagttctactcgaaagttcagttctccgatgttccgctggccctgtcaaatgataccgattcgtaggattctcttctgtatatatatatatatagtacacatatgatttattcacttcagcagcgcagcaaaacttaaagctttaacttagagcttagttgtattagagtaaacataatcgtagtcgaagtagaaatgtaaattaggtgtaaataaatatacatagaatacaaagtctagaaacaaattgacaaacgtagggattgcataatatacaaattatgaatcactgcctaaaaactaaaacacaaacaactaaaaatatataaattcatgagcttaggttacgaacgccgttcttcaagcagacacacaatatcagttttattttattttctcttatctttttttcgtttcacttttttttttgttttaagatctcttgcggtttttggcacattaaggatttataacatacgctcagtcaggcaaacacacactacagtacacatcgaaatttacatttacatggctagaaaatatatatgtctctatataaatatggtttatatggtaaaatgtatagtaggtatgtgctatctcataaatacaggcaactcgttgtcaagtcctcggacgtaacgtactttaaaagcgctgactaaatctacgttgagtatacgctaagtgttccgcatggagccgctcttagtggctgttgtccaggcgcagaatcagtgcatccaccacattgtagatctcatcgaaatgcggtcgggattcggcgtcggctgcccagcactggagcatcagtcggtacatctcctcgggcgtgctcttcggcgttggcatacgatatcctagagatcataagtcacatatcatattcttttcctattaaaagcaaatctagtagtatttacccgtatcgatgcgctctctggctctggagttggtcatgccggagtagggtgtgtcgcccttggagaagatctcccacatcagtatgccataggaccacacatcgcacaacgaagtgtacttgccgaaattcaaggcctcgggagctgtccacttcacaggtatttgtttcatgccatcggaaactattgaaggaaactttcattcagttttaaggttcttctctattgtgtagttaaaattacctatatattcctcttcctcgcgagacattccgaaatcggagatcttcacactgtgctccaagtcaacgagacaattacgcgccgccagatcgcgatgaatgcagtttttggactccagatatcgcatgcctaaaagaaagagtttttgaatattacttactctgttactgttatttattaacttttaagtacacccacctgccgccgcatctctgcacatgcccatttgttggcgagtggtgaggccattggagttcttgcgtaaataagttaaaagcgaaccacctgaaatatgaagtttaaaataactataaattgatttattaataacaatttcaaatatataaagcactcaccgagcaccaattccatgacaatcatgatgggctgcttctgcacacaaatgccaatcaattttacgatatttggatgatcgtattgcttgaggatgcgcccttcctgtaggaatttacgcttctgttcgtcgggcagggtcattcgacaggttttgacagccacatccagtttggtggacttcagtttggccttgtagacatccccaaagtttccctacgaatatcaaaatccatttagtatgaagtacttgaaatcataggttgtaatgttagttactaacccgaccaatcctctccagaagtaccacatcatcgttgctcagctcccagcgctcccggcaaacgggtcgtcggagtatggctcccgatttcacggtcactggcaattccgagtgatactgatgcatgatcagctcctggatgctggcaaatggtggtccctcgaaccggaaattaccctctccggtggtctggacaatgaagtgcttatggccattccaacagacactgagcacaatctggctctcctcgtttcgaatcgtttcgcggaccaggaagtcaccatcgttattcagcaatcgaaccacttcctcgcgcggcagaacgccatggaaccattcctcctcgtaaagcggacgatttgtggagagcgatatctgaaagatacggataattagctaaatctatatataataatccccgaatgtttttagtgaaagcatgcagaatacaaaaaaaaaaacataggcgaaggaaaataaaatagctgcgaatcggttagcacgccatttccacatttccaaatggaaaacggaaatgcgtgggtgcaattggctctgacgaaactgcagtagctatgggctagaaacgcaaattaattataattaaatactgtaagcaaaaggcaaattaaatcataagtacgtatatatcgttactacacaaaggtggaaaatatggatctgcattcaaggttgtctcgtcgtcgagtgactcacaaatagtttcgattttggccgcttttttcgggccggtggaattggccgacccgtgaagacaattgtctcgaaaatccccccattctcggctccggcatagttgctgctgtgtccggaactgctcatgatggaacaaccagatgacccaaaagtcaaaaactactacttcaacttgcgcaattgtctcgcggaacaaaaccaaaactgaaatagtcacgcgttctgtcggatacgaatgtgatatatctccaactgctcactggccaaacagacgccaaacatttcaatggactagattaatggcgactgctggtcggtatccaaactgctcgtccgatcggtgagaactaaaagatataatcgctttattctcctcaattctgaacttgtctctcggtcactttcgctctttcccattggcacgcacaagtaattttggcaatgggaagggtgtggaaacttaaaaatcagcaacgacatttctacactctcactaagttaatgagttacactttaatttatttaattgattttaactatgcaaaatttgaaggaaagtacgaagtggcgtttctattcctttgctaaacggcaactctttcatgttcttaagatgttttaaacttaaagtgaaatcaaatcacatcgactacttgctatgcccaacccataagatttaaggtcaccctgtgtcttatttttagatccgctttataaaaagctctcttttccacacaacatgctttcgatattgaacgtgagcgcaggaaaaacatgcacaatcaatcaaacatgcaaattgaagaggcatgcagagcgatgcgctttttgattctctgtgaggtggcgtctggtggcgcccagttggcttagatactcgcgatacggtgggtgcggtggtttattctcagatactggtactgatactgatacggatacggatgcgactacgggtaactcacactggccgccaggctgggcacgcaatagcagtgatccttcatgctgagcacgtcgtcactggcgctatcctcctcctcctcgtcgttgtcgatgtcccgatccgagttctcgtccagctctccagaactggactcgaacgggtgatctttgtggccggatatttggacggatggcttaacaggcttttgaccagctggcggacagttgcagaattgctcatccgccgccgaaccagccggttgttccacctcgaactctttggcaaaatcaaagacacttttgctgggatggatgcgacgtctcttggtgcactgtttgcacggcttggagcgcttcaactggaaattgagcaacttggagcggaatgtattgcggatggcctttgatttcttctggatcttgggcactttgaatttcagtcttgagttttccttggacggcgtcgtggtagttgtagtcgttatggtggtggtgatcgtgctcgttattatcgtggactgtgaggcactgtgattgctattgctactggtatttttattattattattattattactgctggagctgctactgtttgtggggcaatcactgccactggaatgatgatgttgacttggctgcgtccttttcgcatcctgctcttcgttgaggatatgattcttgcccatcctaacgagtggactcttagagaactcctttaggttgctgaatatgttgcttatggatttctgactaaaagacagggaacgcttcttggagtgactcgtgtccttggaggatcggcactctgaactggaactggagctgcgtttcgtttggctatctggatctttggccaacttcctggtttgtatgtgattctcctcggcactttcgatggcattcacatcatcgctgggctgaagagtacgcttcagccgatcgtctagcactcggttcagctcatcaatcctgtccagatgggcatcaatggagttctgaggcgcggtttggttgatttcaattcgtatttgctcttttttcggttgaatttgttcccccttacattctggactcggtgaagtatccttctttttatccaactccagatcggcatagatatgattgttattggtgttagtaaggacagcagcggtaagctgagtgagcggggcgggcgaggcaaggacaacaggctcctcgtcctcgcccaaacacaacatggaacattgggttcgtcgcagacgcgtcaaatcgggcggattagtggagctcgtggcgatctcctcgcccaaataatgaacacttgccgcctggcgcaaacgatggttagtaatgggctcgtaacgtgcaggacttggcccattcccatccctaattaccgacaaggatccgaggctctgggatcgtggttgcaacttgttgaaccgtccttgtcgcgatcgcgtcatcggcgtcgccggttgtggtgtactcttgcgcttaaagtggcgaccccttccacgcaagagggtcaataccccaccgcgtcgcatcagctcgttcattatgcccagacctggtgaactggtggagttggatctctgctaatgggttaagtttcggttgtgtgtttatggatttatatggcatgggtaagagggcagcatccagagagaaagaaatggtattgtatcacatacgattagttcgaccatgaccacctacttcttaaagattagccaaaacctaagtggattaacgtgaaaactaaagacccacctgctgttcgttgttatagccattctcgatgaagttctgctccagggtgaggtcatcgtcgcaaccggagggcagctcctcgcatcccacctcgttcagggcgcacttgatcatgtccaccagcttctgtttctgcttctcctggcagcgcagtgcattaaggtccttcgactggcggctacaaaaacagagattacaaaatatatagttatatatgtatattatttcgcttaccataggctatccttgttggactgaatgccgttggatgtgttgctgccgttggatataatgctgccattggccaccggcgagccaccattcacatgctcgatcatcttcatctgcttctcctggcaatccctgacggctccctccagttcctggagacgattacgcagccagtccaccgtgaggttgtccactgtcaatgtgctcgactgcaatttgccgggaatatcctggatgagcgtctcatcgaactggaagagcagcggtgttgtgggagaggttctggaaatataactaatcaattagattgcatatcaactaaataccaaagaggggaatctcacttgtatttctcggtgaactcgccgtactcctcggtcggattgatgctccctatcacagtgtcaatgcgcttctggatctccttgtacttgtcggccgtgaggtcgccatactgggccgcctcctgcaggatgttgcgccacagcaggatgaagctctcctgaacggactgctgatgctccagcagtcccggcagcaagacgttgcgaaagtccttctccacttcgatggcttccgtgatggacagcacgtactcgttgtgtgtgagatgcaatttgcggcaggccttctgatacttgtcacgcacatcgtccagcttgcggccactgcgactgggtgctaaaatttcaatttcaatcatatcataccaactcagaaactcagttcattgtgccatattcggttggattgccacttggcaacccgatatacccttcatttctcactcaccctttatgtagttctcctcgaagcgcgtgcgcagcgccttgtagccctccaaatgtttttggtattcagatttcttgcgcaccacctcgtcggtgagctggaatgacaagaggaagcggattggggtttagccgggcgtttcactgcggtcagtgggcacacgtgtgcctctgtcatggcggcactttcccaaataaaaagaaaaaaatggggaaaaaacctggacctgtgcccattacatcatgattatcgccggcgtcactacgtgtttgcttttggtcgcgcaaagtgctctacatgcgagtaatcgcataatggaacccacttggttgccccaactcgatgaatccaccgacacctatctgctccattgagtatctctcacactttcttcgcaaaacattttctcacgtttgtccattatgcaaggtacacgtcccaccgcaaagccaacaaaaaacactaaacaatataagagatagaaaaaaaaacaagcgcggcggctccacaaatgactgataagtgactaggcaaaaggattgcattatgcagctgagccaacattcaacatccacatctacatcccagcatccgttagcagtgtcaacaaaatcaacagcgactttgttgccgaggactgtgactgcagcggaattgcaagtcgggcctggagctgaatctataagccagagccaaagccaaacttaaagccaaagccacaactaatggcagcaaagtgcagttagtcaagcagctgcaaagttgctgagttaaggttgcatggacataatgcagctgatgcagggcacagtggggctaaagatgctctgaagctatgcgtaatatttctaacttattaacattacctatgatcatttttatcatcactcagctataactatttgcttcataaaccactttgtccaaattataaactagtttggatttaaaaacggaaagtaaaatgagaaccttaagacgcgaatgcaaaatagtaacaataaatataaatttataaactgaaacactaaactcatcgaatttgaataactcgtcaatgctatcaaaaaatcgattataaatttctttctataataaatcattcaatattaatgaaaaagacacaatagaaaatgttaattcttttaataaataatgtcgttttgaaagcaatattatgttgttaaagttacgataattttgaacttgtgtttaacattttatattaataatttattaatacccaaaaattttggcataattcacccatggtcatcagttcagcctgcaacttgagttgcgtttttgttgatgttgctgttgtgcagttgactgtgcatattaattgcagacagttttgaacttttgcaccgaacgcggaagacagcagaatagatgtattaactaattgaatgatcaggcttcggaattctcgaataaaaatcgctagaaaatggcaagctagcgaaaaacaattcgatggcacgcatatctatataaattgctgacccagttttgccgatttggcattgaaagtgctgtcgagagtgttttgcgagagttatcttgaaattggctgcaatctagacaactatgttggtattgggctgttgggctgttgggctacgtaataaccaattctgtaaggttctggttgtgcttatatggctccgtatctctatttgttctttttttcggcaagtggctaagcaactttcaatgcctttgcagctgctaatttgcctaaaaagttgtttagaaagagagagcgacagaggggcaggccaggcacaagtagaagaaataaacatggctcgaaagtgggtcatgcgcgccgtatttcttacctctcagcggctaaacagtcaatagcattttggtaaccataagcccctttccacctacccaccacttggacctcgcctcacacattgtttacaaatgattgccaatttttttcgttcagtatttctgttttttttgttttgctttttttttttttttgcttcttggccaccagaacagcgtatccaaacgaatccgaggaaagttgctaatctgccacctgcactcagccagcgaaactttctcgattttctcacgcaattttccccggcggatttgattggatgctaacatctttaaacttcggcgacaacgcacagtttaaaaattcgaaattctaaataccgaatctatatgtaaatgcggtgatgacctaatggaatctgtgacaagtggtgccagctgccacgttttgcattaatcagcttgattctttctgtttggcattttactcgattcgattttctgcttctgtttcggatactgattctgtatactttggcaaacgcttattgccgcacatgaaattaagcgaaaaattctgtattattaatttttagattgcgacaaattaagctgcaagctgtctatgattcaagactgatcataatgcgtccatcttaataagaatttgttttttggtgacatatttaatgatgactgtgacagcttttaaaatctgtccgctataatttcattgttgatacgtcattgtttatttttataatcgcctttttgtttttacgacttcgctaggaattttgcacatttttgccaaagcaaaatgtgtacgtttcagtttagaacactaatcaaaacgtattgtttagcaggggcattcaagagaatttggttataaattctgtacatatgaatataaaatggattatatattaaaaaaaattgccaatgtgaaacatttgatagaattttcaatatttgttcataattccattttaatacaggtatatttaaattttttcagtgcctaccatacacatacgaacaataacgataaaagagcacaactcaatcaagcgaaattcaattcatgtctacacttccaaagaaattgcctctaatcaaaataaatttgtcaaatgtattgcggaatcgtgatgcaataaaaagaaaccgactcgagaaaaccgagagaggggcaacgaaaatgagaaacaagtcaaaagctaaaccctagacggaattgcatttatgttttcttttcttttttttttttgttagcgcgtgagagtttttcttggctggaatatttgaatatgaaacggcttggcagcagctgtgacaataaaaacgatagcaaatgccacacacgcctgggatttccctttgttgtggtcgaaatggtggggcggttcggggaaatcaatgcaaccgatggtccgggagtttttcaataagtgagcagccacaagatgttgcataagtgcagacagctttgacaataataatgatgttttatgaaacattcgagatcgtttataacgctggcgctcagcagccagcagcaattgcgaattatgcaaatttatgaccgttggtcaatacatgagagtctgagtgcccagtttcctccgcggaccagggacttcgagtaatttcccatggagtcgcccagacttgtcgtggaagtggacttcgtggttcgtgccagtgcttttgcctttttgccaacctggtcaatgaaccccctctcaactggccataacaatggacacgctaatactaacgaccaacccgttttgatggcttcaactgtaatcgctccatgcggccgttttggcttctgttgaatttactatttaaacaatacgcaaatcagtcgcataattgccacgcaatagcttcactttcgttggccaattcgtgaataatatttgccaagcttttttttttttattgctgcctgcccgttcgtcttttctttaaattttgcacaaatttgcatgcgtgccaagtgaaagaagcatgacgaaatggtccgaatttaaattggatctgtaaatgatgtcgacgattttgcctttgccagcactttctatttcagtcgagtgtcgttgagcagacaaaagaatagaatggcaaaatcgatgatcgcagtgaaagtgtcttcgaatcggccaattgccgcgagcgagttcgtcgcttaagtctttcgttttcgtggcctggaagtgccaccttcattggccaaatgcgagccgaaccgggaggtcttaatcgccgccggagaggctgcagaacgacttttcaatattcaaagccacctacgtgtcgcttgcaacttgttttgcatacacacacacacgcacacgactcccaatgcgaaatcctgcggcagcgttcgttactcggtcggaacaagcataaattttaagatcaaagcagatctcataaacaaaaacatggcaataactcggggtaaagcgctgttataaagcagggtgttctttgaatatggggtaaattaatgtgtgcctttgtcttaaatcaaaagatttaaatattaagaactaataatatatataatactttataattttaattacttttcaaagcaagcctgggaaattacaattttttatttaatatctaagactagttccctagatattccaccagatggatcctacccacttccagctttcaatacaaatttacgagcttctctggatttggccaaaacgaaaccaaagcctgaacttgatccacagcaggccagctgcgcttttgatgtcaaggaagcagactgcgttcacacggctctccttcgggccaagttattacgtctcatattgggcagctagatagagttggccgggaagtggtgaatggctgaatggccgtgcccgactggcttttgttaatttatttttactgctgccccaaacatgatgaagtacttgcaacgcagccgctgcactgcagcaacgccgaccaagaaattaagttgcagttgcagcgctgcccggagccaagtggcaggtacaaaagccccgacgacttcgtcttcgatccataaagtacatatttctctcggccggcgagcaggcgcagctaacgaggcgaagtccccatctcccccatcttctcattcccctaactcctctacccatcaccccaaccaaagtccagattcgggcccaatacgtttttagccctcgggttgggtactttattgttttctctgcttcgtctcgtctcgtctcgactctacctctacctcaactcgaatcgcagcgcctgtaactctcttttgcccctgtgatggtgtgcatgttgcagacttgtttcataactggtccacgattctcggaattaaaggaacaaaggctggggctgattttgattttgaccgacaaacgttgtctgcgcttgtttgctgttgactctaccccctttcccggtccccgtttcagggactacactggtaaaaataaggtaatttgtaatttaaagaaagtacaaattattaaaatttcatagttaacttcttaagttatctacacgtatgttacagaggtggatactattttctttaatttgattttaattaagacgtatttaaggactgtttaaggatttatcttatgcttaaagtaatttttaacccaagttctacaaaatttctagcagtgtccagctgccgctgctggctgtttgttcagcccgttctcgaaatcttctcggcctgcatctgagggcagagggtacttgaaattgactgaaaagatacgaatgtgccgcacatgcgcgtagattataatgagataaaggcacagccagtcggccaggcaaaaagacaaaaaaaaaaagagaaaaaaacccaaaaagggtttgcagacagttcgttgcctgttggcgtgttagaaaacctttttaacgcgcttcgttcgagtcggcaacttaatttttattgcgcctggctaggccgcatctccaattagaactcgtgcaatatgagacgaacggaaggctttagatggattcgacttaagccacggatttatgggctacacgggacccaaaacataacagttgattttatgtgttaacacttgaacgatcctcgaatccgttcttacttctcccactaaacgtagtaagctaattagtattcaataagcgtaactgctgagctggtatcattagccaaattggtcgagaccaaactgggatatggccattatatctcaatctatatatacagatatatacttatgtatgtatgtgtatgtggaagagttcaaacaaaataagcgctaccttcgcggtggttttttctttatttgccagggatcaacattcccctcgtaaaattcgcggaaagagatcggcaaaagcgagtcggggaaaacttgggcaaaataaaattcacacacaagataaaaatcgcagcaactacgtgagcttgacgtcgccatttgctgatgtttctagtatttattgtcatacatagtctgtcacttcttttaattgtttatgaccttgttggagctgttgttccctctcgccttatttttcggccagcttattttctttattgtttttataagtttctttttgtttttatttggcatttctcgtaccaagcggagcgagggcgatcaactttgggtcgatcttgtgattgcggcgagcgcaaattaaaatttattcttttgaataaactaaacggaacgagaacctttttgaggcaagtgcgcattaaccggtttatcgtttataagtatatacaaatgcataccaatatcccaaatatacatatgctacaaatatatatctgcttaacgtcatcaagctttcatacatattgctccacttctcgcagtaattacctgataatcaaagcctcattacgtaaattgccaattaggagccgctcagacgaaagctctacattgatacactgatttgtctttgcctttgcaattggcttcgtttagatggcaattacgagattgttattgggatcgcgaacaggcaaaagtatggttaacaacattaattaaatggggaagtgaaaaaatcaaatgtgtaacttggccaaaggcatcaaagaaatattagtttgccttcaatttcaaatgtacaatgatcttgttctgttttcaattaacttataaacataacaatccataatttctttatgtgcaaatgatggttttctgtgggtgtgtacccatttagcgagcaattttctccatattagtgttaatgcaatgccaaaatgcactgcgaatcataatcatttaccggatcagagtcgacttggcggctttccagcgcaaattagacaaagtcgactttcacgctcgaaagttttgcgcttaagaatttctctttggcaataattgactccaaatctgctcaattaagtatttgcgactgcgaaacgcgacgcgagatgcaagtcgagaaccagaaataaacacacaccggactttttttgtttttgattttctcgcaagttgttcgccgcctttttttaccattattttctttagtttattttttttttgtatatttgtgagactactactacccggttgtatggttttcaggttttctgctccactttctgctcgtcccgacacgctgacgctggtgacacggatgcggatgtggcgcatggtaaatccgcaaaccaaacaagttcagctgacaatcaacatcactttgcaagtgaacagaagaataaaagaaaaaaaaaaattgaaccgaactgaactgaactgaactggcgcatggaaaacccaggccgctccgcttccagagcagaaaaaaaaatcccatcccaattttctggtgaccttaccaaaaaaaaaaaattagcaggcgataccactgttattattgcttcagtttttggcacgtttccctgcttcagtggtggccaagcgtttgttggccattgacacagcccgcttttttgtctcttttgggccataaataatcgctcgttgtgtgtggccccttcggtttctagtggcactttgtcactattttgtatctttcggttcaaacactcgccttgaccaattttggggaggagggtggtctctgaaaaagagtacgtttaagtaccgcgcacagagttcaatgtcacattggcccccaccctttttcattttgtcgtacaccattaagtctaatttaattaccaaaataatcgccagacaaacaattgaggaggtgcggcccaaaagagcaaaagataaaagtgttttaatggcgaattgggcaattttgagggtttctcaagaatgtggcagatactttttgtgttgcttttacaataactgaatatcgttaaaatatatagagtataaaattaattatatctcatttactttctaggtgctaaatatatacaatgcacaaaatgtgtaaacaattaaatttttttctaactagttccaattatttggctttctttctttttcccatagaagtaagtttccgttccacttattttgagcatttaagttgactcatttctcgagtttcatcataacttggcctcacgtaactttcgcactttcaatttgtgaattagcacattcatcaattaacacattgtaatgtatgctccaatgaccccaattgcatttaaatttgtttttttttttggccaaacggatgggttcataatgcatttcagcttgtcttgctctctttcattcatttcactgcattttaagttacgttcgtggggtttccagccctttagcatcgaccagtctatagcaaaaaaaacccgaccttttcctctttcgatggcgtgaacacttggctggttgttcaagtacattttaatgagcacaaacaaaacgattttgttgtccttttattttttgtatttaccccggtcaagctggctttcaaggtgaatttttcgaaagggaatcaatcgattgatttgccagggtctcagcacatgacctatgcccacacttttgcggcttccagcggcggctgatgaaagtgccccacccgaaatgggtgggttaagctgtggataccaccttgcattttatttttcgggtatgccattttgagtcatggctgcactgcgccatttttatttttagtaggcaggcagctataaaatcttgtagcgttttcattatattcgtttgcctgttcaaactattcaaacacaatcgctggcgtattaaattttctagctgcagctgtcgcatttcccattgcacttaagcgaaaatatcatttttggcggcacacgcggcgtctacgtaatttcctatatttaatggcaaacaatattatttatttagctggcaacatttaacgtgcaacataaattagccccaactgagaacataaatttcacttttgcgcgaagtgaaaacaagaaaattttccgtctgacagaaagttaaaagaaaagtcaggagagcagaaaggcattcaatattaagaagacaaagcttattaaatataaacatagacatgatttaatatgtgaataaactttctacttactaagtagttaaaaagttttaatgtgagatatcaattttgcaactactttaatcaaccaagaagaaacaataatcattagttatctattaatttcgcataaaatactttacgtcgctttcttgctatttatcacctattcacaacaatcccctgtggggggtggggaggggttttggaaaaccatttcaattagccatattaacgattgtttactgtatctgccgaacagcggtattttttcgagcttgcaaagtttttattttcaatttggcgccattccaaattagcaaaaccgaattaacgcagacacagtcaacatttcccatcccccttagcaccaccaccccattccatcaccagcttttatctctcgctaaatttcaattttccactattttctcaacattcttatttcggcgtggccaacgctgcgtatgagcaatgtgcaaggcggggagtgtagcgccaacggcaaacgtcaacaacaacagcatcaactacaagccgacagcatctttggcatcgtaaaactgcaaaaaatattaccaagggactggaaattagcaaaagggggaggattatttgagcccggttttggggaggatccaaccaaaggaacgtgaaaaaaatctgaatgcgtttcccaggaaaatgccgacgacgacgtttcatttgggggcgtgtcgcgactgaagttttgttgattgcgccgcaagagcgctccgcaaaattgcttttgcccaacagtttgacagaaaattacgaacaataatgcgttctgttaatggcggcggcgttgccattattagaacgaaggactcacagccagacatcgcagacaagcccattcccatttcaagcataactttagccatttggggaatagagtttttgcggcataaaaaggccaacattacggtcgcgccaatttaattgttagattttcgggtgccaagcagcagcattgggcattacatttgattaaagtcgccgacatggctctgatttatggccaccattagtttaatcagaatcggttcggtaacttgaatctccaccgtgtggctaccaatgcatccaccacatacgtacacatatccatccataaatgtatatctaccctttctgtgcatccaagcaaatgtggccaaaagtcgacatggccctctgtctgtgtctatgtctggggtctagtctgctctggtctggcctaaccaatgccaacgagttaagggccaggctgttgccatggctaacatggacacggatggccacatgacatgggcgtaattcgttggcacttggctgcgcttttcgggggctgaaggcaaattgtccgcagacagcggcagtgggaggatgtaacaactggccaggatacactagtcgggcaactattaaaaatccattaaaaatacaagcacagccttaaatttaagataatggatggtgttttcattgaattatacaagaacatttgcaattgtattaatttgcttattaggcgacgtatccttcgagcaacattgaatatagaaatattggtattatactggtgagcagaggatttaaaattcagacaaaaagtagaggcgaatccaaacaagcctgcataataatttccgtatcccgtcaacgcagacataatgcaaatttccattttttccactcaaacccgctccatcttgcccactgtagccctgttgacatttgccggttttattagaatttcagccagaaggacgcaggacactgcgtggtttcctcggtgacttttatgctttgtaggcgtccggaacggaactcatcccggccaaagtcctgtccgcctgccattcacttggcccgtcaaccctgatacttgacattgcacaatgtggaagcgtccatcctgctgtcactcaaatccaatccccaagcccaaactcaaaccagtgacccttgttgcattgcacaactccaactctgttcccaatttatttatttggccatttttgcggttgtccaacgggcttaactcaatttgccaccacaacggactttccgaaattaaaaagggcacgtgcagggttttgaatgaggggcaaaaaaggtatgatatgagtatattcatttctttagaaaattagcggcaatgaaatagctataatttgtcgtcatttagcacacaagatatatttttttgtttataaataaacatgttgctgttttcttaatgtttttcttccatagcgtttcgcttatatgtatgagagtaagtaaacaatttggctgctggttctgctgatatttaatgatcaaatgaaggcgtgggcgattgaaccagacccaggggcgatcctctgcctaggaaatgtatggtgatggataaaaaaaaaaaaatagaagaaaagaccgaaatgataccgcaccttatatccatcccattgacgaggaactacaaaagccgcgaatccagcaggctggcagaatcaacaaacataattgatgagattttcgacagcaacaatgcgaattaaaagaggaatatgaattaaggcgaaatccaataacgaggcatataaatcagaaaatgaaaaacgagaaagcgagcaagagtattttaattcgaatttacatataatgcccagatgaaaacgcactaatggcagctaagaactatatacataaaaaaaaatatctttgtttatttggtggaaaatttatgcgtgtcttggaaactgaaggttataacctttgcggaaatatttccgctgctacatttagattcatttgcaatacgttaaccgataacgagttttctttttggcagacaaagactcttcagacagatttctccagccgaatgcccgattgcattaggcgagggaattgctttgccacgtggaaaatgtcactgtttggcggaagtaatcatcatcagggccgtcgagacgttgagtttggcaaacacgctctcagcagacactcaagaaaaatggggaaaaatatgtgtttttccataaaaattatatctatacaatagttatatcttgtacgcgtttccttactttgaaagtgtattgagatctggtaagatggttttaagttaaattgactttctttcagtgcacccatacgtgcattgcatttatgtcgcccagacaatgtcgatgcagctggatgtgtggttaatagttccgccatccgcagacgctggtccaaaacgaaagttaagttgcaacttggagcggagcggcagatgagtcagcggactgcagccggaactggccgtgggcaactcaaagtggcgccacagacattcgtggccattatgtggcaattatgctagcaacccccaaacatgattgttggcccaaatgtatcggctgggagttgcaagttggagtttagatgttggaggttagagaaaccaaccccaggcgttggacgccagtcgcacgccatgacgtcgtccgacgaccgcaagttagctttttaacaacaccatggagttacgacctcctccgtgccaccctccgcatagaaaaaataacaaatcgttatccaatgcgccctccccccccttgcggcgaatgaaaaacaaactctgtcccatgtttgttgtcaacaaatatcaggtctaatttttatgctgcgtgcacttcggtcgaatttaggagttcgcagctgcaaaactttacgatatcactgggcttacaggccggacaacttatggcagtgactagcgaataaacagatacaaaagtatctacaagttgtccctgtcaagagacaacggcatgtgtgcctgcaatttgtgcagcttttgtcgcaatgtcaagaaacttttgtggcacccccccttttttttgttgccccgaaaaacaaacccccacgcagatggcaagcatttaagttgttttggcattttatgtgcatagcatttcggggttcaagacacattcagaatttatgccccaaaatggttgtatacgaaacgcatttgcgaccctgtacttggctcagatttgggactccatttatcatttagaaactatgccgtttacccggggctgccacatgatagtccaaccgtatctcttggtttcagttgttcgcgattatctaaagttgggagctttagttttgcatcgaaatcagagtgagtcaaattagaacctttttgaacctttttcttgtggtgtacgtgcgtgtggccattatgcattgtggggacgggggaaaaactttgtagacacttgagaagtccagaactccgggcacaggtcaatgcagctcaattaaaaggcatgtccgaaggcttttgtgcttggagccaattgagtggagtgaaaggacgtcggtttggggtgaaatggcgaggcatttcccagttctgagggttggttgaaaaacataattctggcgccgtttctcaaataacattaccgtgccccccgttcaacaagtttaatggggggaacttcattcaatcaagcgctggctttggcgtgccattcgttaagtatcttcaagtgctacaaactgaacgggagccatgtgcattttctagatacatttgatgtggccactgcactcgcttgtttgtgttcctccagttcagttcaacttggcccaccccgcgcagtacgcccacttcaaagtcatatcttatcggcttatctggaatgccagagacgaaaacacagacgaccgattgttgttgtctcgcttgacgtcgtcgttctgtttgattgccataaagatacttgaattgaacttattgtaattaatacgagtacgattcgctgcagtattttcaatgccagcctaaggaaatgtatacccgctgctaaagaacaagtctggccattttagcatgccttctgcggtttatcaatacaatagaattgaggggaaactcaaggaggggagggggcatatatatgtagatatacgtgaagccccagaaaagctgtcatgtgtgcggaaaagcgctggaaaacccacccggaagttcagacctaatgcgtttttgcggggcgtgtgcagtagttttgacaggcaagcagatacaaagatacattaaaaccaattccatatccattagctgcaagttgcgggcaggcgcccttaagtgttttcaattaataaccaaactcgcagctagccaacatgcttccctaaatattttgatgacagcctggtctaagtgattgagtttggccattaaacgacagcaaattgaacatcgggtttagtgtgccgacaaactacattccttgatcaattaagtaatataaagttgaaataatattcctggaattcgcaatctaaattccagcaattagcacttgattgtctgatagtttgcattactatctttaagtgttttaatgtgaagtgttgtaataaaaatagcaaatagttttaagttccttatcttatgagtaagtacttttttttggcaagttaacatagcaattgtaaaatagataaaaagatagtttcctatgtttatggctcaacatctgcttagatcattaaaaacgatataatgtgtaaagcaatgaaataaatatttaaaaagtatttttacagagcacttaactaaattattttacctctttctcagctattgactagttaattgggtgagcaataatcattgctcatgaagtatgctaaataaataatgccgcagtctataagctcatcgtctaattcaatttcactcaatcttaaacaactacattgtttgtctgcttccaataataataatctaatgccaatccatcaacaccacactgcaattccatccatcaacaccatatagaaccgattccgccatcgatgccgtccaactggacagaacaacagaccaacagaccaactggtcaactggctggagtggtcgacccatttctagacacttattaaatcaacaacagcacagcaacaattcctcgatgagttcttgtctacaagtcaggttcctactgctcttattgctgccgttcggttcaatccattgcgcaaatattacaaagtcaaagtccaatgaagaaaataaaaaccaatgacgatgggagacgaagcgaagaaacccagagaatccggagaagagaatcgtttttcaagactcactggagtcggagctctcatcttccaactcggggtcttttacccagaatttttgctttgcctttttcttttttttttttttgctactgtctgcatgccttgtaatttttattgctatttcgctaaattgttgtcaattgacttgagattggcgcaagtttggagcatgtttagttgccagttttttggacgctcttcgtttttttgcagttgccaaagtttgctgtttgattacaaatcattgagtatgaagataaagccaaaggagtaaataaatctagccttttgaactttatcctaatgaaatcttcgtccattttgtacttttcaatgcataaaagttgcgttttgttgagttgatttttcgcgatgctcaataaacaagtacaaacaatagacattgttaaatgatatgaagaaatcatcgacgattcgctgaaattttgattggcattctcggcgtccattaaattttgttttgcaccagcgaaactgcggcgcaaaaagtcttgtttgccacaaaatagatggggggtatcttgatagataaataaataataataaagtaagctagctagctagcgagcgatgcaatggcaaacgagacttttgtttagacttgacaaaggccgcaggaagatataaaacagtagcctcgcggcagcggaatgttctatgccaaaatcacgaaacaaaacaattttttttttttttttgtgtcatcgccatcgacattttggtagtggccacatcgatctgtccactggcaacatgtcgcatgtggccaaaaaagcatttttcataggacaccttttttcaaaacaaactggactgaacactgaagttccgccgcgctcttttgtgtctatttaaaatgctaatttgctgtcagcacccgtaaatattcgcaatttgttgacccttcttcatgctcgtgttgttggatgggctttttatatttttatctttttatcattttatttttgtttttgtttttttgctgttctaatatttttgctgttgttcggtgggttaataaacttgttgccgcacgacacggctcataaataaacacttctattgatttagtacgccgactgggctcacaaagccaatagcaatcattggagttctccttccactcatattttggtgagtgtttacaagactcttaagctgcttaaatgtgccccaagtcgtttcttcttttccgcagaaatgcttaatatttattttgattatacaaatacttaatatactatatgggaacatcgaacaatggagcagtccaacaaaagacggctgtgggcggagcttgggtcttgtggggccccaagctccaaatgattattattattttggtcgagttgactcctcaatggcaatcataaataaatgaatgcgtacaccaaaagaaaagatacatttaagtggaggctttaagcaggacgatcgaaatagaaagacaagaatctaccttctaactaaccccacatttgttctcagtgcaccgttttttttttttcgataattcatatgctgtctgaactgggcgcgtcgggtgttctaatgtctaatgggtattcaaggtgttgaccgagacactcacatgattcaggcgtgctgcgatcttggcatgctcctcctggtaggcctttctggccttccgtttgtcctgcgagaggtgggtcaacttatcgcagacgacctccagctgctccgcgttgaacttgaactgtttggcctggtggtccagttcatccatgtaggatcgccaggatttggagatcaggctgcctgcaaagggatagaaggctaacacgcattagtaacactcatgtgattacatgacattttttatataaactgaacttatggttttaggatagtaatctgcagtatatgatgataatgatgatattttcccaaccacatttacgtgataactgcctgttacatttgctattatgaaaattgtcataagacggtctctatcttcattagacacagtcttaaaacccgtaaaccgcaactaatccacagtttacccagacatatgactcatttggagtttatccgctgaacagttgggtaaaagtgcaatgaatcatttttcttaagccagcgttatgcaaaagtgacgcaaataccttgcacagatttttggaaaattatttgctgagcaaatcggaaacataatacccacgtctgttcctctggtttttttgtttttcgtttttggttaaaatgtttgcgcttcgctaggctgcaaagtctgaagtttagacagtaaactgcactcaaatcgagcgatttaagttcatggtcaaggtgagaagcgaagcagataaacagtcggagaagtacatatatatgtatattgtatatatagttgggctatatcaaatggcccgaactaaatcattcggctacgcttttgtgcactggttggtgtgcgtgtacattcgcatcatccagcggatacgtttgtttggccatgtaaacagcagggaaaacatttcccaagcgaaaagcactgacatcgcctgcaaattatagcaattttcatgtgtttatcttctaggggagcagaagcagctagaagcaaaagacagctgcactttgtcgacactttgatgagctccgcagaacggcaaagcagcgagtgtgcaggccaatttagtccagagtcctggctgcccggctgcatccggatgaaatgactatgccacccagagcacggtagttgaaagcgatttgcttgtctggcgattatctcgagtcgtttgaaatatgtagagcccaacgcgtctcatttacttggaaatgcgatcaagtcacgcgagatagccagtggccagtttctcaaacccagcaggctgccaaaaatcacaccaaatggagtgcaggaagggcagtacagtatttcactctcccaacccttagaacaagatatgctttcatgccatcccatctcatataggggccattaacaataacatccaccagcttatcgacacttgccatataactgccgcacttttaccctgactaatggatgatactggccagtggccacccagtgaatgttgtgagtaatgcccaagaggtcaatggggttcgagcatctcatcgtgaaactcggtccatttagctataaattgttgtctttactatgttgaacatatgttttgtataaactccaccacccaaattcaatttaaacttaacttatctttaacatatgaatgcaagcatataatactgcactaattgttaaggtctttgggccggattaaataaactaaaattacgttttaatttatactctttaataaccgattctgcaaactcatagatagcgaactaaataaatagtaacacgaggacaacgtacttcacgtactggtggtatcactgaccaaataattggctatacaatcttatcgcacctgtagtcttaccttgcatttcgtcagcccgatcgatcttgagaccctgctgggccacagcggtcaggctgatggcgtactccttgtcgcacttggccttcatctggatggatcgcttcattgtctccattagccggagttcggcatcctggcggacgatcagcgcctcgtgggcggcgcgactttggagggctgatgagaagcccatgatgctctcgttactccctatttgggtcgcggctctctgtgagatatgcacatatgtaacataacatataatggatattatatataggcaagtgattcagaacagaacagaacagaacagcggtttttatcgtgggttatgttttcgttttttgatattgttctggggagagcggaatgctggaaattctacatgaaacacaggaaaaaacacagcgaacatgtggcaaacacttgttgcatgacaatttggttattcgctggcgttgcttctttatcgcctcactaaaaattaattatttatgtcacacgagcacttttgtttttctttttacaaaaaataaactttcacatgcgttgacatttctttggtgtttttttttttggcactttttacttttgcatatgtcacgacatttgctaattacacacgatctcgtcccggcgtttgattaacgacttaattcgagtcactggcatatgcatttttatccgctaattaacgcattttccgctctcacccataaccgacacttccacatgaatgtatatatttattttgtagtgcttttggttttttttttggtattttgaatgcaacagttgtcttcacttgaacttttccccaagtattttccaaaagcaaagcgagccaagagttgcgtcgcagttgctgctgctgctgtggttgttgttttggtttcaaagagaaaaacttgtttttcccgcttgctgggcgagcaaacaaaaataaacattgccccaaggaagaggaatgaggtagggggaggggtaggagccatggggcaggggcgaagtcaataaggaaacacaagcgacagaaggtgtgtgcggcaagaacgtgtatcttaaagatacacaaggaaaaatagcagttcgatatctaatcgtatcagttgtcacttgtaaatattgtcacagaattgaaattgcgtgttgaatttcgtatatttactcattaatttataaacattgatttatacgatcgatcacatgctattttttcgctgtgcatttgctggatgcgccagaacagcaacttgatgcattgtctgtatgtgcgtgtgcagtttgccaagtcgagtaaaagatataaacgggttagacagccagcagctaggggagcatccccagccaccagaaccagaacaacaacaacaacagtaacaacagtagcagcggcagcaataagaagatgcttaaccgttatataaattaaaaatgtaaataacaatgtttacaagcgatctacacttcttgctattttaggggaaccacatttaccgcagaatttctttgccgtcggatttcacttgcaaatcgcgtaactagagcacagttcttggcacaaacataattgaataaggctggttatcgttttgaaggctttatcagaacttattttggcacttcgagatgcgtgcacttcacatggccacagaactcaaaaatcgcgaatggagctcagcgccgagtatctcgaattggtttggctcggattggatcgaatcgagtccggaaatcggggaatattgaaagcaggcccaaacacagcgaaccgttcgcctcgaatgttcagcggaaactgagcgccggcactgaaaacactcgagatactcgaaacactcgggccgatgcggcgaatgagcaatgcgagtgcggcgaaagaaacagagagagagagagcacagtgagaaaaaccggttgcagaacacccagcaaacattttcaaacaataaaagtcaccataaggcagaagaggcttaatagtgggtttcaccaacgggattagttatgtttgcttacttttgcgttctgtcgttcccattatttatggtataagtatatatttcatataagaaaattctcctttaaggctgatatttgtgtttctttttttttagaaaagaagatccacgaacatccaaaagaacatttaaacttatttgtatcaaaactatagtacagtactgatttttaggtgttcctatgaaatgtttcataactataactttttgatgtcttagaatcttaattaggaacacttcgctatcttaaatatcaataatttttgtcttataattacaacctttctataaaattgcaatcatttcaagcaaaaaaggtcactttttctatactccttcctgtacatttttccccaacccagcccataattgttcgttggcagatagcaatgactgctgtaatcggagaattaccaaatttccgcactattaattacgcaggttcggctctttcgtgggacagctgacaggatctaaggacgaacacccaaccagtcaaacacccacccactgtgagtcgctgtggaaacggaagcagctgagctgtaaccaaaacaaaagctatgataaatgttatgcgtggatctaccctttgttcgtcctgggccaatcacccccgcaattggaagccatcggtatctccatttaatttacacccccttgctttcgtcgaacgtcagtttcagggataaatgcgaaaatgcatttgcgcatcaaaagcaggcgggccaataaattcattaataaatgggaaa

SEQ ID NO: 18926 - DNA, 3369 bp, DROSOPHILA
aacggttcgctgtgtttgggcctgctttcaatattccccgatttccggactcgattcgatccaatccgagccaaaccaattcgagatactcggcgctgagctccattcgcgatttttgagttctgtggccatgtgaagtgcacgcatctcgaagtgccaaaataagttctgataaagccttcaaaacgataaccagccttattcaattatgtttgtgccaagaactgtgctctagttacgcgatttgcaagtgaaatccgacggcaaagaaattctgcgagagccgcgacccaaatagggagtaacgagagcatcatgggcttctcatcagccctccaaagtcgcgccgcccacgaggcgctgatcgtccgccaggatgccgaactccggctaatggagacaatgaagcgatccatccagatgaaggccaagtgcgacaaggagtacgccatcagcctgaccgctgtggcccagcagggtctcaagatcgatcgggctgacgaaatgcaaggcagcctgatctccaaatcctggcgatcctacatggatgaactggaccaccaggccaaacagttcaagttcaacgcggagcagctggaggtcgtctgcgataagttgacccacctctcgcaggacaaacggaaggccagaaaggcctaccaggaggagcatgccaagatcgcagcacgcctgaatcatctcaccgacgaggtggtgcgcaagaaatctgaataccaaaaacatttggagggctacaaggcgctgcgcacgcgcttcgaggagaactacataaaggcacccagtcgcagtggccgcaagctggacgatgtgcgtgacaagtatcagaaggcctgccgcaaattgcatctcacacacaacgagtacgtgctgtccatcacggaagccatcgaagtggagaaggactttcgcaacgtcttgctgccgggactgctggagcatcagcagtccgttcaggagagcttcatcctgctgtggcgcaacatcctgcaggaggcggcccagtatggcgacctcacggccgacaagtacaaggagatccagaagcgcattgacactgtgatagggagcatcaatccgaccgaggagtacggcgagttcaccgagaaatacaaaacctctcccacaacaccgctgctcttccagttcgatgagacgctcatccaggatattcccggcaaattgcagtcgagcacattgacagtggacaacctcacggtggactggctgcgtaatcgtctccaggaactggagggagccgtcagggattgccaggagaagcagatgaagatgatcgagcatgtgaatggtggctcgccggtggccaatggcagcattatatccaacggcagcaacacatccaacggcattcagtccaacaaggatagcctatgccgccagtcgaaggaccttaatgcactgcgctgccaggagaagcagaaacagaagctggtggacatgatcaagtgcgccctgaacgaggtgggatgcgaggagctgccctccggttgcgacgatgacctcaccctggagcagaacttcatcgagaatggctataacaacgaacagcagatatcgctctccacaaatcgtccgctttacgaggaggaatggttccatggcgttctgccgcgcgaggaagtggttcgattgctgaataacgatggtgacttcctggtccgcgaaacgattcgaaacgaggagagccagattgtgctcagtgtctgttggaatggccataagcacttcattgtccagaccaccggagagggtaatttccggttcgagggaccaccatttgccagcatccaggagctgatcatgcatcagtatcactcggaattgccagtgaccgtgaaatcgggagccatactccgacgacccgtttgccgggagcgctgggagctgagcaacgatgatgtggtacttctggagaggattggtcggggaaactttggggatgtctacaaggccaaactgaagtccaccaaactggatgtggctgtcaaaacctgtcgaatgaccctgcccgacgaacagaagcgtaaattcctacaggaagggcgcatcctcaagcaatacgatcatccaaatatcgtaaaattgattggcatttgtgtgcagaagcagcccatcatgattgtcatggaattggtgctcggtggttcgcttttaacttatttacgcaagaactccaatggcctcaccactcgccaacaaatgggcatgtgcagagatgcggcggcaggcatgcgatatctggagtccaaaaactgcattcatcgcgatctggcggcgcgtaattgtctcgttgacttggagcacagtgtgaagatctccgatttcggaatgtctcgcgaggaagaggaatatatagtttccgatggcatgaaacaaatacctgtgaagtggacagctcccgaggccttgaatttcggcaagtacacttcgttgtgcgatgtgtggtcctatggcatactgatgtgggagatcttctccaagggcgacacaccctactccggcatgaccaactccagagccagagagcgcatcgatacgggatatcgtatgccaacgccgaagagcacgcccgaggagatgtaccgactgatgctccagtgctgggcagccgacgccgaatcccgaccgcatttcgatgagatctacaatgtggtggatgcactgattctgcgcctggacaacagccactaagagcggctccatgcggaacacttagcgtatactcaacgtagatttagtcagcgcttttaaagtacgttacgtccgaggacttgacaacgagttgcctgtatttatgagatagcacatacctactatacattttaccatataaaccatatttatatagagacatatatattttctagccatgtaaatgtaaatttcgatgtgtactgtagtgtgtgtttgcctgactgagcgtatgttataaatccttaatgtgccaaaaaccgcaagagatcttaaaacaaaaaaaaaagtgaaacgaaaaaaagataagagaaaataaaataaaactgatattgtgtgtctgcttgaagaacggcgttcgtaacctaagctcatgaatttatatatttttagttgtttgtgttttagtttttaggcagtgattcataatttgtatattatgcaatccctacgtttgtcaatttgtttctagactttgtattctatgtatatttatttacacctaatttacatttctacttcgactacgattatgtttactctaatacaactaagctctaagttaaagctttaagttttgctgcgctgctgaagtgaataaatcatatgtgtactatatatatatatatacagaagaga

SEQ ID NO: 18927 - protein, 804 aa, DROSOPHILA
MGFSSALQSRAAHEALIVRQDAELRLMETMKRSIQMKAKCDKEYAISLTAVAQQGLKIDRADEMQGSLISKSWRSYMDELDHQAKQFKFNAEQLEVVCDKLTHLSQDKRKARKAYQEEHAKIAARLNHLTDEVVRKKSEYQKHLEGYKALRTRFEENYIKAPSRSGRKLDDVRDKYQKACRKLHLTHNEYVLSITEAIEVEKDFRNVLLPGLLEHQQSVQESFILLWRNILQEAAQYGDLTADKYKEIQKRIDTVIGSINPTEEYGEFTEKYKTSPTTPLLFQFDETLIQDIPGKLQSSTLTVDNLTVDWLRNRLQELEGAVRDCQEKQMKMIEHVNGGSPVANGSIISNGSNTSNGIQSNKDSLCRQSKDLNALRCQEKQKQKLVDMIKCALNEVGCEELPSGCDDDLTLEQNFIENGYNNEQQISLSTNRPLYEEEWFHGVLPREEVVRLLNNDGDFLVRETIRNEESQIVLSVCWNGHKHFIVQTTGEGNFRFEGPPFASIQELIMHQYHSELPVTVKSGAILRRPVCRERWELSNDDVVLLERIGRGNFGDVYKAKLKSTKLDVAVKTCRMTLPDEQKRKFLQEGRILKQYDHPNIVKLIGICVQKQPIMIVMELVLGGSLLTYLRKNSNGLTTRQQMGMCRDAAAGMRYLESKNCIHRDLAARNCLVDLEHSVKISDFGMSREEEEYIVSDGMKQIPVKWTAPEALNFGKYTSLCDVWSYGILMWEIFSKGDTPYSGMTNSRARERIDTGYRMPTPKSTPEEMYRLMLQCWAADAESRPHFDEIYNVVDALILRLDNSH

SEQ ID NO: 18928 - DNA, 3398 bp, DROSOPHILA
atatttttttgtagacttcactttgaatttcgaaaaaggtgacccaaacatgtatattttaccatagaacatctttaaatctgattttgaattatttgtaaaagcgtgtgtttcaataactggcgtcctaatagcacaactcaaaaatttactaataaattgtgagggacatattattcccattttttatttattttaaaacgccaaagaaataaaatagcaattcgcgtgcagaaaataaatttcgaataaatccagatctgacgggaaaactttacgacatcactaatctcgatgagctgacaaccctgtttgtgactcagagaaactgcaagtaaacaaagtgcaacttcaaattacagacgagataagatgtcgaagccatcaaaagcaggtccaccaagcgagggaagtgctcccgcttacgactatcgccattccggcgatgacatggccatggtaataagttaatttgattatcaaataccagtcgccatctaaagttttgcgacttctagcgagctcctccgccaacgtatgaagaaagccagcgaaacggcggcaccggtgctggtgcctatggctatccacaaggaggaggtgctccgcccagccagaatcagtattacggcatgatcagccaccagcaacagcagatgcccttcagcgggcagcccaactacggtatgacacatggcagtggcttcggacttgctggtcccagtacgtcggcaggagcagctgcagcacaggtcctccacttggactcacgggccgaggtgaggacaaattccaacggaaatgtcgtcattccgcctcctccgccgggctgcctgcccacaccggctcagtgggcggccatgcagggtcagcctgtggttctcaagcaaaaaaagcgttcctttttttaggttacacatggcacaccatttactcgaatataatcatgttgtacctctttccactcctttgatgttataaaaataaacgacgcgatccgtttcgtttcgtcctcgcgtatatttgaaagttccctaagcaaacgaacatgtcgccggtgaaatggttatgttaagtccaccggctctgatcctactaaatcactactggatacaaactactcgaagatgttctcaaagtatgtactatcgaatgtctggacacgcacgaaaccatcttctccgcccgaggcgtaactcttgccgtccggatggaaggccaaactgttgatgggtccgaaatggcccttgagtcgggcgaactcctcctcgtatatcaggtggaagaagcgcgagtcaaacttgccagccttcgtagacgtagtggtcacctccatggcatcttgaccgccgcccagcacgacatgatccatgattgggctgatggccgccgagtttactggacgctccgttttgtaggtcttgaggcacatcagggactccgaatcgaacaatttggcggtggtgtccttggaggcggtcacaaacatggtgccatccttgctcaactgcatgtcgttgatgccagcgctgtgatccgtgccagagtcaaccaccttttgacccttacggatgtcccagatggcaatgttgccattatcgtgacctggaaatacgggttttaaacggttttcataatagattatcgggtaaacaccaacctgtgatgatggtctcatccagaggaccccacaacatcgacgtaattttggactcggtcatcgggatgcggagtgtgggctcctgctccgacaacgaggaatcggcgttgcggacatcgatgaggaacagttcacagctctgtcccatcgctttgtccgttgagtaggctgcctggttgcccgagaagctgaagttgctggtgcgcaccgatgacttggtcggaatggaggcgataacggtgccgtactcgacgtcccagatcttagcggtcatatcaccggcgccggtgatgagcttacggctctcccagtccacatccaggcaccagaccgcaccctggtgaccatcgtaggtgcccaaacgttctccgttcagcgagtaccacacattgggcttctgatccttggagcaggagaagagcaggtcgccctcgcggttgtacttgatttgcgttatggaacgctcgtggccctgaagcatcaacggacgctataaaagacagaataatacgaatttttagcaacaatttaggccgcttttaaggttatgtttggtccggaatttcacacgactttcacactttgcaaatagttgtaatttcgggtaaattctaaagaaacccatccggaataatgcaaactgtgtagtcattgaccaggcacgcaccattttgtattatattgttatttgttgcgagaaaacgaatatttttgcaacaacatccacgcagcactacacgccaaaagagcagtgtgaccgtggcctagtcaaaatctcacttcgatataccagggggatctaaaaaataccgttaatcaagtttattttgaacaaccagaaatttttacaatctagaacttaaggtatagccaatataaacgaaaatttggatttaaaacttgatatacatcaagtaaaaaccatattttatgccatacattaagtaaatacaacgaaacaacatttgcctagcttagccagcctagctgaaccatccctttttgttcattgaattccacttggctatgttcaccaaaatggatgccacacactggtccttgtcccgattttggccgtagtaatcgacaaactcgccatcgggattgaccaggtacatgatgatggtgtgatccacaatataatcgttgtcctcgtcccgcggtccagcgctgaaataaaccctgaaggccttgcacactttgcggatttgttcgacggttcccgtgagtcccagcagtttgggggagaactcttttacgtatttggccaccacctctttggagtcacgttctgggtcaacggtgataaagatgggctgcactgctggcgtttgcggggacttttctgtgaaggtttgagaaacatggttttttttgggtttggaagaaatagtcaggctctacttaccaacttcatcgacgacggcggccatcttctctagctcatcgggacaaatatccgggcagtgggtgaagccaaaatagatgagcagccacttgcctaagaagtcctccgatttgcgaacagctccctgcgaatcaactaattcccaactgccgccgatggctgcttttcccaattgccgctgacgctccttcattctcgcctcatccttctcgctcttcacgtacagcatgaagcccactcctccggctccaagggctccaatgacggccagacttctccaagagatcggacccttgcctttagtggaatctgcgggagcggcataatgac

SEQ ID NO: 18929 - DNA, 1166 bp, DROSOPHILA
tgtagtgctgcgtggatgttgttgcaaaaatattcgttttctcgcaacaaataacaatataatacaaaatgcgtccgttgatgcttcagggccacgagcgttccataacgcaaatcaagtacaaccgcgagggcgacctgctcttctcctgctccaaggatcagaagcccaatgtgtggtactcgctgaacggagaacgtttgggcacctacgatggtcaccagggtgcggtctggtgcctggatgtggactgggagagccgtaagctcatcaccggcgccggtgatatgaccgctaagatctgggacgtcgagtacggcaccgttatcgcctccattccgaccaagtcatcggtgcgcaccagcaacttcagcttctcgggcaaccaggcagcctactcaacggacaaagcgatgggacagagctgtgaactgttcctcatcgatgtccgcaacgccgattcctcgttgtcggagcaggagcccacactccgcatcccgatgaccgagtccaaaattacgtcgatgttgtggggtcctctggatgagaccatcatcacaggtcacgataatggcaacattgccatctgggacatccgtaagggtcaaaaggtggttgactctggcacggatcacagcgctggcatcaacgacatgcagttgagcaaggatggcaccatgtttgtgaccgcctccaaggacaccaccgccaaattgttcgattcggagtccctgatgtgcctcaagacctacaaaacggagcgtccagtaaactcggcggccatcagcccaatcatggatcatgtcgtgctgggcggcggtcaagatgccatggaggtgaccactacgtctacgaaggctggcaagtttgactcgcgcttcttccacctgatatacgaggaggagttcgcccgactcaagggccatttcggacccatcaacagtttggccttccatccggacggcaagagttacgcctcgggcggagaagatggtttcgtgcgtgtccagacattcgatagtacatactttgagaacatcttcgagtagtttgtatccagtagtgatttagtaggatcagagccggtggacttaacataaccatttcaccggcgacatgttcgtttgcttagggaactttcaaatatacgcgaggacgaaacgaaa

SEQ ID NO: 18930 - protein, 326 aa, DROSOPHILA
MRPLMLQGHERSITQIKYNREGDLLFSCSKDQKPNVWYSLNGERLGTYDGHQGAVWCLDVDWESRKLITGAGDMTAKIWDVEYGTVIASIPTKSSVRTSNFSFSGNQAAYSTDKAMGQSCELFLIDVRNADSSLSEQEPTLRIPMTESKITSMLWGPLDETIITGHDNGNIAIWDIRKGQKVVDSGTDHSAGINDMQLSKDGTMFVTASKDTTAKLFDSESLMCLKTYKTERPVNSAAISPIMDHVVLGGGQDAMEVTTTSTKAGKFDSRFFHLIYEEEFARLKGHFGPINSLAFHPDGKSYASGGEDGFVRVQTFDSTYFENIFE

SEQ ID NO: 18931 - DNA, 10317 bp, DROSOPHILA
tgctgcctttaccttgacttgtgtgtcacatgtaaataggaatttaactcgatttttattacattagcgtggctccgtgatagtgctcgctcgcctgggtgatagtccttccaacattcgttggtgaatcgcagacatggcagacgaggaggccggcaaggagggcgagaagaaaatcgtgcacgtttatcctctggttaaggttggttaagtatagagttaactacattccagactatttgctgatggaatccactcccgatttaagcacaccgatatgaacgaggagatgcggatagaggccattgaactgtccattaccgcctgcgagaaatactcatcgaactacgaggtaattaagataaatcctttcactttgaacgggctaatccattactttctcattgagaagttctcaaaagattatcaagttggttgtgttaaaagtgcaataattggctttgaaactaaactccttttcttattacatatatatatttctatttaatactttaaatctacctccaagcacgctgccaaaatcatcaaggagaacatggacaagaagttcggcatctactggcatgtggtcgtgggcgaagggttcggctttgaggtctcctacgagacggagaacattctttatctgttcttcgccggcaacctggccatcgtgctgtggaagtgctcctgaatgcgggtcagcagtgacactaacgtacctagaaaccggaactggaaccaaaaccgaaccaaacaaaaatttagcattaattttagtcatacacacagaacactcaccgtagttaacgaatgttatgaatattaagccgcgcggaggcggcggaaataaatcccctggcaaccatgtgacttgttgggaaaagaatggtttttttttattacaaaatgtacctacatgctagcatattgaaaacaggcttataaatttgtttgtatgcactaaaacgagaaccctaagactccatatgcgcaccgcttacgcgtacacatcctcccgatccgcaccggcgccatcgccgccgtcctcgagattcgagaagagcaggaaatgcgaggtgcgatgcaactcgtgatagaactccttcgggttggccagctgcagttcgtacttcatgttgggatcgtggcgcacgcccatgaagttgtagttccagctgctttgcgccggcaccatgaagaacccaaggaacttgttcgacaacagcatctgaacgcgttcgtagtgcgaaggcaggtatcccttgggattgttacctttgtccgtgttcttggagccccactcgaagcccgaaggcgtcagcttgtaggccgtaagtgagcaggagccgggcgtaaaggagcacgtgatcacgatcgtcttctcgccatcccagttggagttctcctgcatgatcttcgcgtgcgtcgtaatgtcctgcggtgacaattggggcagctcgttgggctgcgtgtggatccagcctagcggctccatgtccttgagatactgatgtgtgggcagggtgttgggcaagttgatcgtctggtgagtgccccattgcggcggcattacgatgcagcgaatctcctttacctgcggattgtccggtggacttacaccatacaagtagccagctatctgggcccgcagatccgagatcgtgacaaacttcttgagtatgttcttgggcaggatgtaggtgtagccggtctcctttatgtcgtccgaactcacgtagatgtggttcgttcgcaggtgcagattagtggcggagatagctcttactcgccactctgtcttcgagctgaacgtctgcgtttcgtaattggatgtagtggaggtaataatttcgtcaccatgcttgtttgtggtacgcgtagtggtggccgtcagttggttttgctccttggtctgcttttcgatctcagcaatctgctggcgctgcgctgagggcgcactgatctccatgcccagaatgatgtcacggatctcggactgagtcagcgaagccacatttacgttgttcttcttgccgtaatcggcgagaatgaggtccttcaactgcacttccaccttaatccattcctcgtcggtcagagtgggccaaatgtgatgcgcctccgttatggtggtcttgtccggcttcaggatgatctttgtcctctccgtattgacgtgaagagcgcgcagaatgaggataagtcgactgaaagccgtatatgaagatatggtcttcagccaatcgtcgtacaagttgaagagcaccatctgtggctcggtagccttcagaatgaggtcaccaaacttctcgactttgagacaagcctggaacggtagctgaagctcggagcccttgatcacaatgttagggaagtcgagcaagtgcacctccagcgggtccaacatgcccttgcgcgtcacaataatttgtttgggctgctcctcaaccggcaatgatcgaatcaaagcggccacttcctcagcagtcttccacttggccagttggcccaaacgcttctggccagcccacacagaggtgtgaatgatcttaaggaagagctgacccgttcgcggattaaagatgaaaattgctccattaatgggcttcgttgtcagatttccctcaaatgtcttgtgtatggtgacgcgatacacgttggtgtcatccacaaaccagataatctgattcgagaacagttctccgtaattctgcgaacttaggtatggctctgtgggctccgaagagtacagctgcaacgccttgcggatgcgctcacgcagcacatagagggcggggtttgccttcatgattttggccatggcctgctgaatgagtgtcttacagccggggaaccaattgccgtaggccgaatgcagattgtatgccaaatcgatggcaatcaacacgcccgtcggtgagggatagatggacatgttgtcagtggtgtaatcgaggaacttggccctggcatagcgctccacatcgtgcgagtcataatcgccccaacgcaactggatatccagccagtacttttgggtggtggtgttatccatggtgtccttggtgtcggccagcagtgaaggtcgcgacacattccatttgtaggcggggaagagcaggatgtcggcacacgatgagttcatcttgtaggacttacgtggatggatggtttccttctgcaccgtctcgatttccaaggcgtccagttcctgatcgaatacctgacacaaatccatgacaatcgattcgtggatcttctgccacaaatgggctcggaatatttgaatcagcgaaatctttagtgtcggaatcttgccgtgcatgaatatgccagtcagatccagttgcacctggaaaccgacgtacacattcgctcgattgatagtcggtgaccaccaaagtgtgaatcgacgattcggaatctggttgagacccgatcgctgagcattggtcaacttcttgtacttcattgactcttcgaaaccggaggccttctcccagaaaagaccctcccacgtggggaagtaggtgcccttgaacagcgtgtgctccagtatgccctccactccacccaacgcctggatcatatccgtgcgataattgttcaggttccacagcttgccatcgtgacgctgatgcgtccaccagaagggattctgctttagcacctggtattgtttgaattcggtacgaatgcgccagcccttgtcgtaggccagtgtgtgacgatccttttggaatagtgtgttgatacgtggaataccgcgatcccagctgtcctctaaatcctccagtgtgagcctacggttctgggcattcgcctcctgacgcttcaatgcgtactccgcccacacgcgctgcgagtctataaactcactctcccacggctgaatgtagcgatacagattgggaataagctggtcctcatcgtgggacatacctgtaagaagtatgaattcctacttagcatatgtactagtattcggatttgcttaataccaaccggagcggaaatgggttatgcccacatcagtttgcttggaccaacgcagatcggattgcggaatcaagacgtgacccatgctcaacattcccagaccgcccagttctttgggagtgtagaacacaacaggcgggaaacgggaaggcatcttagagttgaggccaatcttgatacgagtctgaattttgttctcgcacttgaccaacaggtccaacaattcctgggtattgaccacagcctcacggaagtaggtcatcaagcctatgagcgctgtgttccatttgttcacaatctaaaatagaaagggttgttatggggttatgggttttacttataaatcttaacaatatattccttgcttataaactacctttgtgaacgtagtggacccagaggccatcaggatctgtcgaacacgattatggaaacgacccaatgactcatcgtccacacgcaggaagcactgggcagtacgttccttggtgatttcgttctgtaaattccaaacaccatcacgatgggtgaactcttcattctgagtgcgacactgtggggataaaacgatgaattataaactgatcttaaattgaatttgtggctaaaggaacctttggcaaaatgcgacactcaaatccactcatgttgaacaacagattggggttgtccttcgaatacaccgaaacgaaagtgctctcccaaccaatggtggtcacagagcgaggtagtcggttcttaatgtcccagaagactgcgcgacccctgtaaaacaaaagaaattcatcgttacgcgctttcaaagtggttgttgagtaaatggagacttacaagttaacatcgtgcttcattaaacgcatacgagcgtcgcgtggccagcacttcttgttattgtagcccacaatgttttcgttgttcggatccggatgctcggtaagatagcgctggatcagatcgcgagcctcctccgctgagaatctgaagaacaagtgaatacgatcgacatagcggcagtacaatcgaataggatgtgccgtttctgtgactgtgtcctggaacgtgaggaaatcgttcggcatttggggtgggccagccatctcgctggatcgatgaagacccaaaaccaagagatctagcaccagtccatagtactgtgtgatgaacgatgagaactgcagaccgcgaatgatgccgtagctgttcgtgtggttcatgtccttgtagttgatcacaacgttgttcttggccgtcatgtaatcggcgatattatgatcgacaatcaggcggagcaaacgattaagcagcgtcaagtcaattttctcgtacagcttttcaaatctagactccagcagcacattgcactcgccctcacccacatcccaaacatcctgcagattgttaatgcctgttgaggagaaaaatacgaataagctaagccagagatagtatcaaaggggttctatattccttttttttccataccactgtgtatttcgcagatcatctttggcgtgaggtttgcaacaaggggatgatcaaatacatatcactttgctacaaatcacacacccaaaatgcccggtaccgccgtcaactatgttcttttgaaaccagttccaactttataccttgacaccacttgtaggccaacaatggtggcggctccgtgtcgctgggcttgatccatggcgggaacaatcgacgcttgtcagcctcataccacagatactgatccaaatatgcgtctgtaatcttttccaggggttccacttcgtagactggaatcagatggctgtacaagtccatgaactcaatgcccacctaagatagtaatacaagtcttaaagttatttcaaatacagatagaaatagtgataactaacctccttgaaggctcgctgcgtgagcagatgacgcttgatgcgggacaacgcctcgtgaggattatcgtaggcctgttcgatgaggcccagctcctcacgctgactttgattcagcctggacttaacgctatacgcctcttttagcctctcaagggccaatattagcagcttggtatcgtgtttgtatgaaagtggtgggaagggaatgggcgcaaagcgacgtgattccagccaatggaccgtggttgtgtaaatagccacagcctcctccggtgatatgtacggaccgtcctttaagtagttgtgctgcctctcctgctccgccttcagatagagtcgcgttagtcgccccagattcttcttgcacaccgtcttatcgacggttgctccacgtcgtatacgttcccgattatagtgagccgtgtttgtccaccagtcggctttcattttcacgtaacgcaggatcatattctcaatgggaatgggtagaccaggcaccttccacggaatgttcgctttccagcaacgccatgcctccgataaatgctgcaaaatggtacgagctttgttctgcttgatgccctcgggcatcatgtccacaatatcgtgcatcacggaggcacgcaactccagatcaaagtgggactcaacacgctgcttagtcaccgtcttggccacacccttggagtgacgaccctcgaactgacgcgacaatagattgcccagccagcgttccagtagcggagtgatgccgcgcataaagaacagccagactcgccatccaggtgcccaaaagccacatccgggtcccttgcccacgggccccgtgttgaagcgatagtatatcaaatgtttcagatccttacacattcgaatctgcctcatcagcttgtatttatagcgatacatgccagtcagctggccaacatgggcgaatatgtactgcagtccgtcagccaactgaaaggcgtccacattgtttagccgatactgaacatgagagtcaatgattagcttggtcagacgcaggatctcacggcacaaatggaaagctaataggaatgaaaggaattgataaaagggaaatttttagaaatttaactgcttaccatttccgaatcgcgacttcttacgctccttggtggtcagagttttaacgggcttcaagttgaaattgtaatctaaatgcaagtagttaagattttttcggtgaatcaatagattcaacatgttatatccctgacgacaaacttgcagtccagcctcaacccaatccagagttgtggtctggaagaattttgtggccttaaacgaacggaagaggtagctgcaaagtaaggatacaattcaaaacgtttctatagtttgatttaaataaaactcaccgtttcttttgtggctttggtttgcggtgttttagggcattgagcacatagtatttgagcagtttctggtagctaacgcgcaccttaaccggatggccaggtggacaatgctccttgtaccagcacttgaccagcggcacatcgatggcacgacgggagcgaccagagcgcatgttaaaggggcggggtgcccacagcaaggcgattccgtttgcagtgttgtcagtgtacaggggagtgtcctgcaggaacggctgcacgtcgtccggaagagtaaagtcctcgtcgtcatcaggtaggggctcctgaatcttcgagtttgcattgcgatgggatatgggattgatgagcggatcaaagtaaaatgcaggcagatcgggatcttcggtcttgatgtagaccacgttgggagtgtgatacctgaaatagacaaagtacatcatgtggtcatgtggatcctctaagctacaaatgagtttatatgtatgcaactatcagcagtcacgattaattcttaacaatcgccacgaacatattcattgcagctcccgttttatcgcaaatttggcagtaacctgggagctcgtcgtttttctaacgcggcatgaagcatttccagagaggctgatcacttggaaacgtttctaaccacgtaaataagattttagaatggtaatttttgaagaatgtggactcttaccagctcaaatgcacaaagtgtggcatattgttgtacaagtaaggaaaggcaatgcggtattccgtgcgaattggctgccggataatgactttgttaatgtcattgaactcgttccaatcctcgtccctaaaattaaataaaagcaggaattacattttaacaagtatttagggtatgcattgtcttacccaacattgtggtccttaatgaggggttcaaacttaggtcctcctggaatggccatattaagagccttggcggtgaagaaactttttgggtcaaacaaataaaagaagttattgtcgactagatcggtgagcaattgattggccaatcgatacagcgtggctagctgaggcagggaaagattccactttcggtaggtagtgccgttcacaaaccttagatggtaataaatgaatcaaaacaagatcagatataaatgacaaatcaaaactcactgtgtatccactagaggacgatggtcataaaaccatttgtatacagcattgtcttcgtcattgtccagctcaatttgaatggcctccaagggctccacgtccagcacgttgtcggcatagtctagaggcggctcttcatcgtcaaatggcgggaatctcatgcgcttaaagtggcgacgatcgcgtttctcacgccgcatcatgatccacattgtactgcggaagtgtttaacgtcagttgtgtccacgaggacaagttaaagtcaacttacccccattgtgctatgtagacgggctcaataacccagggaatctcattgacaaaggtaatggctccagtgatgtggtacagcacctggacatcccggatctgctcccatggcattggcatgttctctagcagcttgagcacagcatgtggcatgtacttcagggcgccgagatatactcgcttgtcatgacgatacttgcgcgacgtcatatctccgtgatcgcgaatgatcttcctgatgtgctccggcggcatatcctccttctgggtatccacgaagccaaacttgcgcttctcagcgaatcgcttggactgcagatgctgccatttaagcgccttctcctgcagcttctcctcggtgagtatgtccggcttgggcgtgggaatctggcccaatccgggtccctgacctcccaccgggatgggtataccgttggtatggccaccggccggcggcagcggagcccccggtggcggaatctgctgaatttggttggccatctgctgctgggcgtgcagttgagcctgctgagcatgggcagccgcgtaggcctgctgggccatcagctgggctgcccacgcattttgtggtatcatgtacggcggaatggacatcgttccgcggcacttatcctaatcaataaacgacgaaaaacatacactttacgacacacagacacgttttgtttcagggggagaaatcgaaatgccgccgccgacgtcgcggtcttttgcaattttcaccacgctgtgaaaaagcgtaaatttcgcttttcccccagctaatcttggtttgaatatcttacctggcagttaatttgcaactgtactgcctatttggcactttttctgcctttctttggccgcaattcacaatttttccggttcgcaaaacgagaggtttactttttcatgcggcagccatttatagaatagtagaacggtcacatcactcaatcgataagacatctatcgtctatcgagagattaggtgaattgctaaacagtctagtggtaaaaagcagtcaagataaccacacaaagtgcgagcaaatttgaaaatttaaataacggtgttattggggaatatattacaaattcaccaaaactgcgacgactaaaactaattagccttattcacttaaattactttgtattgtagtagtaaaaaatatcgagacattagcatttttaattaaggctaaatccttgtaattaaatcaatgaatcagctcgtcaacaaatgtgttaatattaataattaggaacttaattagtgtagtgcgtcaatattattgttgatgactggtaaaaataagaacacacagtcgactttagctaacaacaaaccgaataaataaaacactaaataactttttctttggccattaactaatgctcactgtagcttagaaattcaaataaccgaattggaagatcccatcgagtcatctgtgataatgaaacacctcatttcgcatcgggtaacgacatccccagactcccgaatgtttgtccaatcaatgatcatgtgcaaaatcgatccccgggacgttttgggccactataaatattgtcggcaggtcgctggggatcacagtttacggacaacaac

SEQ ID NO: 18932 - DNA, 7191 bp, DROSOPHILA
atgtccattccgccgtacatgataccacaaaatgcgtgggcagcccagctgatggcccagcaggcctacgcggctgcccatgctcagcaggctcaactgcacgcccagcagcagatggccaaccaaattcagcagattccgccaccgggggctccgctgccgccggccggtggccataccaacggtatacccatcccggtgggaggtcagggacccggattgggccagattcccacgcccaagccggacatactcaccgaggagaagctgcaggagaaggcgcttaaatggcagcatctgcagtccaagcgattcgctgagaagcgcaagtttggcttcgtggatacccagaaggaggatatgccgccggagcacatcaggaagatcattcgcgatcacggagatatgacgtcgcgcaagtatcgtcatgacaagcgagtatatctcggcgccctgaagtacatgccacatgctgtgctcaagctgctagagaacatgccaatgccatgggagcagatccgggatgtccaggtgctgtaccacatcactggagccattacctttgtcaatgagattccctgggttattgagcccgtctacatagcacaatggggtacaatgtggatcatgatgcggcgtgagaaacgcgatcgtcgccactttaagcgcatgagattcccgccatttgacgatgaagagccgcctctagactatgccgacaacgtgctggacgtggagcccttggaggccattcaaattgagctggacaatgacgaagacaatgctgtatacaaatggttttatgaccatcgtcctctagtggatacacagtttgtgaacggcactacctaccgaaagtggaatctttccctgcctcagctagccacgctgtatcgattggccaatcaattgctcaccgatctagtcgacaataacttcttttatttgtttgacccaaaaagtttcttcaccgccaaggctcttaatatggccattccaggaggacctaagtttgaacccctcattaaggaccacaatgttggggacgaggattggaacgagttcaatgacattaacaaagtcattatccggcagccaattcgcacggaataccgcattgcctttccttacttgtacaacaatatgccacactttgtgcatttgagctggtatcacactcccaacgtggtctacatcaagaccgaagatcccgatctgcctgcattttactttgatccgctcatcaatcccatatcccatcgcaatgcaaactcgaagattcaggagcccctacctgatgacgacgaggactttactcttccggacgacgtgcagccgttcctgcaggacactcccctgtacactgacaacactgcaaacggaatcgccttgctgtgggcaccccgcccctttaacatgcgctctggtcgctcccgtcgtgccatcgatgtgccgctggtcaagtgctggtacaaggagcattgtccacctggccatccggttaaggtgcgcgttagctaccagaaactgctcaaatactatgtgctcaatgccctaaaacaccgcaaaccaaagccacaaaagaaacgctacctcttccgttcgtttaaggccacaaaattcttccagaccacaactctggattgggttgaggctggactgcaagtttgtcgtcagggatataacatgttgaatctattgattcaccgaaaaaatcttaactacttgcatttagattacaatttcaacttgaagcccgttaaaactctgaccaccaaggagcgtaagaagtcgcgattcggaaatgctttccatttgtgccgtgagatcctgcgtctgaccaagctaatcattgactctcatgttcagtatcggctaaacaatgtggacgcctttcagttggctgacggactgcagtacatattcgcccatgttggccagctgactggcatgtatcgctataaatacaagctgatgaggcagattcgaatgtgtaaggatctgaaacatttgatatactatcgcttcaacacggggcccgtgggcaagggacccggatgtggcttttgggcacctggatggcgagtctggctgttctttatgcgcggcatcactccgctactggaacgctggctgggcaatctattgtcgcgtcagttcgagggtcgtcactccaagggtgtggccaagacggtgactaagcagcgtgttgagtcccactttgatctggagttgcgtgcctccgtgatgcacgatattgtggacatgatgcccgagggcatcaagcagaacaaagctcgtaccattttgcagcatttatcggaggcatggcgttgctggaaagcgaacattccgtggaaggtgcctggtctacccattcccattgagaatatgatcctgcgttacgtgaaaatgaaagccgactggtggacaaacacggctcactataatcgggaacgtatacgacgtggagcaaccgtcgataagacggtgtgcaagaagaatctggggcgactaacgcgactctatctgaaggcggagcaggagaggcagcacaactacttaaaggacggtccgtacatatcaccggaggaggctgtggctatttacacaaccacggtccattggctggaatcacgtcgctttgcgcccattcccttcccaccactttcatacaaacacgataccaagctgctaatattggcccttgagaggctaaaagaggcgtatagcgttaagtccaggctgaatcaaagtcagcgtgaggagctgggcctcatcgaacaggcctacgataatcctcacgaggcgttgtcccgcatcaagcgtcatctgctcacgcagcgagccttcaaggaggtgggcattgagttcatggacttgtacagccatctgattccagtctacgaagtggaacccctggaaaagattacagacgcatatttggatcagtatctgtggtatgaggctgacaagcgtcgattgttcccgccatggatcaagcccagcgacacggagccgccaccattgttggcctacaagtggtgtcaaggcattaacaatctgcaggatgtttgggatgtgggtgagggcgagtgcaatgtgctgctggagtctagatttgaaaagctgtacgagaaaattgacttgacgctgcttaatcgtttgctccgcctgattgtcgatcataatatcgccgattacatgacggccaagaacaacgttgtgatcaactacaaggacatgaaccacacgaacagctacggcatcattcgcggtctgcagttctcatcgttcatcacacagtactatggactggtgctagatctcttggttttgggtcttcatcgatccagcgagatggctggcccaccccaaatgccgaacgatttcctcacgttccaggacacagtcacagaaacggcacatcctattcgattgtactgccgctatgtcgatcgtattcacttgttcttcagattctcagcggaggaggctcgcgatctgatccagcgctatcttaccgagcatccggatccgaacaacgaaaacattgtgggctacaataacaagaagtgctggccacgcgacgctcgtatgcgtttaatgaagcacgatgttaacttgggtcgcgcagtcttctgggacattaagaaccgactacctcgctctgtgaccaccattggttgggagagcactttcgtttcggtgtattcgaaggacaaccccaatctgttgttcaacatgagtggatttgagtgtcgcattttgccaaagtgtcgcactcagaatgaagagttcacccatcgtgatggtgtttggaatttacagaacgaaatcaccaaggaacgtactgcccagtgcttcctgcgtgtggacgatgagtcattgggtcgtttccataatcgtgttcgacagatcctgatggcctctgggtccactacgttcacaaagattgtgaacaaatggaacacagcgctcataggcttgatgacctacttccgtgaggctgtggtcaatacccaggaattgttggacctgttggtcaagtgcgagaacaaaattcagactcgtatcaagattggcctcaactctaagatgccttcccgtttcccgcctgttgtgttctacactcccaaagaactgggcggtctgggaatgttgagcatgggtcacgtcttgattccgcaatccgatctgcgttggtccaagcaaactgatgtgggcataacccatttccgctccggtatgtcccacgatgaggaccagcttattcccaatctgtatcgctacattcagccgtgggagagtgagtttatagactcgcagcgcgtgtgggcggagtacgcattgaagcgtcaggaggcgaatgcccagaaccgtaggctcacactggaggatttagaggacagctgggatcgcggtattccacgtatcaacacactattccaaaaggatcgtcacacactggcctacgacaagggctggcgcattcgtaccgaattcaaacaataccaggtgctaaagcagaatcccttctggtggacgcatcagcgtcacgatggcaagctgtggaacctgaacaattatcgcacggatatgatccaggcgttgggtggagtggagggcatactggagcacacgctgttcaagggcacctacttccccacgtgggagggtcttttctgggagaaggcctccggtttcgaagagtcaatgaagtacaagaagttgaccaatgctcagcgatcgggtctcaaccagattccgaatcgtcgattcacactttggtggtcaccgactatcaatcgagcgaatgtgtacgtcggtttccaggtgcaactggatctgactggcatattcatgcacggcaagattccgacactaaagatttcgctgattcaaatattccgagcccatttgtggcagaagatccacgaatcgattgtcatggatttgtgtcaggtattcgatcaggaactggacgccttggaaatcgagacggtgcagaaggaaaccatccatccacgtaagtcctacaagatgaactcatcgtgtgccgacatcctgctcttccccgcctacaaatggaatgtgtcgcgaccttcactgctggccgacaccaaggacaccatggataacaccaccacccaaaagtactggctggatatccagttgcgttggggcgattatgactcgcacgatgtggagcgctatgccagggccaagttcctcgattacaccactgacaacatgtccatctatccctcaccgacgggcgtgttgattgccatcgatttggcatacaatctgcattcggcctacggcaattggttccccggctgtaagacactcattcagcaggccatggccaaaatcatgaaggcaaaccccgccctctatgtgctgcgtgagcgcatccgcaaggcgttgcagctgtactcttcggagcccacagagccatacctaagttcgcagaattacggagaactgttctcgaatcagattatctggtttgtggatgacaccaacgtgtatcgcgtcaccatacacaagacatttgagggaaatctgacaacgaagcccattaatggagcaattttcatctttaatccgcgaacgggtcagctcttccttaagatcattcacacctctgtgtgggctggccagaagcgtttgggccaactggccaagtggaagactgctgaggaagtggccgctttgattcgatcattgccggttgaggagcagcccaaacaaattattgtgacgcgcaagggcatgttggacccgctggaggtgcacttgctcgacttccctaacattgtgatcaagggctccgagcttcagctaccgttccaggcttgtctcaaagtcgagaagtttggtgacctcattctgaaggctaccgagccacagatggtgctcttcaacttgtacgacgattggctgaagaccatatcttcatatacggctttcagtcgacttatcctcattctgcgcgctcttcacgtcaatacggagaggacaaagatcatcctgaagccggacaagaccaccataacggaggcgcatcacatttggcccactctgaccgacgaggaatggattaaggtggaagtgcagttgaaggacctcattctcgccgattacggcaagaagaacaacgtaaatgtggcttcgctgactcagtccgagatccgtgacatcattctgggcatggagatcagtgcgccctcagcgcagcgccagcagattgctgagatcgaaaagcagaccaaggagcaaaaccaactgacggccaccactacgcgtaccacaaacaagcatggtgacgaaattattacctccactacatccaattacgaaacgcagacgttcagctcgaagacagagtggcgagtaagagctatctccgccactaatctgcacctgcgaacgaaccacatctacgtgagttcggacgacataaaggagaccggctacacctacatcctgcccaagaacatactcaagaagtttgtcacgatctcggatctgcgggcccagatagctggctacttgtatggtgtaagtccaccggacaatccgcaggtaaaggagattcgctgcatcgtaatgccgccgcaatggggcactcaccagacgatcaacttgcccaacaccctgcccacacatcagtatctcaaggacatggagccgctaggctggatccacacgcagcccaacgagctgccccaattgtcaccgcaggacattacgacgcacgcgaagatcatgcaggagaactccaactgggatggcgagaagacgatcgtgatcacgtgctcctttacgcccggctcctgctcacttacggcctacaagctgacgccttcgggcttcgagtggggctccaagaacacggacaaaggtaacaatcccaagggatacctgccttcgcactacgaacgcgttcagatgctgttgtcgaacaagttccttgggttcttcatggtgccggcgcaaagcagctggaactacaacttcatgggcgtgcgccacgatcccaacatgaagtacgaactgcagctggccaacccgaaggagttctatcacgagttgcatcgcacctcgcatttcctgctcttctcgaatctcgaggacggcggcgatggcgccggtgcggatcgggaggatgtgtacgcgtaa

SEQ ID NO: 18933 - protein, 2396 aa, DROSOPHILA
MSIPPYMIPQNAWAAQLMAQQAYAAAHAQQAQLHAQQQMANQIQQIPPPGAPLPPAGGHTNGIPIPVGGQGPGLGQIPTPKPDILTEEKLQEKALKWQHLQSKRFAEKRKFGFVDTQKEDMPPEHIRKIIRDHGDMTSRKYRHDKRVYLGALKYMPHAVLKLLENMPMPWEQIRDVQVLYHITGAITFVNEIPWVIEPVYIAQWGTMWIMMRREKRDRRHFKRMRFPPFDDEEPPLDYADNVLDVEPLEAIQIELDNDEDNAVYKWFYDHRPLVDTQFVNGTTYRKWNLSLPQLATLYRLANQLLTDLVDNNFFYLFDPKSFFTAKALNMAIPGGPKFEPLIKDHNVGDEDWNEFNDINKVIIRQPIRTEYRIAFPYLYNNMPHFVHLSWYHTPNVVYIKTEDPDLPAFYFDPLINPISHRNANSKIQEPLPDDDEDFTLPDDVQPFLQDTPLYTDNTANGIALLWAPRPFNMRSGRSRRAIDVPLVKCWYKEHCPPGHPVKVRVSYQKLLKYYVLNALKHRKPKPQKKRYLFRSFKATKFFQTTTLDWVEAGLQVCRQGYNMLNLLIHRKNLNYLHLDYNFNLKPVKTLTTKERKKSRFGNAFHLCREILRLTKLIIDSHVQYRLNNVDAFQLADGLQYIFAHVGQLTGMYRYKYKLMRQIRMCKDLKHLIYYRFNTGPVGKGPGCGFWAPGWRVWLFFMRGITPLLERWLGNLLSRQFEGRHSKGVAKTVTKQRVESHFDLELRASVMHDIVDMMPEGIKQNKARTILQHLSEAWRCWKANIPWKVPGLPIPIENMILRYVKMKADWWTNTAHYNRERIRRGATVDKTVCKKNLGRLTRLYLKAEQERQHNYLKDGPYISPEEAVAIYTTTVHWLESRRFAPIPFPPLSYKHDTKLLILALERLKEAYSVKSRLNQSQREELGLIEQAYDNPHEALSRIKRHLLTQRAFKEVGIEFMDLYSHLIPVYEVEPLEKITDAYLDQYLWYEADKRRLFPPWIKPSDTEPPPLLAYKWCQGINNLQDVWDVGEGECNVLLESRFEKLYEKIDLTLLNRLLRLIVDHNIADYMTAKNNVVINYKDMNHTNSYGIIRGLQFSSFITQYYGLVLDLLVLGLHRSSEMAGPPQMPNDFLTFQDTVTETAHPIRLYCRYVDRIHLFFRFSAEEARDLIQRYLTEHPDPNNENIVGYNNKKCWPRDARMRLMKHDVNLGRAVFWDIKNRLPRSVTTIGWESTFVSVYSKDNPNLLFNMSGFECRILPKCRTQNEEFTHRDGVWNLQNEITKERTAQCFLRVDDESLGRFHNRVRQILMASGSTTFTKIVNKWNTALIGLMTYFREAVVNTQELLDLLVKCENKIQTRIKIGLNSKMPSRFPPVVFYTPKELGGLGMLSMGHVLIPQSDLRWSKQTDVGITHFRSGMSHDEDQLIPNLYRYIQPWESEFIDSQRVWAEYALKRQEANAQNRRLTLEDLEDSWDRGIPRINTLFQKDRHTLAYDKGWRIRTEFKQYQVLKQNPFWWTHQRHDGKLWNLNNYRTDMIQALGGVEGILEHTLFKGTYFPTWEGLFWEKASGFEESMKYKKLTNAQRSGLNQIPNRRFTLWWSPTINRANVYVGFQVQLDLTGIFMHGKIPTLKISLIQIFRAHLWQKIHESIVMDLCQVFDQELDALEIETVQKETIHPRKSYKMNSSCADILLFPAYKWNVSRPSLLADTKDTMDNTTTQKYWLDIQLRWGDYDSHDVERYARAKFLDYTTDNMSIYPSPTGVLIAIDLAYNLHSAYGNWFPGCKTLIQQAMAKIMKANPALYVLRERIRKALQLYSSEPTEPYLSSQNYGELFSNQIIWFVDDTNVYRVTIHKTFEGNLTTKPINGAIFIFNPRTGQLFLKIIHTSVWAGQKRLGQLAKWKTAEEVAALIRSLPVEEQPKQIIVTRKGMLDPLEVHLLDFPNIVIKGSELQLPFQACLKVEKFGDLILKATEPQMVLFNLYDDWLKTISSYTAFSRLILILRALHVNTERTKIILKPDKTTITEAHHIWPTLTDEEWIKVEVQLKDLILADYGKKNNVNVASLTQSEIRDIILGMEISAPSAQRQQIAEIEKQTKEQNQLTATTTRTTNKHGDEIITSTTSNYETQTFSSKTEWRVRAISATNLHLRTNHIYVSSDDIKETGYTYILPKNILKKFVTISDLRAQIAGYLYGVSPPDNPQVKEIRCIVMPPQWGTHQTINLPNTLPTHQYLKDMEPLGWIHTQPNELPQLSPQDITTHAKIMQENSNWDGEKTIVITCSFTPGSCSLTAYKLTPSGFEWGSKNTDKGNNPKGYLPSHYERVQMLLSNKFLGFFMVPAQSSWNYNFMGVRHDPNMKYELQLANPKEFYHELHRTSHFLLFSNLEDGGDGAGADREDVYA

SEQ ID NO: 18934 - DNA, 2834 bp, DROSOPHILA
ggcgcagcagcccgtggaacttaatgccatgggctacctgtccatttcgctggacacctttaaacaggtaaaatgcaaacaccacgtatactttatatgacattatgtgaatttcgctttcaactgcagctgatgagcgtctcctaccgggttataaccatgctcatgcagatgattcagtagacagcaaacacaagcacggagtttgcaaaatcgggacgctttaatcgcactacgctagtaactatctttctatataactagatcacttgggatccgagggcagcttgaagcccaccaaatcggcggtatcccttacggatctctcgccccttccgtgatattccttgtagagctccaagtaccggcgctggctggctaggtaggtcaggtaggtttgacccaggaaagtcgcttcgttgcgcgccttgcagaattgttgttccgtggtggcgaacttcttgtattgcgccaaaatgtagcgcgcggccagagagtccttgatgcagccatttggagatgcctggcgcaattcgtgcagcagggagcgcagcaccttggttcccgccattctaaacacaaaatattaattgcatttgcaagaaactataaacaatcaacgacttacgtgatttttaagaaaattccaattgcttctgccgaacagctgttctcaacagagttgccacctagtcatacaatgaatatacagtgatcactctcacaaattgacactttgaaaaataacactggatcttattttttataattatcaataaatctgaaaaatcatcaaaagtttgactacgagcacagtaaaactctgtgacaaacgaaatatttaaaatttatttattttaattatattatattctcacttttgaaatcgttttgctataaatgtctaaaagtcgaacggtctgattggaaaacaagaacaaccaataagtaaagtacacaatccaactggactgtcaaactaaaaatacaaacagtaaatccagttggaaaaaaccaatttattttaaaagttatttagcagtacaccgaactcgttgcgtgggctgtttacttcctgggcttgccagcggctggcttctggccgggcttcttgccagcggctcccttggcgccagcaccacccttggtgaccttgccggcaccggccttggttcccttggctccagcagcgggcttcttcttgggctcgggcttggccttgggggccttcaccggcttgacgagcgcctcgcgctggctcttcagggccttgacgatcttctgctcctcgatgaggaaggcgcgcacgatacgctcgcgcaggcagctgtggcacagcactccaccgtaggtcctggacacggtcttcaggcgcttggacatgcgggggcgctcgctggggcgggagggggtgatacccttcaacttctccttgcactggccgcaacggggcacggtggggttcttcttcacatactggtaaaccagacgaccaccgggcgtgcgaacactgtaaattgcaaatgtgcgttatttttcatattggtgaggtgtattgcagttggatagttacatgcgccgcttgttggagcgtgtgttgtaggacaggcgtctccggagcgtcagacgttggaccattttgctgttgttgttgctgcttgtcgtggcgattcgtgggttacatgtgcaaaagcggtgaaaatcattattagtttggagttacactagggtgggtgcagtttgggctgcatttggtggtatattttcacaattttttcacacatttcggcgaatttgcgtgaaattgttaattgaacacgtgcatacctcaaagagacgaaactagaaagaaaggtggcaaccctgttcgcgcacgacgtgaacttggctgcgctgcccactgtacgacactttcgagcactgcagaccttgccagattgccatgaaaacatgggcttatgggggttgcaaattatttattttttgttagaaaagttaggattttatacacaatttaatgctatattcttttggttaagtatgctttggctaagtatatgcgtattaatatgaggttaaataatgcgttttataaatattgatcccttttactacgcccctgcgataacctgttgttgttttgcttgcgatgaaatctgttatcaaaccgcgaaaagataacatttaattgcagcaatatgagcaaaactagcaacagtaagtgtttctcaaaatttcaaagagatccacttaaatatttcttatttaatagtcatgcgtttggcgctgctgcagctcaagggttccaaggacaaagtggccaatgtccaaaacgccgtcaccaaaatcgaggcggcggtcaaggagcataaaccccgattgatcactctgccggagtgctttaatgctccatacggcaccaagtactttcgggagtactccgagaccattcccgatggctatacctcgcaacagctctccaatttggccaggaagcaccaggtgtacatcgtgggcggaacaatccctgaactgggcgaaaacgatgccatctacaacacctgcacggtttggtcacccactggtgaccttgtggccaagcatcgcaagatgcatctctttgacatagatgtcaagggtggcattcgcttcaaggagtcggaaacgctgtccgcaggcaatgatttcaccatcatcaacgtagatggccacaagattggcatcggcatctgctacgatattcgattcgaggagatggcgaggctctatcgcaacgcaggctgcgagatgatcatctatccggctgcattcaacatgaccactggtccactgca

SEQ ID NO: 18935 - DNA, 771 bp, DROSOPHILA
ctttgaggtatgcacgtgttcaattaacaatttcacgcaaattcgccgaaatgtgtgaaaaaattgtgaaaatataccaccaaatgcagcccaaactgcacccaccctagtgtaactccaaactaataatgattttcaccgcttttgcacatgtaacccacgaatcgccacgacaagcagcaacaacaacagcaaaatggtccaacgtctgacgctccggagacgcctgtcctacaacacacgctccaacaagcggcgcattgttcgcacgcccggtggtcgtctggtttaccagtatgtgaagaagaaccccaccgtgccccgttgcggccagtgcaaggagaagttgaagggtatcaccccctcccgccccagcgagcgcccccgcatgtccaagcgcctgaagaccgtgtccaggacctacggtggagtgctgtgccacagctgcctgcgcgagcgtatcgtgcgcgccttcctcatcgaggagcagaagatcgtcaaggccctgaagagccagcgcgaggcgctcgtcaagccggtgaaggcccccaaggccaagcccgagcccaagaagaagcccgctgctggagccaagggaaccaaggccggtgccggcaaggtcaccaagggtggtgctggcgccaagggagccgctggcaagaagcccggccagaagccagccgctggcaagcccaggaagtaaacagcccacgcaacgagttcggtgtactgctaaataacttttaaaataaattggttttttccaactgg

SEQ ID NO: 18936 - protein, 168 aa, DROSOPHILA
MVQRLTLRRRLSYNTRSNKRRIVRTPGGRLVYQYVKKNPTVPRCGQCKEKLKGITPSRPSERPRMSKRLKTVSRTYGGVLCHSCLRERIVRAFLIEEQKIVKALKSQREALVKPVKAPKAKPEPKKKPAAGAKGTKAGAGKVTKGGAGAKGAAGKKPGQKPAAGKPRK

SEQ ID NO: 18937 - DNA, 2948 bp, DROSOPHILA
caaccaccttttgacccttacggatgtcccagatggcaatgttgccattatcgtgacctggaaatacgggttttaaacggttttcataatagattatcgggtaaacaccaacctgtgatgatggtctcatccagaggaccccacaacatcgacgtaattttggactcggtcatcgggatgcggagtgtgggctcctgctccgacaacgaggaatcggcgttgcggacatcgatgaggaacagttcacagctctgtcccatcgctttgtccgttgagtaggctgcctggttgcccgagaagctgaagttgctggtgcgcaccgatgacttggtcggaatggaggcgataacggtgccgtactcgacgtcccagatcttagcggtcatatcaccggcgccggtgatgagcttacggctctcccagtccacatccaggcaccagaccgcaccctggtgaccatcgtaggtgcccaaacgttctccgttcagcgagtaccacacattgggcttctgatccttggagcaggagaagagcaggtcgccctcgcggttgtacttgatttgcgttatggaacgctcgtggccctgaagcatcaacggacgctataaaagacagaataatacgaatttttagcaacaatttaggccgcttttaaggttatgtttggtccggaatttcacacgactttcacactttgcaaatagttgtaatttcgggtaaattctaaagaaacccatccggaataatgcaaactgtgtagtcattgaccaggcacgcaccattttgtattatattgttatttgttgcgagaaaacgaatatttttgcaacaacatccacgcagcactacacgccaaaagagcagtgtgaccgtggcctagtcaaaatctcacttcgatataccagggggatctaaaaaataccgttaatcaagtttattttgaacaaccagaaatttttacaatctagaacttaaggtatagccaatataaacgaaaatttggatttaaaacttgatatacatcaagtaaaaaccatattttatgccatacattaagtaaatacaacgaaacaacatttgcctagcttagccagcctagctgaaccatccctttttgttcattgaattccacttggctatgttcaccaaaatggatgccacacactggtccttgtcccgattttggccgtagtaatcgacaaactcgccatcgggattgaccaggtacatgatgatggtgtgatccacaatataatcgttgtcctcgtcccgcggtccagcgctgaaataaaccctgaaggccttgcacactttgcggatttgttcgacggttcccgtgagtcccagcagtttgggggagaactcttttacgtatttggccaccacctctttggagtcacgttctgggtcaacggtgataaagatgggctgcactgctggcgtttgcggggacttttctgtgaaggtttgagaaacatggttttttttgggtttggaagaaatagtcaggctctacttaccaacttcatcgacgacggcggccatcttctctagctcatcgggacaaatatccgggcagtgggtgaagccaaaatagatgagcagccacttgcctaagaagtcctccgatttgcgaacagctccctgcgaatcaactaattcccaactgccgccgatggctgcttttcccaattgccgctgacgctccttcattctcgcctcatccttctcgctcttcacgtacagcatgaagcccactcctccggctccaagggctccaatgacggccagacttctccaagagatcggacccttgcctttagtggaatctgcgggagcggcataatgacgaattgcgggctgttgtgcccagcgacgacagctgcccactaagcgttgcagggagcgggacatcttacgcccggtttcagaaatttgaaggctttacgtaaatcttctggagaaataaaaatatcgccggtgtcctgctgcttcttcctattcagccagtcacggcgaaacagcatttatttagtacataaagtatatttatttagtatattagttagtttgttagttagtttggtatattttggtattagaaggcggtcttattgattccaacacgtgcggttcaattttgttaaattatttaataaaaacaccggggcaaatggcaagcaaaaatcgcaaggagccgcttctgtacatggaggagtatcgggtgaagcaggatccgcaggactatggactggcggacgatgtattttccgttcaggctttcaaggaaaagctgcacatcaaaatcgtcaggtaaatctcaatagaaattagaatcttacgagtcgattaacaattggtgttcacttctagaaacgacgaagacggcctggagttcgatctgattggcgtgtatcccgccattgcaaatgccttccgtcgcctgatgctcagcgatgtgcccagcatggccatcgaaaaggtgtacatatacaacaacacctcgatcatccaggacgaggtacttgcccatcgaatgggtctacttccgttgcgggctgatccccgtctattcgcataccgcaccgaggaaagcactgaggcggggaccgagcaggatacgcttgaatttgagctgaaggtgaagtgctcgcggcgacgggatgctggaaaagatcagtccaacttcgatgacatttacaaaaaccacaaagtgtactcgggtcatctgaagtggctgcccaaaggaaagcaggcgcagatatacagcgagagtgctgtgaactgcattcacgatgacatactgattgcccaattgcgtccgggtcacgagttggatctgcgcctggtggcggttaagggacttggacgggatcacgcgaaattctcgccggtggccacggccacctaccgactgctgcccatgattaagctgaaccgcgaggtga

SEQ ID NO: 18938 - DNA, 885 bp, DROSOPHILA
gtaaagccttcaaatttctgaaaccgggcgtaagatgtcccgctccctgcaacgcttagtgggcagctgtcgtcgctgggcacaacagcccgcaattcgtcattatgccgctcccgcagattccactaaaggcaagggtccgatctcttggagaagtctggccgtcattggagcccttggagccggaggagtgggcttcatgctgtacgtgaagagcgagaaggatgaggcgagaatgaaggagcgtcagcggcaattgggaaaagcagccatcggcggcagttgggaattagttgattcgcagggagctgttcgcaaatcggaggacttcttaggcaagtggctgctcatctattttggcttcacccactgcccggatatttgtcccgatgagctagagaagatggccgccgtcgtcgatgaagttgaaaagtccccgcaaacgccagcagtgcagcccatctttatcaccgttgacccagaacgtgactccaaagaggtggtggccaaatacgtaaaagagttctcccccaaactgctgggactcacgggaaccgtcgaacaaatccgcaaagtgtgcaaggccttcagggtttatttcagcgctggaccgcgggacgaggacaacgattatattgtggatcacaccatcatcatgtacctggtcaatcccgatggcgagtttgtcgattactacggccaaaatcgggacaaggaccagtgtgtggcatccattttggtgaacatagccaagtggaattcaatgaacaaaaagggatggttcagctaggctggctaagctaggcaaatgttgtttcgttgtatttacttaatgtatggcataaaatatggtttttacttgatgtatatcaagttttaaatcca

SEQ ID NO: 18939 - protein, 251 aa, DROSOPHILA
MSRSLQRLVGSCRRWAQQPAIRHYAAPADSTKGKGPISWRSLAVIGALGAGGVGFMLYVKSEKDEARMKERQRQLGKAAIGGSWELVDSQGAVRKSEDFLGKWLLIYFGFTHCPDICPDELEKMAAVVDEVEKSPQTPAVQPIFITVDPERDSKEVVAKYVKEFSPKLLGLTGTVEQIRKVCKAFRVYFSAGPRDEDNDYIVDHTIIMYLVNPDGEFVDYYGQNRDKDQCVASILVNIAKWNSMNKKGWFS

SEQ ID NO: 18940 - DNA, 3242 bp, DROSOPHILA
tcaaaatcgtcaggtaaatctcaatagaaattagaatcttacgagtcgattaacaattggtgttcacttctagaaacgacgaagacggcctggagttcgatctgattggcgtgtatcccgccattgcaaatgccttccgtcgcctgatgctcagcgatgtgcccagcatggccatcgaaaaggtgtacatatacaacaacacctcgatcatccaggacgaggtacttgcccatcgaatgggtctacttccgttgcgggctgatccccgtctattcgcataccgcaccgaggaaagcactgaggcggggaccgagcaggatacgcttgaatttgagctgaaggtgaagtgctcgcggcgacgggatgctggaaaagatcagtccaacttcgatgacatttacaaaaaccacaaagtgtactcgggtcatctgaagtggctgcccaaaggaaagcaggcgcagatatacagcgagagtgctgtgaactgcattcacgatgacatactgattgcccaattgcgtccgggtcacgagttggatctgcgcctggtggcggttaagggacttggacgggatcacgcgaaattctcgccggtggccacggccacctaccgactgctgcccatgattaagctgaaccgcgaggtgaccggtaaggatgcgtacctattacagaactgtttctcaccaggagtaattggcattgacgagaatgaaactgcctatgtaaaggatgcacgctacgacacgtgcagccgaaatgtgtatcgctatccccagctaaacgacgctgtgactttggcccgtatccgagatcactacattttctccgtggaatcagtcggcgcactgaagcccgatgtcatcttcctggaggcggtcaaggtattgaagagaaagtgccgggcgctaattgacgaaattgaggcagaatagttatttatttagttgttaaagaaattatattatgtacataagacagcttgatataaattgtaagcctacgaagatcgtgcttgctctctcttgcgcttgagcaccttcaggcgaaattccgttaggaccacctgcagacgctcctggcacattagtgcgtcctccaggtccatgttgttcagctgcagagccaaactcttgccaaacaagtcaaattcactaataatggtgtcttccgtcatcgcgtcgacttggtattcgttattaatctccgtatcttccggcttgagctgtatcatctcttcctcgtagaccacctcttggtcctggagatctgtttcattctgttgtacttcgaggaactcgttctcaacctcaaattcttgctcttgatagggctgatctgttctgagtaaatcatccaggattgagtcgttcgaggcgatttcgtcctcctccgtctcctcctccatgctctccaccttcgtgtcgttcttgatctttggctgcattttgctccttggcttttgccttggataggtctttgatttggctttgggctttgctttgggtgaaattatggaggcctccaagtctgggtcatgctcatctttgacaagttcacccttaatcatattctgtaggtataaatacggagttgttaattttatgtaaattagtaatgagatgagaattttttttttggagcgataagttgtgcatcgcatagagggagctactggtttggttaaccattgcacaagaagtagtcaatggaatagttaacgaaaagtatggcgaaaactcacacaaaaatcgtgtttgaaatttagtttggatcgcaaaatatttgaatcaataatggacacgggtcattcctattgcttatgcacaaacccaatcccaccttggcaagaatgttgtggtacttgaaactttcctggtgtttccgcgttgcgaggtgctgcttgatggacgctagtctggcgaggacattgatgtcgcagatcttgcagtgcgccgagtaaccgtcattactagacgccagccagctggagagctccggatatttctcccactctgtgcgatagcgttggtggtacagtcgcttcaccttcttgtcctcatccgtcttgtaacccttcagcattgtgcccgctttcggatgaagcttgtctgatttgtggaaaagtattctttgaaagatgagcgccaaaagcagtctttaatagctgatggtggtaaatattttggtatattccaaaaatttgcgacgcgaaaaaaatctgaaagtcgatgcggtgtgactgtaatcgaatacgttataataccagcaattaattccagggttgcgacatagaggttgctgcgcaacggtcacactaagctgttttgtttatataaacattttatgccttcaagtttatattagaggcgtttatggttgtgttatgtactttttgaaaataccttacttgtacatagttcaaattaatttagtttgagattttaaataaaatattctttcatggtttgggtctcaggtaaagtttaagcagtcacaatacggccacactacacactcatagagaaaaaatatagtaaataaaaaggctttgccgaattcaggatagcttttgcctgcaccgtgggtgctcagccaacatggtcattccaaaggagatcctaagcgacttcaaggagctatacgagaaggccaaccgtctggtggaggaggagagccgcaatgatccgcccacggatccattccgctcccattataaagcgcgcgatgtgctaattgtcttgaagaagcagctggacgaccaactggtatctgtgcaggccagcgaggaggacggtggtcaggacgatcgctgctatcactctctgttggccttcgtttgccgggatctaggcaggatctacatctacacagaggagcaggcagagggcgaaaagatgctcaatcgttgtctggaactagtcacgccgtttaaggagtgccctgagggcatcattccattcattggggcaatcaacgagcttagcattgtgctggcctccaaggaagagtacaataagggactggaaattctcctggaggcagaaaaaatctacgaggacttcaaagccagtggtctgaagcccctggccattcaagatgtgttcaatcctccggaggagggacaacaatctcacgaagctggtcccaaggaactggaatccctgtacacgctagtctcattttacatggcgcaaatgtacgggcatttgggtgagccggaaaagtcggccaagtgctgc

SEQ ID NO: 18941 - DNA, 940 bp, DROSOPHILA
tcacaccgcatcgactttcagatttttttcgcgtcgcaaatttttggaatataccaaaatatttaccaccatcagctattaaagactgcttttggcgctcatctttcaaagaatacttttccacaaatcagacaagcttcatccgaaagcgggcacaatgctgaagggttacaagacggatgaggacaagaaggtgaagcgactgtaccaccaacgctatcgcacagagtgggagaaatatccggagctctccagctggctggcgtctagtaatgacggttactcggcgcactgcaagatctgcgacatcaatgtcctcgccagactagcgtccatcaagcagcacctcgcaacgcggaaacaccagaatatgattaagggtgaacttgtcaaagatgagcatgacccagacttggaggcctccataatttcacccaaagcaaagcccaaagccaaatcaaagacctatccaaggcaaaagccaaggagcaaaatgcagccaaagatcaagaacgacacgaaggtggagagcatggaggaggagacggaggaggacgaaatcgcctcgaacgactcaatcctggatgatttactcagaacagatcagccctatcaagagcaagaatttgaggttgagaacgagttcctcgaagtacaacagaatgaaacagatctccaggaccaagaggtggtctacgaggaagagatgatacagctcaagccggaagatacggagattaataacgaataccaagtcgacgcgatgacggaagacaccattattagtgaatttgacttgtttggcaagagtttggctctgcagctgaacaacatggacctggaggacgcactaatgtgccaggagcgtctgcaggtggtcctaacggaatttcgcctgaaggtgctcaagcgcaagagagagcaagcacgatcttcgtag

SEQ ID NO: 18942 - protein, 260 aa, DROSOPHILA
MLKGYKTDEDKKVKRLYHQRYRTEWEKYPELSSWLASSNDGYSAHCKICDINVLARLASIKQHLATRKHQNMIKGELVKDEHDPDLEASIISPKAKPKAKSKTYPRQKPRSKMQPKIKNDTKVESMEEETEEDEIASNDSILDDLLRTDQPYQEQEFEVENEFLEVQQNETDLQDQEVVYEEEMIQLKPEDTEINNEYQVDAMTEDTIISEFDLFGKSLALQLNNMDLEDALMCQERLQVVLTEFRLKVLKRKREQARSS

SEQ ID NO: 18943 - DNA, 6998 bp, DROSOPHILA
acctccaccagcgccgggcaataaattttattgatttgtaaatttccatttcaagcgcagggcaatggtaattagcctggaaattatggcagcaggttaaaaagttaaagcgcttaccctattatacatatgtgtatgtccatcacaacaggatggaaagctcccacgaccagtagaccagcagacctgtctgctaattcgttggtcgggcggagtggttggtggttggtgaggtctaccaccaagttccagtccaaatgggaggcaagcacctgcagcgaaggtcgtccggaaaggatgccggaaattgcgtgattcccctaccacaaaagctacactggtttgaatttactacctagcatttgaaaaaaagatcgccaattcaaatagcaagatatttacatatattgcttaaattgagttgccgcatttaatttgaagatttcaatgcatcaattttcaaaacaggaactatcgaaaatatcgaattggattcgtattctagaaaggctttaaaaccatttgaaaatagttatggttaggtatttatgatatgatagttcctacagaaaaaaggacaaatgaattcgttacacaaaaatgaccgcccctttttttgaaaacagcacctatcgatatacagataacaaagttctgggtagttttccaagtgcagtgacagtaagattttcgtcacggattccagtggtcactctaacgatacgggcaatgttttcgcacaagtttatttgcgggtccttgaccaaaatgactgaaaccggcattacattcgatccgccggtgtacgagcagcgatattgcgccacaatccaaattctggaggacgcccgctggaaggatcagattaagaaggtcgtggagttcggttgtgccgagatgcgcttcttccagctaatgcgtcgcattgagaccatagaacatattggactggtaagagcttgacttcgactggtaatgaaacaggcacaagttgattgttaaggaaatacatttctagtttatttatttccgctgctgtttatacacgcatatcctagcttagatttgtattgtttttatgaaataaccattatctagttatattaaatactttttgaggagagtatgtacctggctgcatgaaatgtgggtgaaacgagtcgtacatgtggtctataatatggttgttgatagcctaacgaaactaacacaaaactcgaaaataaatgtaatatataaaaaatcatggatttcctatcaaggccaatggcgcactgctcctgtgcacctgctaaacatataaacatctcttacatctggggactactcgtacatggtataatggataattcaacaacatcttccctatggagctgagagtgccaatcaaaaaacctaatgtcaacttatcgataaaatgtttaaaaaccaaaattacacaacatgttgtcggtctcactagttcgtgtccatgcctcgcctgccgacaggtccgaagtatgattataagtaggatctgtcctgttcgttccttaattaccactaaaaatacttgaaagcgaatttagatttattcttttccgttccgttctgttctgttctgtttccatttatcgtccgacttcctaatgatccgtctattagtccctatttctaagtgtcatctggcaattatttgcgacagtgtctggacgagtggacactccgccccttgccgtagttgttctcgtcatcgtattcgccgtacaggttctgcacaacgagcagactcgagttattctccgcatcgtgctcgccgtgtttgggttcagtcttataaagagctctgcgcgtacggcctgacttcagctttcgctctccctcgccggtggccgatgccagagtggaattctccttgcgtgtggcgcagccacgtttgttactggccactgccgatagcggcgtagtgcggttcttgctaacggctccggcggccagtttgacgacgcccgagttcttgcccggacgacccactccgcgatggaccttcaccggcggctggttttggtggggctgggcctgcctgctggtggtttgcttccgagatgtgcccttgggacgaccacgcgcacgtttctgggaatgatcggagcagtcactgccctccattgatctatccgattcatcctgtgttaaataaataaactttattataatagctctattgaaacttcgccaaaaaaatcgtccaaccgaaatacacgttgctcatctttttttagctggttagataaatgcatatgcatattattttatgaatgttacctcgccttcggcgctatctgccgcctctccatcctcctcttgatcaatgtccattgcctcctggttctcctcttcatcgtcttcgtctgcgtcctcctcttcctcctcaatatgctcctggacaaccaaacccttttcgcgacgcctctgctccatgtctagtatcgcgtaagtgggtttaccttcatagcgccttggaagacgggattccagcgggcagatggtctcctcccgctcaaactccttcactgccctttcgcgggctatttgatcaggatcctgcgatagcacctccgcccacgaaaacttctttttcgtcgttttcttattcgacttggaacgcagattcttgggcgacacgcggttcgtaagtgagtgctcctggaacggagtgcttagcgttgagtttcgcatcacattcacggctgccttgttgttcagctcgaagatgtcacacttgctgccatccaccacgtccttggtggagacacaggtgcggaggatctcctcgctgctcaaacgcatttgacagggatcgtaacccaggcgctggtactcgcgcttaaagattttgcggtagcgctcgtagttgggtcgctcttggtatgccagctgaccgatctgtagcaggaactctcccagatatttaggaacttgcttgccatagaactgtcgcagcatctccggcacatccgtcataaacagctccttagcgcgatgcactttctcctgctgctgctgctgcgccacgtccttccacggcaaataaccctcggaccagtacaacaggttgtagcctaggcactccagatcacttcgtcgcgaatgggcacccaggtgggcgtcacgtgacgtaaactctagcgtgccgtcgtgcgcccttcgctgatccattataaaaggacggtgaactccgcgatcctggaacttagacgccaggccgaagtcgataagaaacacatgttcctcctcagtgggcaggaacttgtactccgtcgggttgttgtccaagtgcttgctgcccctgctgcgtagtttttgatcaccgttcggttccttctttaccttctcctggcggctagcccgcgtcgaaaccggcgtttttttcggtgtggctatctgagcgcttctgcctcttttaataacggagcgacgtgacgaggggggaataaattcatccgactcgttatcagacgattcaggcgattcatcactattttccgctgtttccttggggtaaccgtcttcgttaaactcctcgcgataactaatccgcttggtgggtcgcaaatagtgcgacttaaccatctcctcatacatggagttgcgcttttcacgacggcaggcgcgcactggattggagccgctgaactggattgcattgcgtgcggatcgctttttgttcactggagtgtggaagacgtctaggctgttgctattgttgctgtttgacgtggcgccatcatcgaagtcctcgtcgtcttcgtcttcatcctgcttaatatcgacaatcttttttagcgcgaacttttcgctcttcaggaagtagtcatcgtcgttggtctcctgctctgagctgttgccactgtccgtggtctgctgcttctcctcgtagtgatcctcgtagccattacccttgggcactacctgccttctaaggtacttgcacttggacaccattagattctgtgccttgatgtcattatgacagtaacccttgtcgtgcagattctctaggacattgatgatgtgtacggcaagcactaggagtgacttctgctgcacccttgagttcttgatcagcgagtgcagatcgcgatcgaagcgcggcaacactagaaagcggtagcgaacgtctccaaaatagtgggtgcccgacgcaataaagctgggaattccggagggcggtcccctgctgaggacatgcgtctgtggggctggcaggcttgcagcatcttctgcggcatctgataaatctaaaaaaaaaaactcgtgtaaggatacaaatgtgacaatgccgagtttttccaaagcataccattgttccgggatgtattgatcagacagtgaatctcaacaaacagaggcccatttgaatgcggctcaattttgaccacgtacttggctgtctccgagctggcagggcaaacagtgtcgtccgaggctaggaagatctcgccaaagttgccctttcctgaaacaaatggttggtttattcgatttaaaaacacaattgctccttttagtgcacttacctatgggtcggcccaagcgccaggccttggagagcacatctctcagaatggttccgttgaccaccgagggtcggagcgtgtagaccgggcgtggtgactccatcacactggagttgttgtgatcgctggcaatgctggctcccgtcaagagcagactgcgtgcctgcggggtgtgcagtagtgtggggggatcagcctcagtgccggcagcagatcctgccgaggagcaggactcctcatcgtcgttctcatggaactcgaagccattggcgctgctggaaccaccactcaagcgctggcgcttctcggcggccttgaccgcagaacgctttcgcttgcgtgcactgcgatccgtggtcgggcgctccaattggaggcgcttgcccatcgcggcagctggcgaggatccttgggcgattttcggtggcacttttcgtaagtttctgggatttaatactcacgcttaaaatattttgtttgttgttattgtatgcaaagattgatttgtttttgtgtgattccgctttcgattgtgattctcattcaactgctgatgaaagaagaagattaatggttgttagatatctatttttaggttatgagtccagtattgtggcatctattcaaactaaaactgataaatatgcgagggaatttcgttgttttgttttttttttttcgttcgcctcaagtctgcttttatcacatttattttcaattgtttgccgtgcagtgttggacaacgcgcgcgcgttagttattttaagtgtatgagtttagctcacgattacacggagtacgaccgagtactttttttattgcaaattgctctattgaaataagttgttcttgtcataataagtcatttcttgtttttactaaaattcatgagcatattttcgttcttccgttatgttgcagtgttgcaaagcgaactagcctggtgcgcgtccgggggcacgaatacaaacacaaacaaacgcgaacgcaccaccatgtctggaaacacaaacaactcgacatacaaacatgccgaggtcccgaaaaaaatcgattatctggccggcattattaaacaaagacttaaatgctgacacattttttcggttgctcaacgttctccctttgaattcaacgcttttcgtccgcaaatcatctgctaatgggctgaaaagtcgaattgatttttcagtatgtatttttctcacgtattactcgttctcttcttcttgtttttctacgttttcttttgacccgttccaagtgttcggatgtttttcactgttttcgtttggttgggcgcttgattcgcaatgcttacacttttcacttggtgcaatggtgtattattgcacactcacaacatgcattgcagtacaatttcgcttccatttggcttttcgtaacaattacacattcttcctgtgcactgctacggacacacacacacacagtcacgcagttttgtggtgtgaccgtagggagagatgtaaatgctgttttttagagtgactgtattatttaattgtgagaaagatgtattatcaacttaattgtattttatttaatatcaaaggcgaagttaacttattttaatttgaagtaatacaacatttcacaatttaaatagtttaaaccccttttttacaccgtcataagttatcaatttaatattcagtactgtgttgaattcaaatcttacattttgctcgttccattcccatatgtttccttgaaattacggttatttttaaatactcaatttactcgcaggtggacatcgacaagtccttgctcatgagaaacttaaccagcgttaatccactggtttccgattatatacggagtcgcgcgagtcctctaaaagttcaaattctgcaggggaatgtggctgattcttcggaagaattgagggacactgacgctgtaatcgcaattgaactgtaagtttcttattgtttaaaccccatccattttaaattattacttttcacatttgaacacaaaaactatttaatgtttttcattgcagaatcgagcacgtttacgacgatgtattggccaaaattccagtcaacatttttggtttcatgcagccgaaattggtagtcttcagcacaccaaactcggacttcaacgttatatttacgcggttcaatccgctgttgccaaatggttttcgccacgaggatcacaagttcgagtggtcacgcgatgagttcaagaactggtgtttgggcattgtggagaagtacccgaattatatgttttccctaacgggagtgggtaatccgcctaaggaatacgagtcggtgggccccgtttcacagatagccatattcgttcgcaaggatatgctggagatgcagttggttaacccgttggttagcaaacccaatatcgataaggaatcaattccctacaagctaattcataccg

SEQ ID NO: 18944 - DNA, 3963 bp, DROSOPHILA
tccgtagcagtgcacaggaagaatgtgtaattgttacgaaaagccaaatggaagcgaaattgtactgcaatgcatgttgtgagtgtgcaataatacaccattgcaccaagtgaaaagtttgaatgagaatcacaatcgaaagcggaatcacacaaaaacaaatcaatctttgcatacaataacaacaaacaaaatattttaagcgtgagtattaaatcccagaaacttacgaaaagtgccaccgaaaatcgcccaaggatcctcgccagctgccgcgatgggcaagcgcctccaattggagcgcccgaccacggatcgcagtgcacgcaagcgaaagcgttctgcggtcaaggccgccgagaagcgccagcgcttgagtggtggttccagcagcgccaatggcttcgagttccatgagaacgacgatgaggagtcctgctcctcggcaggatctgctgccggcactgaggctgatccccccacactactgcacaccccgcaggcacgcagtctgctcttgacgggagccagcattgccagcgatcacaacaactccagtgtgatggagtcaccacgcccggtctacacgctccgaccctcggtggtcaacggaaccattctgagagatgtgctctccaaggcctggcgcttgggccgacccataggaaagggcaactttggcgagatcttcctagcctcggacgacactgtttgccctgccagctcggagacagccaagtacgtggtcaaaattgagccgcattcaaatgggcctctgtttgttgagattcactgtctgatcaatacatcccggaacaatgatttatcagatgccgcagaagatgctgcaagcctgccagccccacagacgcatgtcctcagcaggggaccgccctccggaattcccagctttattgcgtcgggcacccactattttggagacgttcgctaccgctttctagtgttgccgcgcttcgatcgcgatctgcactcgctgatcaagaactcaagggtgcagcagaagtcactcctagtgcttgccgtacacatcatcaatgtcctagagaatctgcacgacaagggttactgtcataatgacatcaaggcacagaatctaatggtgtccaagtgcaagtaccttagaaggcaggtagtgcccaagggtaatggctacgaggatcactacgaggagaagcagcagaccacggacagtggcaacagctcagagcaggagaccaacgacgatgactacttcctgaagagcgaaaagttcgcgctaaaaaagattgtcgatattaagcaggatgaagacgaagacgacgaggacttcgatgatggcgccacgtcaaacagcaacaatagcaacagcctagacgtcttccacactccagtgaacaaaaagcgatccgcacgcaatgcaatccagttcagcggctccaatccagtgcgcgcctgccgtcgtgaaaagcgcaactccatgtatgaggagatggttaagtcgcactatttgcgacccaccaagcggattagttatcgcgaggagtttaacgaagacggttaccccaaggaaacagcggaaaatagtgatgaatcgcctgaatcgtctgataacgagtcggatgaatttattcccccctcgtcacgtcgctccgttattaaaagaggcagaagcgctcagatagccacaccgaaaaaaacgccggtttcgacgcgggctagccgccaggagaaggtaaagaaggaaccgaacggtgatcaaaaactacgcagcaggggcagcaagcacttggacaacaacccgacggagtacaagttcctgcccactgaggaggaacatgtgtttcttatcgacttcggcctggcgtctaagttccaggatcgcggagttcaccgtccttttataatggatcagcgaagggcgcacgacggcacgctagagtttacgtcacgtgacgcccacctgggtgcccattcgcgacgaagtgatctggagtgcctaggctacaacctgttgtactggtccgagggttatttgccgtggaaggacgtggcgcagcagcagcagcaggagaaagtgcatcgcgctaaggagctgtttatgacggatgtgccggagatgctgcgacagttctatggcaagcaagttcctaaatatctgggagagttcctgctacagatcggtcagctggcataccaagagcgacccaactacgagcgctaccgcaaaatctttaagcgcgagtaccagcgcctgggttacgatccctgtcaaatgcgtttgagcagcgaggagatcctccgcacctgtgtctccaccaaggacgtggtggatggcagcaagtgtgacatcttcgagctgaacaacaaggcagccgtgaatgtgatgcgaaactcaacgctaagcactccgttccaggagcactcacttacgaaccgcgtgtcgcccaagaatctgcgttccaagtcgaataagaaaacgacgaaaaagaagttttcgtgggcggaggtgctatcgcaggatcctgatcaaatagcccgcgaaagggcagtgaaggagtttgagcgggaggagaccatctgcccgctggaatcccgtcttccaaggcgctatgaaggtaaacccacttacgcgatactagacatggagcagaggcgtcgcgaaaagggtttggttgtccaggagcatattgaggaggaagaggaggacgcagacgaagacgatgaagaggagaaccaggaggcaatggacattgatcaagaggaggatggagaggcggcagatagcgccgaaggcgaggatgaatcggatagatcaatggagggcagtgactgctccgatcattcccagaaacgtgcgcgtggtcgtcccaagggcacatctcggaagcaaaccaccagcaggcaggcccagccccaccaaaaccagccgccggtgaaggtccatcgcggagtgggtcgtccgggcaagaactcgggcgtcgtcaaactggccgccggagccgttagcaagaaccgcactacgccgctatcggcagtggccagtaacaaacgtggctgcgccacacgcaaggagaattccactctggcatcggccaccggcgagggagagcgaaagctgaagtcaggccgtacgcgcagagctctttataagactgaacccaaacacggcgagcacgatgcggagaataactcgagtctgctcgttgtgcagaacctgtacggcgaatacgatgacgagaacaactacggcaaggggcggagtgtccactcgtccagacactgtcgcaaataattgccagatgacacttagaaatagggactaatagacggatcattaggaagtcggacgataaatggaaacagaacagaacagaacggaacggaaaagaataaatctaaattcgctttcaagtatttttagtggtaattaaggaacgaacaggacagatcctacttataatcatacttcggacctgtcggcaggcgaggcatggacacgaactagtgagaccgacaacatgttgtgtaattttggtttttaaacattttatcgataagttgacattaggttttttgattggcactctcagctccatagggaagatgttgttgaattatccattataccatgtacgagtagtccccagatgtaagagatgtttatatgtttagcaggtgcacaggagcagtgcgccattggccttgataggaaatccatgattttttatatattacatttattttcgagttttgtgttagtttcgttaggctatcaacaaccatattatagaccacatgtacgactcgtttcacccacatttcatgcagccaggtacatactctcctcaaaaagtatttaatataactagataatggttatttcataaaaacaatacaaatctaagctaggatatgcgtgtataaacagcagcggaaataaataaactagaaatgtatttcctt

SEQ ID NO: 18945 - protein, 1004 aa, DROSOPHILA
MGKRLQLERPTTDRSARKRKRSAVKAAEKRQRLSGGSSSANGFEFHENDDEESCSSAGSAAGTEADPPTLLHTPQARSLLLTGASIASDHNNSSVMESPRPVYTLRPSVVNGTILRDVLSKAWRLGRPIGKGNFGEIFLASDDTVCPASSETAKYVVKIEPHSNGPLFVEIHCLINTSRNNDLSDAAEDAASLPAPQTHVLSRGPPSGIPSFIASGTHYFGDVRYRFLVLPRFDRDLHSLIKNSRVQQKSLLVLAVHIINVLENLHDKGYCHNDIKAQNLMVSKCKYLRRQVVPKGNGYEDHYEEKQQTTDSGNSSEQETNDDDYFLKSEKFALKKIVDIKQDEDEDDEDFDDGATSNSNNSNSLDVFHTPVNKKRSARNAIQFSGSNPVRACRREKRNSMYEEMVKSHYLRPTKRISYREEFNEDGYPKETAENSDESPESSDNESDEFIPPSSRRSVIKRGRSAQIATPKKTPVSTRASRQEKVKKEPNGDQKLRSRGSKHLDNNPTEYKFLPTEEEHVFLIDFGLASKFQDRGVHRPFIMDQRRAHDGTLEFTSRDAHLGAHSRRSDLECLGYNLLYWSEGYLPWKDVAQQQQQEKVHRAKELFMTDVPEMLRQFYGKQVPKYLGEFLLQIGQLAYQERPNYERYRKIFKREYQRLGYDPCQMRLSSEEILRTCVSTKDVVDGSKCDIFELNNKAAVNVMRNSTLSTPFQEHSLTNRVSPKNLRSKSNKKTTKKKFSWAEVLSQDPDQIARERAVKEFEREETICPLESRLPRRYEGKPTYAILDMEQRRREKGLVVQEHIEEEEEDADEDDEEENQEAMDIDQEEDGEAADSAEGEDESDRSMEGSDCSDHSQKRARGRPKGTSRKQTTSRQAQPHQNQPPVKVHRGVGRPGKNSGVVKLAAGAVSKNRTTPLSAVASNKRGCATRKENSTLASATGEGERKLKSGRTRRALYKTEPKHGEHDAENNSSLLVVQNLYGEYDDENNYGKGRSVHSSRHCRK

SEQ ID NO: 18946 - DNA, 2563 bp, DROSOPHILA
taaattaaatgcttttaaaaaaaaagtctaataaaagatatatcgttttataacgtattaataataaagctcatatcatatttaacgatccatttccatttatagaagtcatggagagtccacgctatggtacattgcgcagacaaaaagctaatgcaccttcgcctcctaccaccaatggaaatgggataattatgaccacatcacagacttcgcaccgaccacatgcaaaggagctgttcccgcagcagacgccggaaaagcaggaaaagcccgccaagccgccgctgccgaatttgccgcagtttcagtcgccagctgctagtcagccgacgcagacgcagctggaaccactgcctccgccgcctgtaacgccagccaagcctgttccgatgacgcggacacagttcttcgggctggacaacctgccctctccaacggccgatcgcaagagcaccgacagcattggcagcttcaagctgaagccagatgtgccgcagaagcctctgctgcccaagcgacccaccgtgctgggcgtgggagtgcctaaggcagatggaaagagcgatgatgagggcggtaccacgcccactcaggcaacaattgataatggcaatggcagtgtgcgatttaaaacggagcattttctggacaagctgcgtcaggagaacggcgagacaaacggaacgcgagaggtgtcgtcgacgacaaaggaaaacaatcacaaccatgatccgcctgctacggctgcagatcaaaatcagcagcaagctcagccccaagtcacgacacccatctctccgaactcatttcaaacgcccaagaggccaacggtgccagcgccgccaccgcccacaaattggaagtcctcggactagaggggaatgagtagagaggacgcgcaatggaaacgtggtcagagtcattaggtgttactgtttactcgttaagacttgaacgcacagtaatatatatatatatttcgaaatgatccttgcggtaaggagactttgtgcattatagagagaaaagcctctgcgtattatgcatttgtatttttgccttgttcataagcaatctaatttgtacgtgtttagccatatataacaatatcacgcgatatccataacgtatatgtatgcatatatagtctttagtaggccaccataaatcaattgtcgaaattcgatttgttagcccaagccagctctcaattgttaatccttgtttgaaaggttgtgatacttcagaaaggttttgtgtttccttaattttttgcattgctcttgagtacgttttgttaacttctccaacgaaagacattgtgatttccttttattaaaagttatgatttcgattaaattacagaaattacagaaaattccaatgtattattcaactcacgaagtacattttcattgaattatcatttcgctgcgcgatgtactttactttgtatctttgctttattaatttgtaatgcaattattattatttttattttataataaaattatgtatgataaactgttgtgtatataaaatatacataaaaagataaatatgattttgcccgagaggcatttgtctttgtattttattgtttgtgaagttaattttacgaaattggctaaagagtgggtgcgcgtagtgtatgttagaatgtggatctcttatgaaattggtaatacctagctcttaatcacatactgacctccttaaatcaaatgatacttaagatatcttcagctttgtggtatcttcaaaactctacactttgtgccacaaaacgaatacctgaacacaagcgatttgtagacagcacttattataaaccaaatggcataacttccaagtcaaatacctaactactttatatctccatataactatttttcacgagatgcttcagatgcaaactagcaatgaccagatctggattgaatagagcttacttacagaccaaatcgatatatattccatgatatttatagagattagtatgtttataaagttttgtgaataggttagtaagtgagctaatgctggagacacacgaatatattctgcaaacatttaaataaaaaagctgaaaaccacaagttggataaatatttctattgttgttcataatggtgggatacaatgtagaattcgaatgtagagagcaagacaattaagtatgcaatacggttagtaagatattttattctacgaaactcatataaaacacactaagtataattgataccatatataattaattataggatgggctatcttatgttgctcgtaactaggcaaacatcgaatggtggtagagtgccggtaatctccaagaatcgtcgaaggatgtggcaataggtgtttcccatgggcggagattcagttccttccgccggaattctagccacctcgtccggagtgtccagctccctaacataatccataaagttgtccacattgatgggtgtctctgccctcgtctttgctggttccgtctgcaactttcgctggaactcacttctgtagtagtcgttgatcatggacatcatccccttgg

SEQ ID NO: 18947 - DNA, 563 bp, DROSOPHILA
atttatctttttatgtatattttatatacacaacagtttatcatacataattttattataaaataaaaataataataattgcattacaaattaataaagcaaagatacaaagtaaagtacatcgcgcagcgaaatgataattcaatgaaaatgtacttcgtgagttgaataatacattggaattttctgtaatttctgtaatttaatcgaaatcataacttttaataaaaggaaatcacaatgtctttcgttggagaagttaacaaaacgtactcaagagcaatgcaaaaaattaaggaaacacaaaacctttctgaagtatcacaacctttcaaacaaggattaacaattgagagctggcttgggctaacaaatcgaatttcgacaattgatttatggtggcctactaaagactatatatgcatacatatacgttatggatatcgcgtgatattgttatatatggctaaacacgtacaaattagattgcttatgaacaaggcaaaaatacaaatgcataatacgcagaggcttttctctctataatgcacaaagtctcctta

SEQ ID NO: 18948 - protein, 101 aa, DROSOPHILA
MSFVGEVNKTYSRAMQKIKETQNLSEVSQPFKQGLTIESWLGLTNRISTIDLWWPTKDYICIHIRYGYRVILLYMAKHVQIRLLMNKAKIQMHNTQRLFSL

SEQ ID NO: 18949 - DNA, 2486 bp, DROSOPHILA
atttgagtcaggactttactccgtttcgatttactccgttttaatctcaatcttaatctcaactctctaggatctattgtttctgagatcccgacatttatacggacggacagacaggcgtactcggctattgatcctgatcaagaatatatatactttttatggtcggaaacgcttccttctgcctgatacataattttcaacgaatctagtataccttttactctacgagtaacgtttataaaaattctatccatttctcatacctcgatgttttgaaaaaatgcagtgctgccactacgatcgaaatgcggtcacactagacagctgattttttccaactggaagatttgctttgcacactggacaaaggaaatgtcccatttgtcggcttatccagcatatacgtcagtctaaacatggagaaaagctgcagtattggcaacggacgggagcaatacggctggggacatggcgaacaatgcggcacgcagttccttgaatgtgtctacaggaacgcgtccatgtactctgttctgggcgatctgatcacatacgtggtgttcctgggggctacgtgctacgcaatacttttcggcttccgactgttgctgtcctgcgtgcgaatcgtcctcaaagtggttatcgccctcttcgtcatccgattgctgctagctttgggctccgtcgacatcacatctgttagctattccgggtgaagtgaccaatctggcgaatgccatcgggaccacggcctttaaactacattaactaaatcaaatataaattccaaattgaagaacactgtaaattacattaaacggtttgtcattaattcctttgttaaagagcacttgccaacattaaagcataatattttatttaattaacccaacagaacaattgctgactcttaacatgatcagctaactatctcaattgaaatgttgattaaacaaaaaatttaagctttaatttcgtcatggtaagttgatggtattcatttatcctcacaccactcgttctccttgcgcacctgttcctcctcctgtggcagaaagtcattctggatggcgaaggtgtcgcgaatagcctgcggcgacttgcccttgatcatattggccaccgtcttgcaggtgacgtcgagcagaccctggatattcaggtagtttgccgcgaggatcagttcgaacagcgtgccctggtcgactttgagaaagtcagcgtcccaggatgagatgtcatcagtgcgcttctccttgttctcaacctcttcggtaaccacaggatcgtccttgtgataggtggcccagtggagcactttcttcaggatcagcgagttgacattcggcaacggcagcacactgttgtcgctctcatcgcccaaatcctctattgcaatgcgaatcgtttccgagcacttggcgatctcctgatccgtgtcaaagatctccttgtccgcagactccagccgaatgatgggcatctctgcgtaaaaatttttatttttgcttatatctatattttcaattttattcgtacacacctcctgctgatttggatcccaagatttgatacgaaatcggtttgatttatttgcagacgcagccaaacaaaatttttagacacaacacgatgtcacttagctgtggcctactggctaaaaataatattcccttgccttcaacttgaaccggactggtgcggcggccgcctgagaacagagcgtttgttaaataaagaacttggctgccaataattccccggattcttagaaaactagaacgtcgtacgatttgaagaggaaatttgttagtgaaacggccgccagtgtgcacatactcggaatggctttaaaagatggcgcctattacagttaatggtgtggagacactgtgacagctagcggtaaacaaaagctcagttatatttttttataatgtatatatatatattttttttaaacatatatattttggcacaattcaagcgtgctgggcgttgtattatttaaacagaaacctacaaaattctgcctttatagttagtttttatcctgtttttatttaatgaatttcaaatttcaaatatttttgtaaacaattttaagctaggccaagggtttgtgtcgcggctagtgcaagcagtcaacttgcggcattttttagtacatttccctctgtgctgggttatatattcgcaggctatactccacactgcttccagcggaatcgtcaaaaaaataacattaaaatcgccgtgtgcataattagaatatttccgaatagtaatcgcccgtgaaatcgctaattagcggtcagcacttgcgccagttaaagaaatcgcggcaccggcagtgggccaaaagaacattttttccggctgaaaaaaacaggcggcggcgtcgacacgcggaccgaaccaaaggatccgaagccatccgatcagatctaatccgatccggagaaaattccaggacactaagg

SEQ ID NO: 18950 - DNA, 486 bp, DROSOPHILA
atgcccatcattcggctggagtctgcggacaaggagatctttgacacggatcaggagatcgccaagtgctcggaaacgattcgcattgcaatagaggatttgggcgatgagagcgacaacagtgtgctgccgttgccgaatgtcaactcgctgatcctgaagaaagtgctccactgggccacctatcacaaggacgatcctgtggttaccgaagaggttgagaacaaggagaagcgcactgatgacatctcatcctgggacgctgactttctcaaagtcgaccagggcacgctgttcgaactgatcctcgcggcaaactacctgaatatccagggtctgctcgacgtcacctgcaagacggtggccaatatgatcaagggcaagtcgccgcaggctattcgcgacaccttcgccatccagaatgactttctgccacaggaggaggaacaggtgcgcaaggagaacgagtggtgtgaggataaatga

SEQ ID NO: 18951 - protein, 161 aa, DROSOPHILA
MPIIRLESADKEIFDTDQEIAKCSETIRIAIEDLGDESDNSVLPLPNVNSLILKKVLHWATYHKDDPVVTEEVENKEKRTDDISSWDADFLKVDQGTLFELILAANYLNIQGLLDVTCKTVANMIKGKSPQAIRDTFAIQNDFLPQEEEQVRKENEWCEDK

SEQ ID NO: 18952 - DNA, 3381 bp, DROSOPHILA
tatacgcatataacatatatatttattaatgttaacatatggtacatttttgatctaattgtttaaaatagccaaccagcagcaacagttaaattaaatgtagcttaaaacccaaatgctcaataatccctttagcttgaaaactaaatagccagccgtaaaaatgttatacaaatcattaaatgcatataaagccaattttaaagtctacaacaaacctgagaaacttgagatcttaaatgaacttcatttttaaagtgcttcaactttttcgggattgtaatagcttgcgtttgaattcaactcacaatttagtcgggtgaaaagcctaattacttaattcttttactagaaaaggagaaatatattagaattattaacggctgtgtcaagttgccaaatatctgccaacatttgtttgtaatattcttaattaattctttagcctttttttctagctataaagttagatttgacatcactgtcgggtgccaacggtattttgaaagtattttttcctgttcacttgggtatatttcgacggtacagctgcggtcacacaattaaaagtgactggcatcatttagcaacaaaaaacgcgaatagcgtcaaaaacattgttttatcgccgttggaattaataaaagcacacaaaatgtctgccccagataaggaaaaggagaaagagaaggaggagaccaacaacaagagcgaagacttgggtctcctggaggaggacgacgagttcgaagagtttcccgccgaaggttggacgcaataatgtggtggtacatcggcagtttctaatcactttcattgtagatttccgcgttggcgacgacgaggaagagctaaatgtgtgggaggacaactgggacgacgacaacgtggaggacgacttcagccagcagttgaaggcccatttggagagcaagaaaatggaaacgtaaaccggcaccgacccctttgttcagtcctaaccataaaaacgagctgagctgttttgcattaatagaataaaatcagtatattaagtggaattcatctgccagttttgtccgagaacctcatggatttgctcatttaatatggcatatagctgatcttgctccaaattttgctggtctagctcgatcaagtgattattcagatcctccagacgtttcttgcgatcctcaacatcgacctgcagctttttgagttcattttgcaccttgtgattctcggcatcgttttcctggtttctttcctcgtaccgatgtgcacaaagagcgagttcctgcttcttggcctctgcatcctgaaggagcttctgataattaactttacaggtgggcaactgcttttccactgcctccagctgcttgaagctctctttgtaatcatccaccttgcacagcgaaagcacagccgtggccttctccaaagcggtggctatatgttgactgttttcgatcatccggcgatgttcattcgtcacctgttttttactggccagctccgtcttgcagctctcgacatgcgacgatgcgctcttaattttcctacaatgtttgacattaaaataagcacagaatctaggcttgcccgacagcacttactctcgcagctctgtcacttgactgtcctccaccactagctgttcccagtgaccgatgcgtttgtccagctcaccctgctgctgctcaatgagttccagagtgttttcatgctcgctacaggacttcttcaaaggtagaagctttgcttgagtatcctgcaaatctttcttgagtttgtttatggccacttcgcaatccttcgtcttctggctgcattgctccagctgttgacttttggccttcacctcggcggtcagcgaatcctttagcttaatggcctcctctacaggtcccagcaccttctttttgaacaccttgtagtaggccagatggttgaaaaggtagctcagcgtggcgagcgtttttttaacagctaatagccaaagaattgtttaataataattgcttattgtaagaccggctgccggctcacctggtttaattatgtccatataggtgtacgtcttgttgggaaagctgatctggacgatgcgctccacttggcggcacactcggataagaaagacgcgcgcctcccgcgacgagtgaccgagttcggtgccaatcttatagggcggctccaggcgaaagccgaaactccgcagatagtgcaccatgatcttggtgacaatgggctcggtgggattggccaagtcgctttggcagatattgatgtcgggcatcaggcagttgccctggtccattaccctttcaatttcgactgataacgccattcaatccagagttttaatttttaatggcagtttttgaatggaacgccgctaagggatcagattgatgtgaccaaagcttgctagccccaaaaaaccactaaaatactaactcagaatttatgtggttttcacacctatagtcctacagcagattctcgggtttttttatccggttttctttcccggcagctagaaaatactgcatttgttcagcgcaaacttaaaaagtaacggaaaatctggctaaagttactaagttacattttttattggtgagtgaaaactctggcttcctccagcgctgcaaaagatgatgctaaaaatctgatatgcccgtacggggttttctccaaaacttggccaaaaaaggtggcacagcgaaaataaagactgttttgtactgctaataaacatacctaactatccctatcactagttttttgattttccaaaaataaaatttttacaaaatttcgcatttttgataaggggtaccctcatcaaaatttgcaaaaaattgaagcctcttggatctttcaggtttcaacacatatggatagggaattaagttacgaactcaacgagatatgacattccagttttggacaactattcttattgctattgcaaaaaaactcgttatttttgtaaccaaaaaggaacgaaaagaaattttgtcaaaaatcgtatatttccaatcgctgatttctccataacttggccaaaaaggtggcacagcgaaaataaagactgttttgtactgctaataaacatacctaactatccctatcactagttttttgattttccaaaaataaaatttttacaaaatttcgcatttttgataaggggtaccctcatcaaaatttgcaaaaaattgaagcctcttggatctttcaggtttcaacacatatggatagggaattaagttacgaattcaacgagatatgacattccagttttggacaactattcttattgctattgcaaaaaaactcgttatttttgtaacgaaaaaggaacgaagagaaattttgtcgaaaatc

SEQ ID NO: 18953 - DNA, 1264 bp, DROSOPHILA
gcgttccattcaaaaactgccattaaaaattaaaactctggattgaatggcgttatcagtcgaaattgaaagggtaatggaccagggcaactgcctgatgcccgacatcaatatctgccaaagcgacttggccaatcccaccgagcccattgtcaccaagatcatggtgcactatctgcggagtttcggctttcgcctggagccgccctataagattggcaccgaactcggtcactcgtcgcgggaggcgcgcgtctttcttatccgagtgtgccgccaagtggagcgcatcgtccagatcagctttcccaacaagacgtacacctatatggacataattaaaccagctgttaaaaaaacgctcgccacgctgagctaccttttcaaccatctggcctactacaaggtgttcaaaaagaaggtgctgggacctgtagaggaggccattaagctaaaggattcgctgaccgccgaggtgaaggccaaaagtcaacagctggagcaatgcagccagaagacgaaggattgcgaagtggccataaacaaactcaagaaagatttgcaggatactcaagcaaagcttctacctttgaagaagtcctgtagcgagcatgaaaacactctggaactcattgagcagcagcagggtgagctggacaaacgcatcggtcactgggaacagctagtggtggaggacagtcaagtgacagagctgcgagagaaaattaagagcgcatcgtcgcatgtcgagagctgcaagacggagctggccagtaaaaaacaggtgacgaatgaacatcgccggatgatcgaaaacagtcaacatatagccaccgctttggagaaggccacggctgtgctttcgctgtgcaaggtggatgattacaaagagagcttcaagcagctggaggcagtggaaaagcagttgcccacctgtaaagttaattatcagaagctccttcaggatgcagaggccaagaagcaggaactcgctctttgtgcacatcggtacgaggaaagaaaccaggaaaacgatgccgagaatcacaaggtgcaaaatgaactcaaaaagctgcaggtcgatgttgaggatcgcaagaaacgtctggaggatctgaataatcacttgatcgagctagaccagcaaaatttggagcaagatcagctatatgccatattaaatgagcaaatccatgaggttctcggacaaaactggcagatgaattccacttaatatactgattttattctattaatgcaaaac

SEQ ID NO: 18954 - protein, 378 aa, DROSOPHILA
MPDINICQSDLANPTEPIVTKIMVHYLRSFGFRLEPPYKIGTELGHSSREARVFLIRVCRQVERIVQISFPNKTYTYMDIIKPAVKKTLATLSYLFNHLAYYKVFKKKVLGPVEEAIKLKDSLTAEVKAKSQQLEQCSQKTKDCEVAINKLKKDLQDTQAKLLPLKKSCSEHENTLELIEQQQGELDKRIGHWEQLVVEDSQVTELREKIKSASSHVESCKTELASKKQVTNEHRRMIENSQHIATALEKATAVLSLCKVDDYKESFKQLEAVEKQLPTCKVNYQKLLQDAEAKKQELALCAHRYEERNQENDAENHKVQNELKKLQVDVEDRKKRLEDLNNHLIELDQQNLEQDQLYAILNEQIHEVLGQNWQMNST

SEQ ID NO: 18955 - DNA, 16648 bp, DROSOPHILA
ttaatagtgtttgaaggacatctaattgaactgattttaagagcaaacatagtcttcttatataatttgtgcatttttaattggaatcatttaaattcttattttggagcgtaaacatgattgcaacactcttttatttgcttgattttattggttgcgggattgcgagattgcaaatggtcatttattgcattttatttctccatttctcgtggctgaagctgaatgattttttaccttcagctgcccacacgtggcccgcattttcctgatcccccccaaccccctctgacccagagggtcatggtttatttatgcaattttccaattttcccaacatcggcccacaaataaaaccgaaatgaaagcatacaaaatgcagcaaagagctgggaatttaaaaaaataaaaaaccaaaaatgtatatgaaaatgcaatttgcaaattaacaacaacgcaattgtaaacaacagtgacaatgacgtcacagtgaaacatacaacagaaatctattcgttgtggggttaagaatgcaacttttggcgtttgcacacatactaattatgcgcataaactgtgtattcaaaactagggtcattttgaagcaatattcaaatgagccaaaaagaatatttcaacaaatgtatctgcacactcggagttttttttctgctgtttttccgctgtggaaaaataatcatcgatgctgcggcttcagtggggcagcgccaagagcaacaaatatttaaatatatttattattctgaataggcgtgccagcgtgtgtatatgtatcccacatacgcatgtctgcacatacttcagatatatttttaaaaaatcaaaacgacaatttgctgcttgcatcattttgaaatacaacagaacttgaacgtcgacgtcgacgtcgccagcggcagcggcagagatcgtcgatcggcgagcgaaaattttcggcagctgcaggcagcgccactcgatcgtaccgcttagtgccacgccgtgtctcagagcgcccaggccacgggcccccaaaccgtaccgctgcggaaaatcgatcttgaaaatatatacaatacaaaaaaaaatctaaaactctagcaccggatatattatagtctaagactacgagaattgcccacttcattgggaaagtgcgtgaaaatccgaacattaccatcgaccatctacaccatcatcagcatccgtcatgcaggtcttcgataacaatatggtaagtgaaatctagcctgcggcaaaaaagccatttgtggccatgtttacgcaggccaaatttattgtcgccacgtttgtgtataccttatggcacacttagcccagttagcttaacccagaaatgccaatacacaaactccagtctggcataaccacgcccattttggccgcagaagaaaaggatatcctttggcggcaacgaaggagcagaaaggcaggaagtcatgcggtgttcagaacgggccgccaaattaattacaaaaattcacttaatggccacgatccaagtgggtcaacgtacgtgcgagccactagaaattgaaagatgcaaaatgctagatgcaaaatgctagatgtaaaatttaagtgttccgccagagacttgtcaaaattctaccgcctgcctgggattttaagtgcaacttaaatggatgtagtaatgttataatgactacattataatcagatttgcacaataaaagtcttgacattgaggcaaacgattatgaacattccacaagggattggattttttccaaacgaaatacacatcaaatacattttcatcatgaaaatacagtgcgagtatttttgcaatgccagaactttccattccatttgattcggccgcatcatctaaaaataaatatccatatctttattaataataaaaataagcttggagacatataccgatttcttggcagctgagcgaccccattaagtacataaatcgtacataaatacacataaatatagatatatctgaaccggcagcaagtgcatatatgtatatgtacatacatagatcggatcgaaattgtcgcccatatgtaggccacttacagaatggcggcattagtcacatataatactcacgtatctgtggcaaactaagtcccaaaattggtggcaaggtcgccggatgacgaaagcaatccgaaatgacatggtcgatttccttttaatattccagacagcactaggaggtataaatagatccggcgattttacaaatccggcgaaggaaaaatagtcgaagcaaccgaaatggaattgctttattttcaggccgaataaatcaattggcttctgtatttatgcagatgccaccatttgattatttcgcactgtcgttgatttatggccaatggccaaaaggggctgccaagggtgccctcttgccagccatttttcccacacacacaaccgaccgattttccagtggctttcccacactttttcgagagtattgtgcacgtcatgtgtaattgctatacgtcaatgtcaatgtgtgggttagcgtctgataaatgcaagcatatgtatatgttggtgtaagtgcttgtggtcgtttccggatcctgtggctgcaattggttagctttaatgaaatgcccgatgatatattgttgggcaaatatgtgctcgaccatttcatcagccattgaattcgaacattgagcagaagtattatcgatttcaacgagcaccaaatcggaagtcctgagtcaataaattgtatggattgcaaatggcaaaagattttcatcagcttttctcgattggcgggcaacagattgccgctcagagttttccagcgaattcccgactaatccaaataaaacttcacagcttccccgacaattccggtaaactcaggacacctgtcaagcagaagaaagcactcaatgcaattctgggaatatttccaatcggatatctttgattttccgctatggaaataaaaacaatgagtgcgtgcaataatttgcatattcaccttatttattgatcaaaacacaaacaaacgagagctgccacaattgtttaaatatttcccaaacaaacaaggcgcagctattttgtctggctatttatagagctgaaaactgaaatgctaaatgcgctgcaatgaaatgaataattaaattggcatatataccaccgtgattaatatctatctatgtatctatatatcttttatcctttagcgccgtgcctcgcgacgcgcctccttgcgacgaggatccatatcggcactgccgcagaagtcgcacgagattccctgggacatattcgagcgactattcatgcccttcctgttctgccaggcggcggccattgtcacatcgcacctgctccacgccctggacatctcgagcatctcgaccttcgccgtgttcgtctggttcgctctggccaccgtgggagccgtgctcttctatcacttcgtcaaggtaagtcatcccgcttggcagactttctaatccttaattctggcgaaaaccgcataagggatcggagtgtcttgggcttgggcctgggattggtattggacttggggttttcggtttcggtttcagcgccacgggcgtccataagttaggggctctgtctgccgggaacggtctttatttttcccttccgttttggccgggtacaagtgccaagccaaaaccacaagtgacgacggagggtctcaaatactaggcaaaacaaatcagtggcactaaaaatagtcgtcgggccagcaaagaatccatatacacaaggcggcggaaggagagggtcctgcggcaggcacgtcgtcaacttatgcttaaccaggccgaaggggaaggaggagctggtggagcagatgtagcaggaggatgcacaggaaacccttgactatggatttggcttcggatttgcctgcgtgtggtatttcagggcttatactgtgcctggcagccagccgggaaatgaaaatgaaaacaaataaataagcaggcaggcagagcagagcagtcctggtgggcaaacccgagcacaacttgctgaaagaaaagggtttggtaatgaatataaattcgcaagtaggaaaaatgtggagtcgtgattcacttgagaccagccgaaaattgctccgagtaggagctatctagtaaattgttagtcatttcaatctactttcgaactttcttagactttaaggctgcggcagacagtcaattatgttaaagggcgtctttaaagtagtcagtcgttaaaatcatcaaaagatacttcaaccactaacaaacaaaacaccttagttaacttagatatttattagaataaactatcaattacttaagatagttaggcatttagtgaacgctcctcgcaatcccattattcaggcgtataatttccagctttacaacctattctttgtgcataacttaatccaccaaatgccgagtcattgccttcctctagtttcagttacttccatgattcgatattaaatattaaaagccttggaggctctatttcaacatcctgtttgctggcgccttgctcaattaaacttctaagcagctcaaccgaaatgcccctcaggtcatgtgtgtgtgtgcccccccccccctcataggattatttgccctaatatcctcgcattaactgcgcaaattaccacaatgcgtatacgcaaagccatcaaatccaataaggttatctctcgatttcgcaccatttgcctcgttgcacatccatgaccatcaccaatggcatcgacgaagttggcagataattcaaatttgcctgcactttaattagcctccttttggagctgggaacgagatgggagtagtgacactggccatttgctgcctggcaattacaggtggataagagttccgagcaccgtgtccaacattcgtggcacgtaaccatcgtcctgtgcctgggcactgcgtatccgtatcggacggacggtggacagggctgcaggtgccaggatggcattgtcctggcaattgcaggctgcttgtgctgcactcaacgcgatgcgcaacccgacattaaggtaataagcacgacggcaggataattaacagcaacggtagcagatgcaaacccacaaaacggggacacggcaactggggggcaggactcagctgtcttgtttcaccaaggatttgtcaaggacaatgccaggcacttcctcgaaaataggaaaaacccattaaatgaacgataaaaaaattagttgattattccgtgggatttgtacttggcagctctttctgctttctttggaatttataaaaaggtttcttaaaatagttatatattgttttatgttgattgcagtatttcgtatttgacaaatggttttattcaatacatattacaaagctttcttggaacaatcatctgattgtctcatttcccaaaaaggcaacttttaactccatccccgttgttgaatccttcgcgaattcaacaattgtttgatctttccatttttcccagaatttgtaagcttaaaattcgtccttaactgtaagaatcattgtaagacaagtcctaaatggctgatatcactgacattcgatggattatttgcataacaacaatgtgaacgtccttcagaatgaaagtcgccatctatttttagtcacggcaacagagctcctctttttttgtaagggggcggaaacaagaagaaggaaaggacacgaaatatccttgcctttgattagcttttcggcctggccagacctcagctattaaccccatttctgttgtctgccgtttgtttcgcattaacatttacatttacatgtgcgcagtagataaagttattgggaagcattcctggacccttggacacattcgatgtgtggcgatatggctgccatcgcctgtttgtccttgcacatcacgttgtgcaattcatctttatggcacgaccatcgaattaaattacacgcacgcacacaaattcgctgggattcggaggatgtgaattcagggcgggattgggatggtgctgcgcgatgggttgctatgggttgggttggcaactgttgacgcgacagcacaaattgggtgcaatgaaatgtaaatgcgcagctaatgaaatgctcaccgatgacggcaacgcccactaccacgccccaacccaccaccccccctcccgctggagttgcgtaattcccgtattatgcccgcctaaattgcagctggtaggagcaactgcatcaaaggattgcagaccgcagacggctgacggctgacggctttggatcgaattcggcagtggatccgctctgcaacgcaaattacacccagcttaatatgcataattaagtcgacaacccgcattcccgtttccccactcgatcccattccactccatttgccccatctctctcctgggggtctgggaactttcctcgggcgaagcgcaacagtttcccggaacaagacacgagatggctgatgtgcgatgggtgatggaaatggaaatgggtgtgcggcttgtcagctgccagaaacagtgtaaataattgaattaatagcttcgtgtgagccacgctaatgagcagttgctcaacatcagcaacgcccactgcaacacgcccccgtctatatttttgccccccgcctaacttcactcgcaatcccaatgccattttgaaatgtaattgaatgtccggggatcttgaacctctcagcgttggaactgcccggcaaactgtccatctccgccaggtgaatctgcagctgatccatccgtttgccggttacgaaagagtagtcatgatccagtcactcagatagaaaagcaactacaacactgtaccaatggctttttatcacagattcaattctataaaacaaatataaacacacattatatttaacacttttatactatgtttagccatattatagaaaagattatttcctaaaccatagtttccccaaatctttgtatttcctcctattttttataaacataatgtttgtgtgctttgtgacaattaagattgaatgcattgtttttattggaacatcccctttaatatgcaaatacaaacgtttttcttagtgtatgcgacagcgacatctgcaacaatgtcccggtgcccgagtcctgtttattacccagcaaaaccatctacttagctccctgggtttttgctccaaagggaaagcttccgtacagtcccactgcagcacactttgtcgcagttacagctccataaaactttggcggtagacaaattttacgctgattcgtgtgttgtgcactgtgaaaaaaaaagtggcacaagaactgctgtatcaacgatgggagcgagtgcattcgcaattaggaagcggctgtgaagatggtggtgatgatggtgatgatgatgtggaggatgatggtggagggacccagcagttggaagctagctgggggatccctgggcaccaaactcgggaccagtctgaaggctatataaaggacggtgctctgtgctctccaacgctcgctagcaggccataaaaactcattatgtgcgaagttgcgttcgcttgtttttgcccattggtggccgcactgttttctcctttgtatccaacggatacatatactccaccgttttctgtttcggttttatggtgttgcgcgtggcctgttgattcacacacgcacaccagcgcactcacacacacaagcgcacacataaatatactgaggacattcagaaatggcaatggcgtgctcggcctgacaatggctgaaaatgaaggacgcgacagatgggagctttgagctgtgagctgggagcatgggacattggacatgggattcgaaaacgcgcattgcgtttcttagaattgcacaccattaaatcgccttgacaactcaagctgccctctgacccctgacccccgaccgccagccaaagcctggaaagttccttccttgccttgttgcgcactttagttaaattaaaaaccaactgcagtcgaggcagccgtgcagccagcgcgcatcgtacatcatgcttcggcagccaaaaggtcgaaggtcaccgaatgtgagtaaattgcggacaaagctgccgcacaattgattggcagccagttcatttcccatttcacgttcgcaacaataggagactgttttcctgctacaatcctaatcgtaggcattacttagacgtaaatggattttcaatttgtggaatccaaaactcttataaaacttatacatagtcaaaagtttagaaaatcccaaaagcataaaaatatgggaaaatccaacaaattatgcattaataaataaataaccaatcattaaataaagaatattttaaaaatataaaataaaatttaaaacatacgccttaattaatatgtcaaccaaaaaatacaacttttacatatatcaaatagctgccatatgattcaaacttagaaaaacttgaaactatggctcaatatctaaatgagtttttaattttagttataatactataggtcattagacaatcgctgaaccgcaccgcaatataaatttgttttatatttagccatttatatttttaactgcattgactttctacctaccttttccgtttttccgtttacttttaatagcctgggagtataaatagtaccctgctctcaattctgttttagtccttgtttccttgtttcaatgcaggacctgttacactatattttaattaacagccattgccaggggcatcatttttcgaccggatacaatgggaatttaaatacagataaatttccatacggcagaagggtgcttcgtctaatccttcgtttaaacacccggccagagatgttggctaacaggctgtgctgccataatggctggcttggcacaaagtcaaagctttgcgtgttgcttgctacacacacacgcacactcacacacacactagcgcacggacgtgtcctggcacccacacacccatgtgtaggggtgtacgaatgtatctgtcccaccaacacacaggagcacgtggggcgacaggaataagggaaacatgctgcaaattggcctaggtctccttgggtacaacgtgtggtatgcgcaatgcgaaaagcctttaatgccgacgccgtgaagttggcggaggtcctgcgaacgccgcacgccaacagtatgccatacctacatatgtatgccatacctcgtgcgtgtatcggagtggatcggatcgggccgatggtgtgcgggaaagcaaaacacagaaatggtttttaactttccggttaattaatttattacagcttaatacgttcaatgacttttggcgcccgtctttctctgtcatttatgtttgccaaccgcccagcgaccacctccgttttttttagttaatttatacttttgttgggtgcgcgggaggggggagggggattgacgctgctggcccctcgagttttggccccccactttcgaccgcactctccctctctgttggccgtattttattcgctgtctatttttagccactgatttaatatgcgtgcattcgtgtgcgtgcctctctttgtttcgcatttcttgctttctcttttcttttctttttttttggccacatttcgtcgcctcgttgttcacaaaggataccgccgccggagtcctgggaatggtgacacagcgaggacaatttgtatgcggtttgtttgccatttttcacttagactccatccgactcccacttcggcgaagctgcaccatttcgcttatgtagatttatttggggcctcttgagcggtcaagcgtgccccgttttcttgagaggtttatgcgtctgcaaggataacgccaggatacagggcgcaggacgctggacgctggagcgcaaacggcgatggacgggaaaataaaaataagataataaaagcagagctctggccaccgataagcggccatcagcccgacatcgaaaggggttcaatagttcgtgggcacggaatgaaatctgtttacttcgatactcattttatttattgcgaacactaattccgccccggaagtacaataataaaactggtttattattatttaacttcctggttatttattcagtttatgactggccagtcaaagtttttcaattaccagcggccattggaaattgcgcaaaatatcacccaagcgaaaatcaaattttttacagtttttcaattgagattgagtaataattaatataaatcttgaaaccttaacaaaagttgaatagttcaataattcaataacaaaattaatagatatttagactgataaattcgtaattttctaagaaattcgacgacagactgtcgtttaaatacccacctattgatactgaatgagtgggctagcttccggtcaacatattttcacaacttttacgcagttcatgccacagcccacgcttccgcattatcctcgaaataggaagcggtgtgttttttgcacctctggacagtcataaatttattcacgcaaatgaaggcactgttggcatgttcatgagtctgggtcggactccacctattgttgtttacattttacactcgtaacttttagctcgcccacgctgccacacgtgccacgccagcagcagatggagaaataaggttaaaagagtttctccaacactttcgccacttccccaccatttgatggcgttcgcaattcctgccacacagagtccatgtcggctgacttagagcagtttgcacattaacttccgcacaggagacacagaaggcccttttggcttggccagcataatgcattatataaatattacgcatacgccgcggtgtacgtaagccggaggtaatgagtgcgcgaaaagcagctgcaggcggcgaatcgcgtgccccgctaccatttatcatccgcgtggctaaaagtgcgcgtaaaaagctccgcttttcgggctaacacaaccgcagatagcacctgctgctcctggtcagcgaataaatcttccacttccagttgcccgcaattaaaatgcaataaaggatgcatttaaattgctaaagcacaaagtgcagccgaaggatatatgtgtgcgtgtgtgtgtgtgtgcggtggggaaggaatagggatcctggcacgcctccttattgacttactcgcttccagtgctcggcatgcatttccgacccaagtgctcagttaaacggaatgtctgacatgcacctgccacccatgtggccttccgccccgccagttcaccccaaacttccaccgcgctctatttcggggtgcatgcaacttgggttctattttgggattgctttataaaaaccgcaagccgtcgtgttcgccccagaggtgcgatgtcaggcgttggagaaggtggccaaatgggcaggtggcaggtggaaagcagaaagcggagagtggcaagtggcaagtggcaggtggcaagaggcacgcggttgtgtcaagggggcgactctttcatgcctcgcacgtagacactgcactgtcgaaattctctcttttttttgccccggtatccttgttgagcaccaagagaagctgttaaagccacccgccagaagtgaacaaatgttgaaactgggtgaatggccatctcgaatggccaacacagcagcataaaatccattcagtgggcggatttttaaaatgcactcaaaagtaaccgttgtcattttaagcattaagtgtcggattttcacactgttcaaactcaatctgtatatcctgtcatatccttaccctagatattagccattatatgctgaattattaatatcattcataaatgagattatataagataatgtatacttctaaacttcagagacaaaagtaatcgcgatatatcaatttaaaacttattgcgataaaagatattcaatcatgtcagtatatcttcctgcattataaataatttagcaaatctctttacgctggaatgaaacttttaattgaagcaccctttttgaaaaggtcaaatgcttaagcggtcggtaattaaatgtttttcttgcaaaagttataactgcttttgataatcggaaagctaaggaatacagcagcttcccagctttccacagtacattttctttggcaaaggcaatcccttgtttttccatcgcatttcttcagtcgaagctgccacaatttctggtttcccccaatgcactttaatagactctaaacatttagctgcttggggttttttatattttgcctttattgcagctttttgctgcgctttaattgctcaattccgttaagtcagttgctgtttttagttgcagcaaaagtttaaagtaatttgtgctgaaccgcaataaattggggtggcagcccaaggaactaaggacgaagaatgccccgtgcatttttagtgctaaagttggcccaaagtttgcatcagcgttgtagtactatatctaaagtagattcccgtaaaaaccgaagggacataacttgtgagaaactttgacaggattctgtgggtgggtgagcgtgtgcggccctgccaaaccagaacgcgaagaagtcaaaccgccaaccgcccaccgtcgagtgtttgtgtttttattaacgccaaacaacggccaacagatttcgataagccaaacacttatggccacaataaaatgtcggccagtcttaatgggtgtcaacagcgcggccaataataatacacccgtgctggcccgattcctcttatttttttccacaattttacgagcactttataacagtttaatagcccgaacaatgagtagccgtccacctccttttcctcgttcgaacccgattgacgcacactggagccaatcccacttgaatcgaggcgaactacattgggtaatggcatgatggatatgacactatccccgccagtatcctgcccgcagaatccaggcggagacggagaccaaaagaatgaagttgactgacttgagcgcgtgtctaaagcggatgtcctagtgagcacacgtcttcctgctcgcccacttcaactttccatcagcatcagcatcatcatcagcggcggcgtctcaagccgtgatgaacttaaaaaaatatttgcgacagccatcccagctctctcacagccatcctcagatggttgcactcccaccccaagtggtagtccttccgtaccacgccggactttcgctttgaaatcgaaagcaggccgcttctcgtgggggcgaactcaaagagccttcgacaaagttgccaactcgcggacgtctgagcccagtttgtgacacgacttttaagtgagcggacttaaggcccacagacgacgcttcggctgggccaaaggtgaaacttcagagaccacgcccaacgaaaacttgatgctccatctcaaaatcaaacagaatgccacggctcaattgtcagttaattggcgccataattacggaacattaattgcctgaagagttcattgttccaaaatcaatccattcaccttatgctacactcttttattatagaaaatatatttggaatattttatattattctactctgtaggtttaagagatgataaagtatcacaggatattattaaaataatgttaaatagttaaacgactataaatattcacaaattaaattcaaaactaataaggtatcttttgtaattttgtatctccgttaggttcaggcaacatttaatattaaaaccgcttgcttatgtaaacaaattaaatgtaataaaacgatttatactaaactagaacgtttgactcaacaatacctaatcttagccgtccctttctcatcttacaggtttcggcttcgggcaagggcgtgctaatcactggctgcgaggctccactggcctggtacttggccaagaaactggacgacctgggcttcaccgtttacgcaggattcaacacgcccatcgaggagtcggacgaggccaagattctcaaggaggtgacctcggggcgcatgaagctgctgcacttggacgtcacgtcggagaaaaccgtaagtctacacaggcagcaggtcctgagcttttagctcagtctatacgtttatccatgccaactaccaacttgagtgatatagcaattagcttgagtgtcgcttaaaaaagagcttcaatcggaatgcggagaatttgtgagcactttttttcgtggaaagttgtcactttcacttaaaaaaatgagaaaaaggaaaagctcttttctttccccttatacattattccacgaaaagaagaaaaaaggcagcattttttatgcttttccgatttggtagccctggtctgtcctgagcgtttagccgagttcacaaccatctcctttgcttagatcctggaagctgcccgctatgtgtcgcagcacttaccccacggcgccgaaggattgtggtctgtggtgcactgcgcccactggatagctttgggtgaactcgagtggattccatttgcggtgcttcgcaagagcttggacctcaaccttttgggtaagtggggcaccactctgtcatggatgttgtctgaaatcttcgttttcaaacgtttcaggttccgctcggctaacacaaatcttcctgcccctggttcgccgtgcccatggtcgcgtcgttttcctgacctccggcctgaatcgtgtgccatctcccgtccggggaatccagtgtgccacccaagcggccgtggattgctttgccgcctgtctgcgccaggagatgcgcacccggggagtggacgtgtccgtggtggctgccggtgaatttgcacccggcaacggctggctgaacgagaccgagctgcgtgaccaggtgaggacagaataatggccccattgctctgctatgcagctactaatggtctgcattgggagaaattttacatcgatggaggtccttttaatggcaaactcgcataacgatacatagaacattacacgcgaagtaaaagttcctcctaaacaaactaatatatatttacagaattttttacactagatattacaacatattttattttttcactttgaagcatttaaaaagtttaagtttagtacttgcgaagccagaagagtgcgcaaaatattcatatgtttatattaaccaaactttcacaaacagttttttccacgtggatcagccttttcatgcttttagttttttacgatatgataactattcgcaagcagcggggactgctaaaacagtttgctaagaactcattaacttggcttcaacccatctttcccctatcccccactttttccacaggccaagcaaatgtggaaccagctttcctcggagcagaagaagacctacggcgaggattactacgaggcggccatgacatcggtggagaagtattcgcgccaggtgagagtacccaggcaaccccttttcccacccactaacgagtgtttaatccgcactttcttcaattccaggcggccgatatccagcccacgctgcgcgtcctcatcgatgccgtgaccaggaccttccccatggcccgctacaccccagtgacatccagcgagcgactgcagatcttcctagccgaacacctggccccctctctctacgaatcgctgtacggggagcagaagaagttcgtctactgaccaacctccgttcaccgtccatcgccaaagataagaatctccatcgaaacggcccgatattgtaattcggaaattgttattcatttatgatttgcctcgaaatccaaaccctgctccttggtgcgcgtgaaggacacccagaaaggaactgtagccaggagcactgttcaaggcgctccggccgtcgatgagcatttacgtccttctctcgattattctcatgattttccctttacggaggcgtctgcataatattattttctttagttgctagaacgaattgtataacgatgaataaaaagaaaatggaaacaattgtaagatatgcgctttcactcgcctaaatataagaatttccaatgaatttggaaaggtaatactagaagaatttcaatgtatatttgattttaggaaataatgcagatgactgagttctaaagaatttagtacctcaaaatggtgatacaaaaccaaagcagtttcaattaaattaagtttctgactaagcaaagagaggccaaaaaagtcctggcatcacaatccaccacctcaagtccttctccctcgttacgagtgcctttcgccaggattttttgaatcctgttaattgcttttgattgacattcgccgagtgcccggccttagttctgtcattgcatttaatggtgcgatttgtgagacatcaagctgcataagcaaacgccatccccccggtaaactggaaaactaagcttaagtgcagtggatggagaataggagcaggagcaggagcatcggaacagagcagagtcaaccaagtcgaatggcatggccgccaaggaacacgaaacacggagacgagctcgtgaaaataaattcaataaatttttaatgcgtttgattcaaaacaacaatgacattgcgccgcaacgtaagccaaggacatttcgcgcgaaaaaggaactcaggtgtttcgttggattccccaaccgcccaatgagctgttaagacagctgtaagg

SEQ ID NO: 18956 - DNA, 1377 bp, DROSOPHILA
ccgtgtctcagagcgcccaggccacgggcccccaaaccgtaccgctgcggaaaatcgatcttgaaaatatatacaatacaaaaaaaaatctaaaactctagcaccggatatattatagtctaagactacgagaattgcccacttcattgggaaagtgcgtgaaaatccgaacattaccatcgaccatctacaccatcatcagcatccgtcatgcaggtcttcgataacaatatgcgccgtgcctcgcgacgcgcctccttgcgacgaggatccatatcggcactgccgcagaagtcgcacgagattccctgggacatattcgagcgactattcatgcccttcctgttctgccaggcggcggccattgtcacatcgcacctgctccacgccctggacatctcgagcatctcgaccttcgccgtgttcgtctggttcgctctggccaccgtgggagccgtgctcttctatcacttcgtcaaggtttcggcttcgggcaagggcgtgctaatcactggctgcgaggctccactggcctggtacttggccaagaaactggacgacctgggcttcaccgtttacgcaggattcaacacgcccatcgaggagtcggacgaggccaagattctcaaggaggtgacctcggggcgcatgaagctgctgcacttggacgtcacgtcggagaaaaccatcctggaagctgcccgctatgtgtcgcagcacttaccccacggcgccgaaggattgtggtctgtggtgcactgcgcccactggatagctttgggtgaactcgagtggattccatttgcggtgcttcgcaagagcttggacctcaaccttttgggttccgctcggctaacacaaatcttcctgcccctggttcgccgtgcccatggtcgcgtcgttttcctgacctccggcctgaatcgtgtgccatctcccgtccggggaatccagtgtgccacccaagcggccgtggattgctttgccgcctgtctgcgccaggagatgcgcacccggggagtggacgtgtccgtggtggctgccggtgaatttgcacccggcaacggctggctgaacgagaccgagctgcgtgaccaggccaagcaaatgtggaaccagctttcctcggagcagaagaagacctacggcgaggattactacgaggcggccatgacatcggtggagaagtattcgcgccaggcggccgatatccagcccacgctgcgcgtcctcatcgatgccgtgaccaggaccttccccatggcccgctacaccccagtgacatccagcgagcgactgcagatcttcctagccgaacacctggccccctctctctacgaatcgctgtacggggagcagaagaagttcgtctactga

SEQ ID NO: 18957 - protein, 388 aa, DROSOPHILA
MQVFDNNMRRASRRASLRRGSISALPQKSHEIPWDIFERLFMPFLFCQAAAIVTSHLLHALDISSISTFAVFVWFALATVGAVLFYHFVKVSASGKGVLITGCEAPLAWYLAKKLDDLGFTVYAGFNTPIEESDEAKILKEVTSGRMKLLHLDVTSEKTILEAARYVSQHLPHGAEGLWSVVHCAHWIALGELEWIPFAVLRKSLDLNLLGSARLTQIFLPLVRRAHGRVVFLTSGLNRVPSPVRGIQCATQAAVDCFAACLRQEMRTRGVDVSVVAAGEFAPGNGWLNETELRDQAKQMWNQLSSEQKKTYGEDYYEAAMTSVEKYSRQAADIQPTLRVLIDAVTRTFPMARYTPVTSSERLQIFLAEHLAPSLYESLYGEQKKFVY

SEQ ID NO: 18958 - DNA, 2777 bp, DROSOPHILA
ggaatttagtatttttcaggcggcatgttggatcttatttccgtgcaccttaggaattatgtttatttcattttaaaagtacccatcagtgttttcgtatgagtgaaaagttagtaatttttaattttaattttaaattagtaacaagacgacttgttaaattcgggacaagagtcaccctgtgatgaaccacttgttacatgcagatgcagccggtgacctcctctggtcacactgtccatttttaattttttgtaatagtagagttttttttataacattttatccgtcttttatgcaatatatttaattattattagtaagaggcaatcccacacaaacatgcaatcagtactcacccgctcgttatgcattggtaagacaaactgatgtgtggactttgagccccagccatttaaatgttttctataagcaagatcctaaaccagatattgatattcagcccgcagatctttaaatgctcgtcaaattgcctcattgtcggcgctttcggagacgcaccagatgctgcagaagtcctgccgggactttgccaacaatgagctcagtggaaacgcagccaagttcgatcgggagcacctgtatccagagaaacagatccgccagatgggcgaactgggcgtgatggcagtagcgattcccgaggagctgggtaattaatattacgcccacctcagccctccttatagtatctcattgtatctctttattgttaatcaggcggcactggactggattatgtggcctacgccattgccatggaggaaatctcaaggggctgtgcctctgctggcgtcatcatgtcggtgaacaactccctgtatctgggaccgcttctctctttcggaaacgatgcccagaagaaggactacatcacaccgtttaccaccggcgaacgagtgggctgcttcgcgctctctgaacctggaaacggatccgatgctggagctgcttccaccatagcaaccgacaagggagatcacttcgtgctgaatggcaccaaggcctggatcacaaatgccttcgaggcggaggcagccattgtgttcgccaccaccaacaagcagctgaagcacaagggcatctccgcattcattgtgcccaaggctaccaagggcttctcgctgggcaaaaaggaggataagctgggcatccggggatcttcgacgtgccagctaattttcgaggactgcgtggtgcccaaggagaacatgctgggcgagccgggtttcggtttcaagattgccatgcagacgctggacgccggccgcataggaatcgctggccaggcgctgggcattggtcaggctgccctcgaattggccgtggactacgcccagaagcgacaggccttcggcaagcccattgccaagctccagtccatccagcaaaagatcgcggacatgtcgttggccatggagtcggcacgtctgctcacctggcgcgccgcctggctgaaggaccaaaagcagccctacaccaaagaagctgcaatggccaagctggctgcctcggaggcggccaccttgtgctcccaccagtgtatccagatcctgggcggaatgggctacgtgaccgacatggcggccgagcgtcattacagggacgcccgcatcactgagatctacgagggcacctccgaaatccagcgactggtgatcgcgggctccattctaaaggaatatgctagttaagatcaaagttatatatccgtactacttgtgtctcgtttaataaagaacgtttttaatatactattttgctagttctattgagttgtataattgtttataatagatagaaatacatgaaaaaaacacctacaacattttaattctttagaaaaagttagcaaaacaataaatcttcgttcaaaaagtaaagtaaaataagtgaaactcttgactactttttagacgttgcatatttgtaaattaattaaaataatgaaccttaagtgcttttaaaatatatttataaacaaagcttattattttatatgcctaattatattatatcttttaaaccaaattttaaatgactcaaaaaaatgggaacttggcgccaaaactgcagcaaggctttgtcggttagcatatttgtgtggtatttttgtgacttcattcggtatattgctggtagctgtgcagcggtcacacagcaaaagcaaaaagtttctttatttatttgataattattcgttacgcggtaattaacgcgatgcaagtgcagcaggaacgtggtaatgagagtttttgccactgagctgcgcgtgtcggccgtccagaaagtgcagaaatcgcgtgaagtgcgcgaaatccgtccaagagcagaaaagtgccaagaatagctgcgatggaaacagcgatggatgtggtgtgtgtaatggatacggcggtgggcgaccatctggaggaccgccagtgtgcgctggaggagatcaagcaggcagtgcagtcggcgggcgccaactttcagcgggttcaggtgcgccagcttggttatacaatggcatatgggtgatttgacttacatcccccccacttggcatccttgcagttcgagcgcctggacttcggcgagacgaatgtgctggagacgttttacaacgccgatgtggccattatcgacctgagcattctcacccagcagcggccgctttcctatcactacggcgttagggagagcttcgggatgaaggagaacatcctcacctacaacgacatcgattccaagcagacgctcagtctcaaggt

SEQ ID NO: 18959 - DNA, 777 bp, DROSOPHILA
agtatattaaaaacgttctttattaaacgagacacaagtagtacggatatataactttgatcttaactagcatattcctttagaatggagcccgcgatcaccagtcgctggatttcggaggtgccctcgtagatctcagtgatgcgggcgtccctgtaatgacgctcggccgccatgtcggtcacgtagcccattccgcccaggatctggatacactggtgggagcacaaggtggccgcctccgaggcagccagcttggccattgcagcttctttggtgtagggctgcttttggtccttcagccaggcggcgcgccaggtgagcagacgtgccgactccatggccaacgacatgtccgcgatcttttgctggatggactggagcttggcaatgggcttgccgaaggcctgtcgcttctgggcgtagtccacggccaattcgagggcagcctgaccaatgcccagcgcctggccagcgattcctatgcggccggcgtccagcgtctgcatggcaatcttgaaaccgaaacccggctcgcccagcatgttctccttgggcaccacgcagtcctcgaaaattagctggcacgtcgaagatccccggatgcccagcttatcctcctttttgcccagcgagaagcccttggtagccttgggcacaatgaatgcggagatgcccttgtgcttcagctgcttgttggtggtggcgaacacaatggctgcctccgcctcgaaggcatttgtgatccaggccttggtgccattcagcacgaagtga

SEQ ID NO: 18960 - protein, 106 aa, DROSOPHILA
MPSAWPAIPMRPASSVCMAILKPKPGSPSMFSLGTTQSSKISWHVEDPRMPSLSSFLPSEKPLVALGTMNAEMPLCFSCLLVVANTMAASASKAFVIQALVPFSTK

SEQ ID NO: 18961 - DNA, 4061 bp, DROSOPHILA
aaccaggggcaggactcaccttgaggcgccttatcagctcgtctgtgcccaaatcctcgaccagcggccggcatccggtggggtacactatgtccgccatcctcaccgccaatgggagctacctgcaagccaggatttcaaggattcagtggcaggtgcaacaattccgtgcgacagcaacaacaacgaatgcgaccctcaaaataacattgaaaaagtggaggagggtggcatcacgaacacacaagcacgaagctccacacaagcacacacacacatgggcagcagcaccacaagcacacagagtggccaatattgtttggttatttctttttcgcaaacaacaaatagagagcgcccaaattgtagcgcccttgccactgcaatttacccaatgttttatattaaactgcggcgcagtttttggaactcggaatcttacttttcacaacgggcaggaagcggcacaatttttttgcaattttgcgaacccctgctttcgatgaccgcttagcgcgcgtctccttcgaatcactgcactatggatgggattgatcctgtccagctatttacacatgttcggttacaagagtcttttgcggtgcttatgttgttaaaaataagcaaaaaccaaggagcatttatgtggagtggcacgccattaatccacgcacgaagcgttgccagaggttttttggaagtgtggccagactcttcgcagattagtacatgattgcatttcagctgattagcattgacgtgttgttggtgctagcgaggagagcggaaggggtcgtgtcacgaaatcggatatataatcggaatgaaatcgggatataaataacttattaaactgtatttataaatttacttaagaacaacatttgagtatcatgtttgttttgctttgagcattcagttagtgctaatcacgcgctcacctctaattttgtttgttgtgcttggcaaacagctgtagcgttgccacatagccgtcgcggcgcaagaagtgcaaacataggataaagataattgcacaattattggcacctggagccggcaaacgctgtaacggaattgcccgcgttcaaaagccaatggcgcgcattggcgaaacatcggaggaatgtggtaatggacgcaacacaacgttccggccgttctagatgttttgctttctaatccaattaagcgtgtgcgccctgaaagcgatgatgcgggccggttgtggtcagatgtgcgccgtccgttgcagcagctctacattcccgaaaatatgagcattcttacgtaaatattgcatgggcagtgcgtatttaaatatagattgtacatatagagacgcaatgtaagccagttgcatttgccagaggacaaccgaaagtattaatcaagcaatccaaaccgatgcggcatagccgggattatggcttccttgcgcgtcgtcaataggtgggtcatagttgacgttacttttgttaaccgaaactatttaatccttccataatccccgaaagaaacagattagtgtgccgcggttttgtggctcttacgttgctgctggtcttcttcaacgagtttatagtttactacatggcccagtccagttggcagccaatcgattgcaaactaggtaagccgtaacacagtttttgagtcgcatcataacaagctatttttcccacatagataattgcacgcgcctgctgcttattgctgatccccagatactgggaaactcctacgatcgatcttcgcacagtcctttagccaggtacgattcggatagatacctggcgaagactttcgagcgagctcttgcctttacacagcctcacatcatagtgttcctgggcgatctgttggacgaaggcaacattgccacggctcaagagtacaagcagtacgttcagcggttcagacgaatttatcagaataagaactacaaaaaagtaaggagtactgcttttgcttcaccttaaattgttgttgcacctataattatttcaatttaaagtttttccaaagcgattatacaactttgcgaatgggattgaccccttaaaacctaacagttccgcatgatctctgccttttttcagcgcgtccatgtgccgggtgacaatgatattggcggcgagaatggcgactacatatccaactcgaaccaaagacgctttgagaacgaattcatgagtgaagacctctttgactatgacaatcgattacgcttcttcaagataaaccgcatgctattggactttagcaacccggatagggataacaatgcggatcgtctaagaattggcgtatcccatgccccgctgctcattggcggaggacccctgttgagagccatcatcagcgacttggatccacatatcattttctcaggacactggcatgaatccagaatatttatttacccctccaccaaggtgatcaacttttatgaaaactccgtgaggcattttgacttgaaggccctcaaagagcaggagcacagctatctggagataatggtgcccacttgctcgtatcgcatgggaaagtccaagatcggattgggctacgcggttttgggtaagtttggaaatatcttttgtattgtccatggaagtaatgccctgcttttgactacagaaaactacaatctgagctacacggtgctgtggcagccaaatcgatttatcctgctcttcacctatgttttttggggactattcgtcgtctgtggtttcgtcgtctttaagatgatgacacgttgtcccttccgcgtggccaaaaggcagacgctctataaccgcgtctcgactataccgcaattttagactgcactttccactcgtcatggacaataagcccaagattctcaagaattgctcgaatatacaactcaaaattgaattaaaatcgtatttatagacaagtagcttatattcggataaagttgagtagtagcaatgaaaattgatataaagtgctaaatttgttttccaataagtgaaaaaatgtaaccaatgtcctccatccatattcattaaaaaatttaatttaatttaatttatttatttaattaggccttaacagttcgaagaaaatctcattggtttatacttatagagctgttaaatttaatacataaaattcgaaaataaacaaatgtcaatcatcataagaaaatactattggtattcatttgtattataaaaaacgcactttttaacgtttactacttatttcaccgaaagcaaccgtaaaatgtagtaggtctttaaaaaaaagtagtaccagcgaagtcgctctcatccgacgagaaataacgggaaatactgggtgcagtacagggcgcatgtgcgaaccgtgcgccggctgccagcggtaaattagcccgatgcggcgtcagtagagttccgaaaccgaacgcggaaggttgtgccctggtcacgagatagcgttaccatcagtgggtctccttgaaaccgaatcgctcgcaagatccccgggctctgcctctgtggcaggataataaagcgtgacgcgtgtgcgtaacataaaaataaccataaaccactccgggcggagtaaatgaagtgaggtgaagtgaagcaaggggcaaacagagtccgaaacagcaactgaaactgaaacagaaaccgacgaaggcaaacggaattccttcaaaaatcggcaaataaacaagaagaaaagaagagcacacaccggttttgtgcgaaagaagcgaaggaagtacgaagtgaaatcaaaagaattctttagctcgaaatggggctgaacggaagacgacgattgttgggctgcggcctgggattcttctgcctgatcttctgctcttacggtgagttaagtcggccgactgactcatcttttcttctcattccaataactcctccactatctgccccacagccgcgccagcatcatttgaggatgtgagcatctcaaggggtccgaaatcctcgattaccatcaaggaacaaagttcgttgcaattgccctgtgactaccaactgccggatgggtatcttcagaagagcagc

SEQ ID NO: 18962 - DNA, 1724 bp, DROSOPHILA
gcgcaagaagtgcaaacataggataaagataattgcacaattattggcacctggagccggcaaacgctgtaacggaattgcccgcgttcaaaagccaatggcgcgcattggcgaaacatcggaggaatgtggtaatggacgcaacacaacgttccggccgttctagatgttttgctttctaatccaattaagcgtgtgcgccctgaaagcgatgatgcgggccggttgtggtcagatgtgcgccgtccgttgcagcagctctacattcccgaaaatatgagcattcttacgtaaatattgcatgggcagtgcgtatttaaatatagattgtacatatagagacgcaatgtaagccagttgcatttgccagaggacaaccgaaagtattaatcaagcaatccaaaccgatgcggcatagccgggattatggcttccttgcgcgtcgtcaatagattagtgtgccgcggttttgtggctcttacgttgctgctggtcttcttcaacgagtttatagtttactacatggcccagtccagttggcagccaatcgattgcaaactagataattgcacgcgcctgctgcttattgctgatccccagatactgggaaactcctacgatcgatcttcgcacagtcctttagccaggtacgattcggatagatacctggcgaagactttcgagcgagctcttgcctttacacagcctcacatcatagtgttcctgggcgatctgttggacgaaggcaacattgccacggctcaagagtacaagcagtacgttcagcggttcagacgaatttatcagaataagaactacaaaaaacgcgtccatgtgccgggtgacaatgatattggcggcgagaatggcgactacatatccaactcgaaccaaagacgctttgagaacgaattcatgagtgaagacctctttgactatgacaatcgattacgcttcttcaagataaaccgcatgctattggactttagcaacccggatagggataacaatgcggatcgtctaagaattggcgtatcccatgccccgctgctcattggcggaggacccctgttgagagccatcatcagcgacttggatccacatatcattttctcaggacactggcatgaatccagaatatttatttacccctccaccaaggtgatcaacttttatgaaaactccgtgaggcattttgacttgaaggccctcaaagagcaggagcacagctatctggagataatggtgcccacttgctcgtatcgcatgggaaagtccaagatcggattgggctacgcggttttggaaaactacaatctgagctacacggtgctgtggcagccaaatcgatttatcctgctcttcacctatgttttttggggactattcgtcgtctgtggtttcgtcgtctttaagatgatgacacgttgtcccttccgcgtggccaaaaggcagacgctctataaccgcgtctcgactataccgcaattttagactgcactttccactcgtcatggacaataagcccaagattctcaagaattgctcgaatatacaactcaaaattgaattaaaatcgtatttatagacaagtagcttatattcggataaagttgagtagtagcaatgaaaattgatataaagtgctaaatttgttttccaataagtgaaaaaatgtaaccaatgtcctccatccatattcattaaaaaatttaatttaattt

SEQ ID NO: 18963 - protein, 323 aa, DROSOPHILA
MAQSSWQPIDCKLDNCTRLLLIADPQILGNSYDRSSHSPLARYDSDRYLAKTFERALAFTQPHIIVFLGDLLDEGNIATAQEYKQYVQRFRRIYQNKNYKKRVHVPGDNDIGGENGDYISNSNQRRFENEFMSEDLFDYDNRLRFFKINRMLLDFSNPDRDNNADRLRIGVSHAPLLIGGGPLLRAIISDLDPHIIFSGHWHESRIFIYPSTKVINFYENSVRHFDLKALKEQEHSYLEIMVPTCSYRMGKSKIGLGYAVLENYNLSYTVLWQPNRFILLFTYVFWGLFVVCGFVVFKMMTRCPFRVAKRQTLYNRVSTIPQF

SEQ ID NO: 18964 - DNA, 3411 bp, DROSOPHILA
cttttgggtaccaaatcttaggcgttcggtggtccatagtcatgtgctggactgctacatgtccgtggtggtgacggaacgcacgctggagcagatccatgaatgtcatggctttgatcactacctcctcaagaatcgtgcctgcgatcttcgctccgctttggctctgaaactcaagcgagaggtgcttcaggccctgcagaacggtgttccagccctcgccgacgagcccgaacgccaacaggaagtgcttaaggaataccgccgctatctggaaccatatacgcccgaggaaatcgattggtacggccatacctatttggaggccatacgcaagctgcaaaagcagctgcgcgaagcggaaaaggtggtgccgcataagttggagttccgcggaaagcttatcgagcagctgcgccaggcggggatcagcgaagcgggaaagctggagaagccggatgcattagcagcagaatcgtcggtcgaacacaaggattcggatatcgaagcgcttacaaagctgtaagtcacaaatacttctgtaatgaatttcctaaccaatgatttattccagggaatcctccccctcttccagttggctgtctaaaatcaatcctttcggcaagaaagaaacctagaaaagctgtccgcgtttgtttttgatttatgtgtttagcctcgaacgaataaacataacttcggaaacatttcgttacaatttgaaggtattaaaacgttgttactcgaacgtctttatttcaaatattcgttacatctggtactgtataaaaacaagtagaatcacacactgaacatgaacgtacgcggcaaagtagaaaaaggaatgattgcaaatccccacgagaatacagaaatacattgacaaatcaactacgctgatcactttacgcttagactatggttagtgtatagctccgcaagcgggcagagagctttgtgccgtaaatgatcccagtccgagctggaagccaggtaggccttaagcgattggatttttcctcattaattcgatgtcagccttcatcatgtcgctaaccaattccacgaaggtaactttaggcgtccagtttagctctcgattggctttggacgcgtcgccttgcagcagatcgacctccgtcggccgaaaatactttggatttatgcggacgcgcacaatacccgtgccgttctccactcccacctcgtccacacccttgcccttccacgttatctctcgatcaatatgcttgaacgcggcttccacgaattcgcgcacactgtgcgtttcgcctgtagctatgacgtagtcggaaggagactcccgctgcagcatcatccacatggcctccacgtagtcgctggcatgtccccagtcgcgctttgagtcgagattgcccagttcaaaatactccatttgcttgtgataaatcttggccacgctacgggtgatttttctagtcacaaagttctcgccacgtcgtggactttcatggttgaagaggattccattacaggcgtacatgttgtaggcttcccggtagttgatgacgatccaaaagccgtacatcttagcgcaggctaaagttaggtgggattaagtattacttttagcatacattatcgaagctgctgccttaccatatggcgacctgggatagaagggcgtctgttcgttctgtggcgtctccaccactttaccatatagctccgaagtggaggcttggtaaaacctcacgttcttttccatgccacaagtgcggatggcgtccagaatgcgcaacgtgcccacggcgtccacctcggccgtgtactcactgagatcgaaggagaccttgacatgggattgtgctgccaaattgtaaatctccgtgggcttcaccatattgatgatcttcaccaggctgctgctgtccgtcatgtcgccatagtggagcttcatacgcccacctttgtgcgcctttggatcggcatatagatgctcaatgcgggtggtgttgaaggtgctggcccgccgaataatgccgtgcacctcgtagtccttcttgagcagaaactctgccaaataggagccatcctgggcgatagggaacaagtaagaatcgagcactttgaacacgtaagcacggaatgaaggagatgcccctgaaacagccgtgactaattcatcaattacacacctggcccgttatgcctgttatcagcgccactttatcacgggagtcgccttcggcgccggcttccgttccgttttggtccttgctgccgttgctgctgctttcaggacgttgcttcttggtttccggggccccatcggaagtcgacatagcaattagccgggtatttagcatttactgacgctagttttaattttcacgccgacgcagcccggataataaacaaacttttgtctacagcactcaggtagaggtgaataaataatcgattggttatcgatacatcgcaatcgaagcacttgtacgggacagtggggcaatctatttaagacagcctaaattattttcaataagcaaaaagtaaatattttatcacaaaaaacaaattatgtatggaataacattttaaataagaattcagcgcaaatttaaaattaaaaccaaatctggttgaataacactttatttactttactgccaatgttgcactttttttcgattttgttccactttgtggcagtgttgagtagcaggaaaacccacgtagcgatttttagcgcatacctttcagcgaaagccggacgaaaataacataacgttggcacaaccacctatcttatcattcctcctccactcccaagccgattcgccaccgggcatcaatatcttcttcggcggaacccgcattacgtgtgcgtaaacggcggctttcaatttcattctcggagcgaccggccggccagcttgataacaccggtgcatagtgaaaccagcgccgcttactaattaagtacgaccacgacctccgagataaacagaagtcaattgttcgcagcacaaaaatgacggatcttatcaggcagggtgctctgttccttatgagcgagaagtgctatgataactacttcctctatcacaactttttagatggtgagtggctgctaattcaaaaaggtatgtgcctattaagtatcaattaacatttctcgtagttccgtgcttcaaggctttgctgagcaagggcttgggattggcaattatcgcaggttccgtgctggtcaaagtaccacaagtgctgaagatccttaacagcaagtctggcgagggcatcaacattgtgggcgtagtgttggacttgctggccatctccttccacctgtcgtacaactttatgcatggctatccgtttagtgcctggggcgacagtaccttcctggccatccagaccgtcaca

SEQ ID NO: 18965 - DNA, 1248 bp, DROSOPHILA
acaaaagtttgtttattatccgggctgcgtcggcgtgaaaattaaaactagcgtcagtaaatgctaaatacccggctaattgctatgtcgacttccgatggggccccggaaaccaagaagcaacgtcctgaaagcagcagcaacggcagcaaggaccaaaacggaacggaagccggcgccgaaggcgactcccgtgataaagtggcgctgataacaggcataacgggccaggatggctcctatttggcagagtttctgctcaagaaggactacgaggtgcacggcattattcggcgggccagcaccttcaacaccacccgcattgagcatctatatgccgatccaaaggcgcacaaaggtgggcgtatgaagctccactatggcgacatgacggacagcagcagcctggtgaagatcatcaatatggtgaagcccacggagatttacaatttggcagcacaatcccatgtcaaggtctccttcgatctcagtgagtacacggccgaggtggacgccgtgggcacgttgcgcattctggacgccatccgcacttgtggcatggaaaagaacgtgaggttttaccaagcctccacttcggagctatatggtaaagtggtggagacgccacagaacgaacagacgcccttctatcccaggtcgccatatgcctgcgctaagatgtacggcttttggatcgtcatcaactaccgggaagcctacaacatgtacgcctgtaatggaatcctcttcaaccatgaaagtccacgacgtggcgagaactttgtgactagaaaaatcacccgtagcgtggccaagatttatcacaagcaaatggagtattttgaactgggcaatctcgactcaaagcgcgactggggacatgccagcgactacgtggaggccatgtggatgatgctgcagcgggagtctccttccgactacgtcatagctacaggcgaaacgcacagtgtgcgcgaattcgtggaagccgcgttcaagcatattgatcgagagataacgtggaagggcaagggtgtggacgaggtgggagtggagaacggcacgggtattgtgcgcgtccgcataaatccaaagtattttcggccgacggaggtcgatctgctgcaaggcgacgcgtccaaagccaatcgagagctaaactggacgcctaaagttaccttcgtggaattggttagcgacatgatgaaggctgacatcgaattaatgaggaaaaatccaatcgcttaa

SEQ ID NO: 18966 - protein, 387 aa, DROSOPHILA
MSTSDGAPETKKQRPESSSNGSKDQNGTEAGAEGDSRDKVALITGITGQDGSYLAEFLLKKDYEVHGIIRRASTFNTTRIEHLYADPKAHKGGRMKLHYGDMTDSSSLVKIINMVKPTEIYNLAAQSHVKVSFDLSEYTAEVDAVGTLRILDAIRTCGMEKNVRFYQASTSELYGKVVETPQNEQTPFYPRSPYACAKMYGFWIVINYREAYNMYACNGILFNHESPRRGENFVTRKITRSVAKIYHKQMEYFELGNLDSKRDWGHASDYVEAMWMMLQRESPSDYVIATGETHSVREFVEAAFKHIDREITWKGKGVDEVGVENGTGIVRVRINPKYFRPTEVDLLQGDASKANRELNWTPKVTFVELVSDMMKADIELMRKNPIA

SEQ ID NO: 18967 - DNA, 2703 bp, DROSOPHILA
ataaacagaagtcaattgttcgcagcacaaaaatgacggatcttatcaggcagggtgctctgttccttatgagcgagaagtgctatgataactacttcctctatcacaactttttagatggtgagtggctgctaattcaaaaaggtatgtgcctattaagtatcaattaacatttctcgtagttccgtgcttcaaggctttgctgagcaagggcttgggattggcaattatcgcaggttccgtgctggtcaaagtaccacaagtgctgaagatccttaacagcaagtctggcgagggcatcaacattgtgggcgtagtgttggacttgctggccatctccttccacctgtcgtacaactttatgcatggctatccgtttagtgcctggggcgacagtaccttcctggccatccagaccgtcacaatcgccgtcttggtcttgttcttcaacgggcgcaaggcgcagtcgggactctttctagtgggatatgtcgtgctgatgtatgttctcaattcggggctaacgcccatgtcggtgctgttcaccatccagagctgcaacattcccatcctgctggtgggcaagctgtctcaggcgtataccaactaccaggctggatccactggtcagttgtcagccgccactgtgatcatgatgtttgcaggatcggtggcccgcatcttcacctccatccaggagactggtgactttatgatcatcctcactttcattgcctctacctttgccaattcggttattctgggccagctgatctactactggaacaaacccgctggcgtcaaggtgaaggattcaaaggccaagaagccgaagaccaagaaggatgactaagcagtgcggatagaagtaacaaaagtagaaacagatatacatagagagatttgaactcgaaacataggttgcaacaacttctcgacaatgtagaacaaatatgcgatgtttaaataattgaattgaataattaaattaaattgagtcctagtttattaacttgtcctgtttctcgaagtgctgccgcagtagagctaaagcgcggtagcgatgggaaatggtgttcttctcggacttgggcagttcggcgtaggtcttatcgtagccactgggctggaaaaccggatccctgcggcaatgatagagaatttaataagcaagagccattttatcagacttcttacgcaagtgactcaccatccaaagtcccgggggccgcgaggttcgacgataacgccctcggtgatgcccttaaagattagaggctcggcatccacaccgtcgcagtagccaaaggtgcaaatagcctgagcgcttttgttctcccaaccatggagcagacggtgtaacccctccggctgcagcttctccaggaaccatttgatgtacggacccggcaagccctccagcgcattgaagcacagactagtgtcctccaccagcacgggtccattcacctgacgcgctgcctccttgcacttcttgatggcaatctcgtcgatgtcgcctgacattaaacatacgtagttttagtactacatcattcagatgatggctgttattcaccttgcaattccggaagatcaatcttctttgacacaatggtgcgcgggaaactgggtcccaggatggcaaccaactcttccagcttcttggcgttgccggtgacaaaggtaattggtttcgacatgacggtacagattaaattgtcgccctcaatttaaacaattggccgcagtattcaacgccatttgcaagactaaagcatgcggccaaatcagctgttttctgcttagcttgggcgcgaaataaaagacagggtggttattactcaaaaatattcaaaaagctggaattaaaaatacatacatatataattaaggtaacttaaataagttggtgaattaaattgtaacacagagaagaaaacgcatgtggtgtctaaaagccttgacaatagcatttctagttgatttattcaacataacttatttttaggacaaaaatgtaattcaaatggaaagtttttttttttttttgggacgataatggttttcttgggatgacaaaatttgcaaataaatataagatgcacatgaaaacttctactgatcgtccgcgtttgtgagatgcagatttgccgatggatgcaggccgagttccttcagggagctatcgttatgctccgcctccaggaattttcgcgggaaggcgcaaatgagcttgtagccgtcctgagggatgtgcttgtgcgtctggctgatgtacagccgcaaagtttgcagtttggtgtccgagggccagcgcagctggaccatctcatctgttccggcggcgttgagcaggcgcagtttaagggcagtcaattcagtcttggcctcgcccaagtgattctcgaaagaggcggcggccacacccttgagctcctcatcatcgaactcctcaaggctctcattatcgctggctccatcgggactatcgtttttctggttgccttcgcctccgccaccaccgttctcgtttatggaattcttgatggccaactcaagctgctcctcttcggttagctccagaaccttggcacgtttcttgggcatttccttcgaactggctgtcgaggagcacgaggcctccggatcgggcacctcgtcatcatcgatgtacgtggccgaacgcttcgaggtgcctgg

SEQ ID NO: 18968 - DNA, 576 bp, DROSOPHILA
atgtcgaaaccaattacctttgtcaccggcaacgccaagaagctggaagagttggttgccatcctgggacccagtttcccgcgcaccattgtgtcaaagaagattgatcttccggaattgcaaggcgacatcgacgagattgccatcaagaagtgcaaggaggcagcgcgtcaggtgaatggacccgtgctggtggaggacactagtctgtgcttcaatgcgctggagggcttgccgggtccgtacatcaaatggttcctggagaagctgcagccggaggggttacaccgtctgctccatggttgggagaacaaaagcgctcaggctatttgcacctttggctactgcgacggtgtggatgccgagcctctaatctttaagggcatcaccgagggcgttatcgtcgaacctcgcggcccccgggactttggatgggatccggttttccagcccagtggctacgataagacctacgccgaactgcccaagtccgagaagaacaccatttcccatcgctaccgcgctttagctctactgcggcagcacttcgagaaacaggacaagttaataaactag

SEQ ID NO: 18969 - protein, 191 aa, DROSOPHILA
MSKPITFVTGNAKKLEELVAILGPSFPRTIVSKKIDLPELQGDIDEIAIKKCKEAARQVNGPVLVEDTSLCFNALEGLPGPYIKWFLEKLQPEGLHRLLHGWENKSAQAICTFGYCDGVDAEPLIFKGITEGVIVEPRGPRDFGWDPVFQPSGYDKTYAELPKSEKNTISHRYRALALLRQHFEKQDKLIN

SEQ ID NO: 18970 - DNA, 3561 bp, DROSOPHILA
ccactgggctggaaaaccggatccctgcggcaatgatagagaatttaataagcaagagccattttatcagacttcttacgcaagtgactcaccatccaaagtcccgggggccgcgaggttcgacgataacgccctcggtgatgcccttaaagattagaggctcggcatccacaccgtcgcagtagccaaaggtgcaaatagcctgagcgcttttgttctcccaaccatggagcagacggtgtaacccctccggctgcagcttctccaggaaccatttgatgtacggacccggcaagccctccagcgcattgaagcacagactagtgtcctccaccagcacgggtccattcacctgacgcgctgcctccttgcacttcttgatggcaatctcgtcgatgtcgcctgacattaaacatacgtagttttagtactacatcattcagatgatggctgttattcaccttgcaattccggaagatcaatcttctttgacacaatggtgcgcgggaaactgggtcccaggatggcaaccaactcttccagcttcttggcgttgccggtgacaaaggtaattggtttcgacatgacggtacagattaaattgtcgccctcaatttaaacaattggccgcagtattcaacgccatttgcaagactaaagcatgcggccaaatcagctgttttctgcttagcttgggcgcgaaataaaagacagggtggttattactcaaaaatattcaaaaagctggaattaaaaatacatacatatataattaaggtaacttaaataagttggtgaattaaattgtaacacagagaagaaaacgcatgtggtgtctaaaagccttgacaatagcatttctagttgatttattcaacataacttatttttaggacaaaaatgtaattcaaatggaaagtttttttttttttttgggacgataatggttttcttgggatgacaaaatttgcaaataaatataagatgcacatgaaaacttctactgatcgtccgcgtttgtgagatgcagatttgccgatggatgcaggccgagttccttcagggagctatcgttatgctccgcctccaggaattttcgcgggaaggcgcaaatgagcttgtagccgtcctgagggatgtgcttgtgcgtctggctgatgtacagccgcaaagtttgcagtttggtgtccgagggccagcgcagctggaccatctcatctgttccggcggcgttgagcaggcgcagtttaagggcagtcaattcagtcttggcctcgcccaagtgattctcgaaagaggcggcggccacacccttgagctcctcatcatcgaactcctcaaggctctcattatcgctggctccatcgggactatcgtttttctggttgccttcgcctccgccaccaccgttctcgtttatggaattcttgatggccaactcaagctgctcctcttcggttagctccagaaccttggcacgtttcttgggcatttccttcgaactggctgtcgaggagcacgaggcctccggatcgggcacctcgtcatcatcgatgtacgtggccgaacgcttcgaggtgcctggtgcatcctcctgaataaagtcacggtgctccttcaagaactgcctcaaatcgggaagaatattctccagcttcggctctgcgctgcgccacacttcctcaccagtacggggatcgatcacgcatatgtaaggcagggtggcgcagtggtagaaggccacaaagcggcgtccttccgaggtgtcgttgtccacctgccagaaggtgaactggcgacgtatcagtttcttaagctccttgtccgaccagacatcgcggttcaaagtctgcgactgaaagttttcgtcctgcacgttgaccagcaaccagcgctgacgcttggtggcaaactccctggcagcggttagtgatccggagtagagtatgtccgttggcgggcggaataggtctccgaggcgggatgtgctggttgccgtgtccgttgtggaccgtctgttaagtgccatggcctgaccggccaccaccatctgggcggcccgtccgcgacggattcgattgggatcggcatagacgccagtggcctgcagctgctcctccattagagcgccctcgcgggcaaagtcccgcaggggatgaaccttgacgcgctgcgtcacacgcgacagccggctactgctccccgacgcaaaaaaattgtcgtcctcgggcaggatcaattgctcacggaccggggcaattggcgcccttacctcatcctcgtcgtccaaaacgggtagcgattcagccgcagcaccggcactggagcccgatggcgtggatgtggaggctgcctgttcgaaaaacagagccactgcggcggacacatcgttggcacaggcagacaagtaatatttggcctcgtccatggagcaagcggtcacctcgcggacctgctccaccagcgcatccggcgcctcggtagtggacatgacgttgctctggaggttgtttcttgatagttaaatggcgagtttcggaaatagcgagcaaacgaccgaacagtgcgattttccagggacagataaatgcgtccgcacagctgtgggaaaaattgttagcagcctgtgttgggtaacgtcgcgcgccaagtacatgcacacagatctaaagcagatttatatgttctcattaaacctacaatgcaattaagcgaaacaacgatattcacacaacaacaatcaaaacacaataaatttagaaaacttacaatcaaagcctacttatataatttatatttcaaattaatatcatcaaagtaacaaccaaaacatgtatcgcaatctaaattttatttgaaccatcacttgcgtcaccttctgactgcaacctgcactgctccaaatggagtggctgccaacactgcttgcgccagtcgttgtgcagcactggtcgagtcagcagcagcaaaagaaaagacttttgcgtctcttgggcgaaaatcgagataagattcggtatcgaagggttcccaaaatatgactaatccgccgtcggaagacatcccacccacgtaatgaccgcgaatatatgagcttcgcgaatcgaagaaattcgttgccaattcgccagccagcagtctctttccaatcagattcgaatcaagtgcaacagtgagaaaaattgaaagtgaattgaagatcccagtgccatttgcttgcaacaagaaatatcaatgatttgttgcgcggattaaaagttgaactattcaacccggttgcccagttgtttatttgtttatttgttttctgttttgattattgttgcccgctgctgacgtcgcaagatggtatcgctgataaagaatcaactactcaagcacttgtccatgtaagttaatctgcgctagcaaatccaattacgaaactcaattaaaaactgcagtcggctggaaacagcttgcaaagtggagaacttggacacggaattgatttttcacactttttcgcatttcaattggattgtgtgttcgcgtatgtgtctgtctgtatttttcacagct

SEQ ID NO: 18971 - DNA, 1561 bp, DROSOPHILA
ttcggtcgtttgctcgctatttccgaaactcgccatttaactatcaagaaacaacctccagagcaacgtcatgtccactaccgaggcgccggatgcgctggtggagcaggtccgcgaggtgaccgcttgctccatggacgaggccaaatattacttgtctgcctgtgccaacgatgtgtccgccgcagtggctctgtttttcgaacaggcagcctccacatccacgccatcgggctccagtgccggtgctgcggctgaatcgctacccgttttggacgacgaggatgaggtaagggcgccaattgccccggtccgtgagcaattgatcctgcccgaggacgacaatttttttgcgtcggggagcagtagccggctgtcgcgtgtgacgcagcgcgtcaaggttcatcccctgcgggactttgcccgcgagggcgctctaatggaggagcagctgcaggccactggcgtctatgccgatcccaatcgaatccgtcgcggacgggccgcccagatggtggtggccggtcaggccatggcacttaacagacggtccacaacggacacggcaaccagcacatcccgcctcggagacctattccgcccgccaacggacatactctactccggatcactaaccgctgccagggagtttgccaccaagcgtcagcgctggttgctggtcaacgtgcaggacgaaaactttcagtcgcagactttgaaccgcgatgtctggtcggacaaggagcttaagaaactgatacgtcgccagttcaccttctggcaggtggacaacgacacctcggaaggacgccgctttgtggccttctaccactgcgccaccctgccttacatatgcgtgatcgatccccgtactggtgaggaagtgtggcgcagcgcagagccgaagctggagaatattcttcccgatttgaggcagttcttgaaggagcaccgtgactttattcaggaggatgcaccaggcacctcgaagcgttcggccacgtacatcgatgatgacgaggtgcccgatccggaggcctcgtgctcctcgacagccagttcgaaggaaatgcccaagaaacgtgccaaggttctggagctaaccgaagaggagcagcttgagttggccatcaagaattccataaacgagaacggtggtggcggaggcgaaggcaaccagaaaaacgatagtcccgatggagccagcgataatgagagccttgaggagttcgatgatgaggagctcaagggtgtggccgccgcctctttcgagaatcacttgggcgaggccaagactgaattgactgcccttaaactgcgcctgctcaacgccgccggaacagatgagatggtccagctgcgctggccctcggacaccaaactgcaaactttgcggctgtacatcagccagacgcacaagcacatccctcaggacggctacaagctcatttgcgccttcccgcgaaaattcctggaggcggagcataacgatagctccctgaaggaactcggcctgcatccatcggcaaatctgcatctcacaaacgcggacgatcagtag

SEQ ID NO: 18972 - protein, 496 aa, DROSOPHILA
MSTTEAPDALVEQVREVTACSMDEAKYYLSACANDVSAAVALFFEQAASTSTPSGSSAGAAAESLPVLDDEDEVRAPIAPVREQLILPEDDNFFASGSSSRLSRVTQRVKVHPLRDFAREGALMEEQLQATGVYADPNRIRRGRAAQMVVAGQAMALNRRSTTDTATSTSRLGDLFRPPTDILYSGSLTAAREFATKRQRWLLVNVQDENFQSQTLNRDVWSDKELKKLIRRQFTFWQVDNDTSEGRRFVAFYHCATLPYICVIDPRTGEEVWRSAEPKLENILPDLRQFLKEHRDFIQEDAPGTSKRSATYIDDDEVPDPEASCSSTASSKEMPKKRAKVLELTEEEQLELAIKNSINENGGGGGEGNQKNDSPDGASDNESLEEFDDEELKGVAAASFENHLGEAKTELTALKLRLLNAAGTDEMVQLRWPSDTKLQTLRLYISQTHKHIPQDGYKLICAFPRKFLEAEHNDSSLKELGLHPSANLHLTNADDQ

SEQ ID NO: 18973 - DNA, 3399 bp, DROSOPHILA
tatacatatgttttaatatttatataaacgggatctgctgattttaagaacatatgtatatacatgtttatatataataaaaaaaggtaaatgaattctgcgtgactcaaaaggtcacattcacttagttttcatcataaagttatacaatttcgttgttatgggtacatggaattttgtgactaacactatttattaccattagcgtttaaaattcatgaaatttggatgcctacttgagctgtcaggtgtttttcattttaacaatgggatgacaacagcacaattgcttaaatgaaatcatcaaaacggataatttaattacttagacaattatttcatctaatattgtagttatgcatagaagatatatacatatttacatgtatatgtatctttgtacatatgtacatgtattgtacagattaatgtcacgtaccggcgaaacttcaatttgctcagaatatgacctctaaattttaatattaatgaaattgatgaatatgtatttatgtggggatgttaggatttttccatttgcatttacttatgtacatatttatgtacaatataaccaattgatgttcatcagacgtgctcatatatgtgtatgtttcgtgtgcctatatatgcacgtatgtaattgccggcaactaagctcacaagaaagctcaacttccgtcaacaaaattgagcaggtgaaatggccataaaaatatcccaataaacatttgtccgtataaattaaaaaatccatatactttataggtcactttaactgtctaagatcagaagtttttaaagttaagcgtatcttatgtacatatctacttattatattcatataatgatgcttgcaaaaagtctattgggtagcattgagctttcacgttactgagagcaaaagctcttttttattgcggtagccgctctcgagcttgacatgcacgtccttcatctgactttgaacaatttttcgcccgagttttcgcccatagaaagcgctcaaaatttctcagccatcacagtcgattccttgcaagcaagccgataggtagtgtttccctcaattccgcggaaaactttccaagtactaactgctttacatatacatacattactttccagataaacaaaaagttaaccatgtcgaagattggtatcaatggatttggtcgcatcggccgcttggttctccgcgccgccattgataagggcgccaacgttgtggccgtcaacgatcccttcatcgatgtgaactacatggtctacctgttcaagttcgattcgacccacggacgttttaagggcaccgttgccgccgagggcggtttcctggtggtcaacggccagaagatcaccgtcttcagcgaacgcgacccggccaacatcaactgggccagcgctggtgccgaatacatcgtggagtccactggcgtgttcaccaccatcgacaaggcatccactcacttgaagggcggtgccaagaaggttatcatctcggccccatccgccgatgctcccatgttcgtttgcggcgtcaacttggatgcctacaagcccgacatgaaggtggtctccaacgcatcgtgcaccaccaactgcttggctcctctggccaaggtgatcaacgacaacttcgagatcgtcgagggtctgatgaccaccgttcatgccaccaccgctacccagaagaccgtcgatggaccttccggcaagttgtggcgtgatggacgtggcgctgcccagaacatcattccagcttccactggagctgccaaggccgtgggcaaggttatccccgccctcaacggtaagctcaccggaatggcattccgtgtgcccactcccaacgtttccgtggtcgatttgaccgtgcgcttgggcaagggtgcgtcctatgatgaaattaaggccaaggttcaggaggccgccaacggacccctgaagggtatcctgggatacaccgatgaggaggtcgtttctaccgatttcctcagcgacacccactcgtcggtgttcgatgccaaggctggcatttcgctaaacgacaagttcgtgaagctgatctcttggtacgacaacgagtttggctactccaaccgcgtcatcgacctgatcaagtacatgcagagcaaggattaaatgtggaacaccaagaacactacccacccacactctacgtaaaagttaaagattagggcgcggtagaatggggtgagacacttcagaaacggcctgaaaatggcatcacataacttatatatatattgctccccggtggagcatcacctacatacatatgcgctatgctctgaaatgctactgttttcgctcttcaattaccagccacattggaaaattattaatataatacatccattatacacataaatatgtttactgttgttgaataaagtttcactctgtgtgtagttttaaaaatgccgactcataagcatttaaatatttatttttgcctttttatttggtataaaccgttgaaatacctaaaatagtatgagtattactttaaattgtttttttcatttgctatatttggaagtaatatatatataacagaaatgtgtcgatattttttttaagtcgattggtttttgaatgattacataacttgttaaagttttcaaataattttaaatgagcctgattctatggtattgttatcggcaaaaatcgggcttttacagatttcgataagagcgaccttaaacccttcagttgaagcaatgtataaacagaagttatcgatatttggagagactaacggtggcatattgtctgtgtaagcctggctttttggatacatttctgagaaaataatgtttctctgccgatttatatttgcataattggcaaatataatcaaatattttggttgactgcatcatttcaacagcacttcaccattatatcgttatcgatatttaatcgcttgctataccgtcttttcgattaattttctcacacgggcacactaattttcagaacattttaatactggcatgtaaataaaataatcaattgatgaaaccttaaaataaaatgtgaattattcaacatgcagtagcaacaaacggacacaaatcagcataagagttcaagacttctggttcttgatgaatgtaaatgaaagttaccgagtgaaaacgccataacttgtgtaaaactgacggggcgaacaaagagtatgttttccgagcgaatttaacgattgtgcagtgtgtgtgtggtacacattttccccaacgaaatataatgaaacataagtgcatcgggtaaaatcatctcgagttcacatcttacgtatgtgcgtagtgaacataaatctgtatacatattggtatatacatatgtatgtatgttggagatatacgt

SEQ ID NO: 18974 - DNA, 1325 bp, DROSOPHILA
agcgctcaaaatttctcagccatcacagtcgattccttgcaagcaagccgatagataaacaaaaagttaaccatgtcgaagattggtatcaatggatttggtcgcatcggccgcttggttctccgcgccgccattgataagggcgccaacgttgtggccgtcaacgatcccttcatcgatgtgaactacatggtctacctgttcaagttcgattcgacccacggacgttttaagggcaccgttgccgccgagggcggtttcctggtggtcaacggccagaagatcaccgtcttcagcgaacgcgacccggccaacatcaactgggccagcgctggtgccgaatacatcgtggagtccactggcgtgttcaccaccatcgacaaggcatccactcacttgaagggcggtgccaagaaggttatcatctcggccccatccgccgatgctcccatgttcgtttgcggcgtcaacttggatgcctacaagcccgacatgaaggtggtctccaacgcatcgtgcaccaccaactgcttggctcctctggccaaggtgatcaacgacaacttcgagatcgtcgagggtctgatgaccaccgttcatgccaccaccgctacccagaagaccgtcgatggaccttccggcaagttgtggcgtgatggacgtggcgctgcccagaacatcattccagcttccactggagctgccaaggccgtgggcaaggttatccccgccctcaacggtaagctcaccggaatggcattccgtgtgcccactcccaacgtttccgtggtcgatttgaccgtgcgcttgggcaagggtgcgtcctatgatgaaattaaggccaaggttcaggaggccgccaacggacccctgaagggtatcctgggatacaccgatgaggaggtcgtttctaccgatttcctcagcgacacccactcgtcggtgttcgatgccaaggctggcatttcgctaaacgacaagttcgtgaagctgatctcttggtacgacaacgagtttggctactccaaccgcgtcatcgacctgatcaagtacatgcagagcaaggattaaatgtggaacaccaagaacactacccacccacactctacgtaaaagttaaagattagggcgcggtagaatggggtgagacacttcagaaacggcctgaaaatggcatcacataacttatatatatattgctccccggtggagcatcacctacatacatatgcgctatgctctgaaatgctactgttttcgctcttcaattaccagccacattggaaaattattaatataatacatccattatacacataaatatg

SEQ ID NO: 18975 - protein, 332 aa, DROSOPHILA
MSKIGINGFGRIGRLVLRAAIDKGANVVAVNDPFIDVNYMVYLFKFDSTHGRFKGTVAAEGGFLVVNGQKITVFSERDPANINWASAGAEYIVESTGVFTTIDKASTHLKGGAKKVIISAPSADAPMFVCGVNLDAYKPDMKVVSNASCTTNCLAPLAKVINDNFEIVEGLMTTVHATTATQKTVDGPSGKLWRDGRGAAQNIIPASTGAAKAVGKVIPALNGKLTGMAFRVPTPNVSVVDLTVRLGKGASYDEIKAKVQEAANGPLKGILGYTDEEVVSTDFLSDTHSSVFDAKAGISLNDKFVKLISWYDNEFGYSNRVIDLIKYMQSKD

SEQ ID NO: 18976 - DNA, 5656 bp, DROSOPHILA
gtaaatgtttgtgtcgtttttcaatcagttgtccagtttttggggctgtaatgggaatatttatttatttatttggtagaaaaacaaaatggttttacttttataagagtttatttttatttgaaactttacgatcgtagccgacttctgttgctgttgtgtctcattcatagagttaaatactttttagagcgcatctttttttttttttgtttctgcatcgatctctgttcatagcaaactcactgcatttctgtgtaattcttgacctgttttcttgcgattgcatgcgtaaagttgcactaaattatagataaaccctctaaaagttgcacttaaaaatttcgatctttcgtcaggcgatgtctttgtttatctcacttacggtttgtatacatacatatatattcaagtgtattaatttgcaaaaatatctattggtatatagtctgatttagaagaacgcctaagatgcagttgtcggataaactgcacacatgcacatatgtatgtaagtacgtctatatggggattccatcgaaatacgcaagtcaaacggaaagttcttcaacaatcagcaacaaagagttacagtagtaataataataataaacatttaagctacaattgtgatgacactcgcaaatgccttggcctcaaataaatttgcattaaatatttgatttaatttcatgtaaaatgcttacaaattaattgtacaatgtgaaacaaggccatgtatgtaaatgaagcgataaagctgctttcaaaattctttcttcttttcttcgttattttttatgatttattatttatgattaatgtctgcattctccttcagcattaggcgcgagtttaatgacttacggatcagcttacttataagtatatatatatatttttgttctttattaaaaaatgctagaaaacacaaaaatcattagttgtggatttttacttcattttttatttgattttttcttgtttgtttgtttttaagagtaatcttagttcttcttgttgttttatacaaaaaatcaacaaaatagtaaaactaaaactaaagcaaagaattaatttaaaaagggtcacatgaaaactaagaaagctgaataaatcgaaatgaagatagttgattcaaatcggaaattgcgtggaactcataagaaatttatttgcattgctgcgtctatataatcgttttcttcttaatttccctcactatatatgctttttaaatgtttcgttcgttaaaaacttaaagacacttggacaatgtttgaaactgctacgagttgttggttgataaattgttttgggtctcttcaaatttgatttacaattatcgattgatgttgattgcaattatacaattaatatgtaaacattgctgctagacttgttatttatttaatgcctggatgaatattaaaaccattcaaataatgcttaataaataaataaacatgtttatttgtggttgtttctcttgctagtgcgggttctttacttgtccttctcagactcggcagcggcctcgggcttcttgttgccaatggggatggccactcggatcctggaacacaaaagcgatttagaatatctttcttacggagattttaaatggttaaactcacttgtcggtgatttctgtcaatttgctgcgcaccagatccaagtgagtgtcgatcgattgcttgttgttctcgtagaccttgggcaaggtaaacagcgagacaaaggctgcacaaatatagaagataatcagttctgttttcgattggtttaagttaatcctccacttacccaagatgaccagagtcatgccattgaaccaggcacccacgtaggtgaagacccacagaatgacgccgaacttgatcgaatcgatgatatcctcaacaagaaacagacgcctcagctcggagatgaagccattgatatgtgccacagccacgccggcaatgttctgtaccttttcgtgcgacagcgtcagatccagctccaggtaatccctgatttcgtaaggagttacgttagttaaacttttttttttgttgggagacatcagtctacaatactcacttaaaggggtgaccctcgtttgtcttttgcacggcctgtgtcacagatttgtagattctgaaggcgacggtgccgaagagggttaggagcgacaagtaggcgaacacgctgatcaccgagaagctggagatggccgccagtgtgatcaggccagcgccgaagacaatgccggatttcttcacatcgcgccagtagataagggattccactggaaagaagagcaaatggatcaattagaatctgcttttgtccaccatacacatttgatttttcattcccaaattataaccctcataaactgtgaaaagagacgagatacgagtggaaaatgtggactgagaatccccaaatatacgaagcacacatacgttcagcgtctcgcacgcatctatgtacatatatcttttcagctggcggcaattatgcaatctatgagataaatagatgagatacagattcgagaactgtggcaccatctgccgaggtggtaattatcgttagcatttgttcaacggcatgcaactaagctctgatactataatatctgaacccaagcacccccttttctcagcccggttggttcactcacacaatctgttcgacatttttcgggtattcaagttttcgggttttccaacggatcgttcgcggtgctcctacgtttgacgttcgctgccaagttctacacactagagaagtattatttggcgtctgctggtcgggggcagaacgtatatgaaaatgtctagaagaagagggccaaattgtccggacccagccggaaaacaaaagagagccgtaaagagcatagctaccaagtggaaagagcgatggcaaaagagtgtttgagtggcgaacggatatggaaatggcagtcgcaaacgcttataaatcgattgtccagctcgtgccggaatgtatctcttggattcggattcagtcgctgacgtaaacacctctccatctgctataacttggccatcggatcgggcttcattcgctttcgtcggatttgccgataagaagtcactgccccgcggcgtctgggttaacccaattaagatatgtactaaaacaaacaaatcgtctataaatacacatctcaagtgttggaaataggggatttgccaactcattaagtggtcattagtttgaactgatttgttaggttgctcaggtagcaagctacttagggcaatccagtaaggtgctacccgcaaggaaatgatatatgaccaataattaacgacaagcatttattattttatagtaccattgggtttggccaacacattaatatgcttatgatagtatgcttgcttggagattaattgaaatctatatattaatcctcaataaaaatggtatataaatagtataaatggtatatcactttagaatacacctaaacaaatagcatatagatagatatacgaaaagtctgcaagctgggtaaactagtttcagattcgaattcgtctaagttgccaggccagactcgatctgaggggtatattatgtaaatatgggtgaaataaattagaaaggagacgcacaatagtgatgagatggcagcgtctgaggcccttagcttggtgaaaagactgagaaagctctctgatgggagaaagttacccgagtaccaattgaatcgaagagttcgttacaattgcaactggaatcccgctgaagatttctttggttggaactggtttggtttcgttcgccttgaaacccgttttggccgaaagtgaagtgcagcctcatcgggacagcagaacacgaatgtagtgatagaaaataattaccgaaaagaaggcagataagagcgactggcactgataacgtatatcaagtacctgctatttagacacttgtttaataattcaatttaaaattgccaatgcaagctggatttatgatgatgggcgagcattttctgttgattgctggttgccaagcactcagttcacaacgtggcacaaaatgaatatatatgaaattagcactgtgtctagaatggaagcgaaaaaaaatttgcatagcgaaggctggatttcattggatagtgatttttggttatgactttcattgaacattttagccacgttggcgctgatgatattccgctgctgacgttggcagcaatcactgctccgctccataaatacattttattccacgaccccccgaagataagaccctcgttgtgttgctattgttgttttcatgtgggctttaagaacctagagtggtcaacgtggaccagcagccaggtgatagtgaaagcggagatagctccctgatggtttcccaattggtattacctggtccgcgttctggaagcggctgaaaattgccattggagttgttgcgtgagtagcgtttgctgccgcctgccatttttttgtgtattttaaaaacagttagcttggcgccaaaatgtatgcaaagcgggctggactttcgcgtgtctaggcttaattacagcgataaagttagttagttggctagtcacgcacacacacaaccactggcacacgaatgggacgattcggccgaccgtctgaatcgagcgcagcaaaagaactggaagaagtttgagcacaaattaaaccaacaagcctccaatttgccgtcgcatatggggaactgcttggatagagcgagcgggacagcgattgtagcgggtgggggagcaagagaaaggcagagcgagagggcgcgagagtggcggcaaacaagttttttagattcaaaaagcagtgggagccccatcaagcagtgcacagtgggcacgccagcaatccaatcgattaatggactacatatgcaatttaatgtttccaataaacaccattaaagtctataaaatgtgtattcgttcttgatggtagatttgttttttcataaatcagaagattttgttatatccgcttacaaaccaatcaagacaacccactgtgcggtagaagagagctctccattggagagcgggagagagcaagagagacgatccgcattgaaagtaaaagataaggcgcagtaacaacaacaaatccggcatgggggccgcaaggggagcaagggctgtacgtatgtacatatgtcagcaaacgtgtcaacctcaaccacgaacttggactcgcgattcggctgtgtggagccgaagattggagattggacttacatacgtagtgttacgttgagtgacgtagtgggtggggttttgcggttgaatcatgaatccgaagcgtgaccaacaatggcgaaatgcgggaaatgccaacacatacgatgggcctaaatcaataaattaaatctgcactcacatcgcctagcatttgtactgcttatcggggctcaattgggttcaatggactgcttgtgtcagtttgacaaccactgtgcgtggcaataaccaaagccgcgctcaaatgaaaacgcaataggcgggaaaactgcgtactggcgaaatgcgaaaaagcgttagttagtgacatcatcattggcaaacacttaaatccaaccccaatcacatctaacgcttttgcgttgctttccaacattt

SEQ ID NO: 18977 - DNA, 1343 bp, DROSOPHILA
ttcagacggtcggccgaatcgtcccattcgtgtgccagtggttgtgtgtgtgcgtgactagccaactaactaactttatcgctgtaattaagcctagacacgcgaaagtccagcccgctttgcatacattttggcgccaagctaactgtttttaaaatacacaaaaaaatggcaggcggcagcaaacgctactcacgcaacaactccaatggcaattttcagccgcttccagaacgcggaccagtggaatcccttatctactggcgcgatgtgaagaaatccggcattgtcttcggcgctggcctgatcacactggcggccatctccagcttctcggtgatcagcgtgttcgcctacttgtcgctcctaaccctcttcggcaccgtcgccttcagaatctacaaatctgtgacacaggccgtgcaaaagacaaacgagggtcacccctttaaggattacctggagctggatctgacgctgtcgcacgaaaaggtacagaacattgccggcgtggctgtggcacatatcaatggcttcatctccgagctgaggcgtctgtttcttgttgaggatatcatcgattcgatcaagttcggcgtcattctgtgggtcttcacctacgtgggtgcctggttcaatggcatgactctggtcatcttggcctttgtctcgctgtttaccttgcccaaggtctacgagaacaacaagcaatcgatcgacactcacttggatctggtgcgcagcaaattgacagaaatcaccgacaagatccgagtggccatccccattggcaacaagaagcccgaggccgctgccgagtctgagaaggacaagtaaagaacccgcactagcaagagaaacaaccacaaataaacatgtttatttatttattaagcattatttgaatggttttaatattcatccaggcattaaataaataacaagtctagcagcaatgtttacatattaattgtataattgcaatcaacatcaatcgataattgtaaatcaaatttgaagagacccaaaacaatttatcaaccaacaactcgtagcagtttcaaacattgtccaagtgtctttaagtttttaacgaacgaaacatttaaaaagcatatatagtgagggaaattaagaagaaaacgattatatagacgcagcaatgcaaataaatttcttatgagttccacgcaatttccgatttgaatcaactatcttcatttcgatttattcagctttcttagttttcatgtgaccctttttaaattaattctttgctttagttttagttttactattttgttgattttttgtataaaacaacaagaagaactaagattact

SEQ ID NO: 18978 - protein, 222 aa, DROSOPHILA
MAGGSKRYSRNNSNGNFQPLPERGPVESLIYWRDVKKSGIVFGAGLITLAAISSFSVISVFAYLSLLTLFGTVAFRIYKSVTQAVQKTNEGHPFKDYLELDLTLSHEKVQNIAGVAVAHINGFISELRRLFLVEDIIDSIKFGVILWVFTYVGAWFNGMTLVILAFVSLFTLPKVYENNKQSIDTHLDLVRSKLTEITDKIRVAIPIGNKKPEAAAESEKDK

SEQ ID NO: 18979 - DNA, 3757 bp, DROSOPHILA
gtaaatgtttgtgtcgtttttcaatcagttgtccagtttttggggctgtaatgggaatatttatttatttatttggtagaaaaacaaaatggttttacttttataagagtttatttttatttgaaactttacgatcgtagccgacttctgttgctgttgtgtctcattcatagagttaaatactttttagagcgcatctttttttttttttgtttctgcatcgatctctgttcatagcaaactcactgcatttctgtgtaattcttgacctgttttcttgcgattgcatgcgtaaagttgcactaaattatagataaaccctctaaaagttgcacttaaaaatttcgatctttcgtcaggcgatgtctttgtttatctcacttacggtttgtatacatacatatatattcaagtgtattaatttgcaaaaatatctattggtatatagtctgatttagaagaacgcctaagatgcagttgtcggataaactgcacacatgcacatatgtatgtaagtacgtctatatggggattccatcgaaatacgcaagtcaaacggaaagttcttcaacaatcagcaacaaagagttacagtagtaataataataataaacatttaagctacaattgtgatgacactcgcaaatgccttggcctcaaataaatttgcattaaatatttgatttaatttcatgtaaaatgcttacaaattaattgtacaatgtgaaacaaggccatgtatgtaaatgaagcgataaagctgctttcaaaattctttcttcttttcttcgttattttttatgatttattatttatgattaatgtctgcattctccttcagcattaggcgcgagtttaatgacttacggatcagcttacttataagtatatatatatatttttgttctttattaaaaaatgctagaaaacacaaaaatcattagttgtggatttttacttcattttttatttgattttttcttgtttgtttgtttttaagagtaatcttagttcttcttgttgttttatacaaaaaatcaacaaaatagtaaaactaaaactaaagcaaagaattaatttaaaaagggtcacatgaaaactaagaaagctgaataaatcgaaatgaagatagttgattcaaatcggaaattgcgtggaactcataagaaatttatttgcattgctgcgtctatataatcgttttcttcttaatttccctcactatatatgctttttaaatgtttcgttcgttaaaaacttaaagacacttggacaatgtttgaaactgctacgagttgttggttgataaattgttttgggtctcttcaaatttgatttacaattatcgattgatgttgattgcaattatacaattaatatgtaaacattgctgctagacttgttatttatttaatgcctggatgaatattaaaaccattcaaataatgcttaataaataaataaacatgtttatttgtggttgtttctcttgctagtgcgggttctttacttgtccttctcagactcggcagcggcctcgggcttcttgttgccaatggggatggccactcggatcctggaacacaaaagcgatttagaatatctttcttacggagattttaaatggttaaactcacttgtcggtgatttctgtcaatttgctgcgcaccagatccaagtgagtgtcgatcgattgcttgttgttctcgtagaccttgggcaaggtaaacagcgagacaaaggctgcacaaatatagaagataatcagttctgttttcgattggtttaagttaatcctccacttacccaagatgaccagagtcatgccattgaaccaggcacccacgtaggtgaagacccacagaatgacgccgaacttgatcgaatcgatgatatcctcaacaagaaacagacgcctcagctcggagatgaagccattgatatgtgccacagccacgccggcaatgttctgtaccttttcgtgcgacagcgtcagatccagctccaggtaatccctgatttcgtaaggagttacgttagttaaacttttttttttgttgggagacatcagtctacaatactcacttaaaggggtgaccctcgtttgtcttttgcacggcctgtgtcacagatttgtagattctgaaggcgacggtgccgaagagggttaggagcgacaagtaggcgaacacgctgatcaccgagaagctggagatggccgccagtgtgatcaggccagcgccgaagacaatgccggatttcttcacatcgcgccagtagataagggattccactggaaagaagagcaaatggatcaattagaatctgcttttgtccaccatacacatttgatttttcattcccaaattataaccctcataaactgtgaaaagagacgagatacgagtggaaaatgtggactgagaatccccaaatatacgaagcacacatacgttcagcgtctcgcacgcatctatgtacatatatcttttcagctggcggcaattatgcaatctatgagataaatagatgagatacagattcgagaactgtggcaccatctgccgaggtggtaattatcgttagcatttgttcaacggcatgcaactaagctctgatactataatatctgaacccaagcacccccttttctcagcccggttggttcactcacacaatctgttcgacatttttcgggtattcaagttttcgggttttccaacggatcgttcgcggtgctcctacgtttgacgttcgctgccaagttctacacactagagaagtattatttggcgtctgctggtcgggggcagaacgtatatgaaaatgtctagaagaagagggccaaattgtccggacccagccggaaaacaaaagagagccgtaaagagcatagctaccaagtggaaagagcgatggcaaaagagtgtttgagtggcgaacggatatggaaatggcagtcgcaaacgcttataaatcgattgtccagctcgtgccggaatgtatctcttggattcggattcagtcgctgacgtaaacacctctccatctgctataacttggccatcggatcgggcttcattcgctttcgtcggatttgccgataagaagtcactgccccgcggcgtctgggttaacccaattaagatatgtactaaaacaaacaaatcgtctataaatacacatctcaagtgttggaaataggggatttgccaactcattaagtggtcattagtttgaactgatttgttaggttgctcaggtagcaagctacttagggcaatccagtaaggtgctacccgcaaggaaatgatatatgaccaataattaacgacaagcatttattattttatagtaccattgggtttggccaacacattaatatgcttatgatagtatgcttgcttggagattaattgaaatctatatattaatcctcaataaaaatggtatataaatagtataaatggtatatcactttagaatacacctaaacaaatagcatatagatagatatacgaaaagtctgcaagctgggtaaactagtttcagattcgaattcgtctaagttgccaggccagactcgatctgaggggtatattatgtaaatatgggtgaaataaattagaaaggagacgcacaatagtgatgagatggcagcgtctgaggcccttagcttggtgaaaagactgagaaagctctctgatgggagaaagttacccgagtaccaattgaatcgaagagttcgttacaattg

SEQ ID NO: 18980 - DNA, 1182 bp, DROSOPHILA
cgaacgtcaaacgtaggagcaccgcgaacgatccgttggaaaacccgaaaacttgaatacccgaaaaatgtcgaacagattgttggaatcccttatctactggcgcgatgtgaagaaatccggcattgtcttcggcgctggcctgatcacactggcggccatctccagcttctcggtgatcagcgtgttcgcctacttgtcgctcctaaccctcttcggcaccgtcgccttcagaatctacaaatctgtgacacaggccgtgcaaaagacaaacgagggtcacccctttaaggattacctggagctggatctgacgctgtcgcacgaaaaggtacagaacattgccggcgtggctgtggcacatatcaatggcttcatctccgagctgaggcgtctgtttcttgttgaggatatcatcgattcgatcaagttcggcgtcattctgtgggtcttcacctacgtgggtgcctggttcaatggcatgactctggtcatcttggcctttgtctcgctgtttaccttgcccaaggtctacgagaacaacaagcaatcgatcgacactcacttggatctggtgcgcagcaaattgacagaaatcaccgacaagatccgagtggccatccccattggcaacaagaagcccgaggccgctgccgagtctgagaaggacaagtaaagaacccgcactagcaagagaaacaaccacaaataaacatgtttatttatttattaagcattatttgaatggttttaatattcatccaggcattaaataaataacaagtctagcagcaatgtttacatattaattgtataattgcaatcaacatcaatcgataattgtaaatcaaatttgaagagacccaaaacaatttatcaaccaacaactcgtagcagtttcaaacattgtccaagtgtctttaagtttttaacgaacgaaacatttaaaaagcatatatagtgagggaaattaagaagaaaacgattatatagacgcagcaatgcaaataaatttcttatgagttccacgcaatttccgatttgaatcaactatcttcatttcgatttattcagctttcttagttttcatgtgaccctttttaaattaattctttgctttagttttagttttactattttgttgattttttgtataaaacaacaagaagaactaagattact

SEQ ID NO: 18981 - protein, 202 aa, DROSOPHILA
MSNRLLESLIYWRDVKKSGIVFGAGLITLAAISSFSVISVFAYLSLLTLFGTVAFRIYKSVTQAVQKTNEGHPFKDYLELDLTLSHEKVQNIAGVAVAHINGFISELRRLFLVEDIIDSIKFGVILWVFTYVGAWFNGMTLVILAFVSLFTLPKVYENNKQSIDTHLDLVRSKLTEITDKIRVAIPIGNKKPEAAAESEKDK

SEQ ID NO: 18982 - DNA, 13206 bp, DROSOPHILA
gtaaatgtttgtgtcgtttttcaatcagttgtccagtttttggggctgtaatgggaatatttatttatttatttggtagaaaaacaaaatggttttacttttataagagtttatttttatttgaaactttacgatcgtagccgacttctgttgctgttgtgtctcattcatagagttaaatactttttagagcgcatctttttttttttttgtttctgcatcgatctctgttcatagcaaactcactgcatttctgtgtaattcttgacctgttttcttgcgattgcatgcgtaaagttgcactaaattatagataaaccctctaaaagttgcacttaaaaatttcgatctttcgtcaggcgatgtctttgtttatctcacttacggtttgtatacatacatatatattcaagtgtattaatttgcaaaaatatctattggtatatagtctgatttagaagaacgcctaagatgcagttgtcggataaactgcacacatgcacatatgtatgtaagtacgtctatatggggattccatcgaaatacgcaagtcaaacggaaagttcttcaacaatcagcaacaaagagttacagtagtaataataataataaacatttaagctacaattgtgatgacactcgcaaatgccttggcctcaaataaatttgcattaaatatttgatttaatttcatgtaaaatgcttacaaattaattgtacaatgtgaaacaaggccatgtatgtaaatgaagcgataaagctgctttcaaaattctttcttcttttcttcgttattttttatgatttattatttatgattaatgtctgcattctccttcagcattaggcgcgagtttaatgacttacggatcagcttacttataagtatatatatatatttttgttctttattaaaaaatgctagaaaacacaaaaatcattagttgtggatttttacttcattttttatttgattttttcttgtttgtttgtttttaagagtaatcttagttcttcttgttgttttatacaaaaaatcaacaaaatagtaaaactaaaactaaagcaaagaattaatttaaaaagggtcacatgaaaactaagaaagctgaataaatcgaaatgaagatagttgattcaaatcggaaattgcgtggaactcataagaaatttatttgcattgctgcgtctatataatcgttttcttcttaatttccctcactatatatgctttttaaatgtttcgttcgttaaaaacttaaagacacttggacaatgtttgaaactgctacgagttgttggttgataaattgttttgggtctcttcaaatttgatttacaattatcgattgatgttgattgcaattatacaattaatatgtaaacattgctgctagacttgttatttatttaatgcctggatgaatattaaaaccattcaaataatgcttaataaataaataaacatgtttatttgtggttgtttctcttgctagtgcgggttctttacttgtccttctcagactcggcagcggcctcgggcttcttgttgccaatggggatggccactcggatcctggaacacaaaagcgatttagaatatctttcttacggagattttaaatggttaaactcacttgtcggtgatttctgtcaatttgctgcgcaccagatccaagtgagtgtcgatcgattgcttgttgttctcgtagaccttgggcaaggtaaacagcgagacaaaggctgcacaaatatagaagataatcagttctgttttcgattggtttaagttaatcctccacttacccaagatgaccagagtcatgccattgaaccaggcacccacgtaggtgaagacccacagaatgacgccgaacttgatcgaatcgatgatatcctcaacaagaaacagacgcctcagctcggagatgaagccattgatatgtgccacagccacgccggcaatgttctgtaccttttcgtgcgacagcgtcagatccagctccaggtaatccctgatttcgtaaggagttacgttagttaaacttttttttttgttgggagacatcagtctacaatactcacttaaaggggtgaccctcgtttgtcttttgcacggcctgtgtcacagatttgtagattctgaaggcgacggtgccgaagagggttaggagcgacaagtaggcgaacacgctgatcaccgagaagctggagatggccgccagtgtgatcaggccagcgccgaagacaatgccggatttcttcacatcgcgccagtagataagggattccactggaaagaagagcaaatggatcaattagaatctgcttttgtccaccatacacatttgatttttcattcccaaattataaccctcataaactgtgaaaagagacgagatacgagtggaaaatgtggactgagaatccccaaatatacgaagcacacatacgttcagcgtctcgcacgcatctatgtacatatatcttttcagctggcggcaattatgcaatctatgagataaatagatgagatacagattcgagaactgtggcaccatctgccgaggtggtaattatcgttagcatttgttcaacggcatgcaactaagctctgatactataatatctgaacccaagcacccccttttctcagcccggttggttcactcacacaatctgttcgacatttttcgggtattcaagttttcgggttttccaacggatcgttcgcggtgctcctacgtttgacgttcgctgccaagttctacacactagagaagtattatttggcgtctgctggtcgggggcagaacgtatatgaaaatgtctagaagaagagggccaaattgtccggacccagccggaaaacaaaagagagccgtaaagagcatagctaccaagtggaaagagcgatggcaaaagagtgtttgagtggcgaacggatatggaaatggcagtcgcaaacgcttataaatcgattgtccagctcgtgccggaatgtatctcttggattcggattcagtcgctgacgtaaacacctctccatctgctataacttggccatcggatcgggcttcattcgctttcgtcggatttgccgataagaagtcactgccccgcggcgtctgggttaacccaattaagatatgtactaaaacaaacaaatcgtctataaatacacatctcaagtgttggaaataggggatttgccaactcattaagtggtcattagtttgaactgatttgttaggttgctcaggtagcaagctacttagggcaatccagtaaggtgctacccgcaaggaaatgatatatgaccaataattaacgacaagcatttattattttatagtaccattgggtttggccaacacattaatatgcttatgatagtatgcttgcttggagattaattgaaatctatatattaatcctcaataaaaatggtatataaatagtataaatggtatatcactttagaatacacctaaacaaatagcatatagatagatatacgaaaagtctgcaagctgggtaaactagtttcagattcgaattcgtctaagttgccaggccagactcgatctgaggggtatattatgtaaatatgggtgaaataaattagaaaggagacgcacaatagtgatgagatggcagcgtctgaggcccttagcttggtgaaaagactgagaaagctctctgatgggagaaagttacccgagtaccaattgaatcgaagagttcgttacaattgcaactggaatcccgctgaagatttctttggttggaactggtttggtttcgttcgccttgaaacccgttttggccgaaagtgaagtgcagcctcatcgggacagcagaacacgaatgtagtgatagaaaataattaccgaaaagaaggcagataagagcgactggcactgataacgtatatcaagtacctgctatttagacacttgtttaataattcaatttaaaattgccaatgcaagctggatttatgatgatgggcgagcattttctgttgattgctggttgccaagcactcagttcacaacgtggcacaaaatgaatatatatgaaattagcactgtgtctagaatggaagcgaaaaaaaatttgcatagcgaaggctggatttcattggatagtgatttttggttatgactttcattgaacattttagccacgttggcgctgatgatattccgctgctgacgttggcagcaatcactgctccgctccataaatacattttattccacgaccccccgaagataagaccctcgttgtgttgctattgttgttttcatgtgggctttaagaacctagagtggtcaacgtggaccagcagccaggtgatagtgaaagcggagatagctccctgatggtttcccaattggtattacctggtccgcgttctggaagcggctgaaaattgccattggagttgttgcgtgagtagcgtttgctgccgcctgccatttttttgtgtattttaaaaacagttagcttggcgccaaaatgtatgcaaagcgggctggactttcgcgtgtctaggcttaattacagcgataaagttagttagttggctagtcacgcacacacacaaccactggcacacgaatgggacgattcggccgaccgtctgaatcgagcgcagcaaaagaactggaagaagtttgagcacaaattaaaccaacaagcctccaatttgccgtcgcatatggggaactgcttggatagagcgagcgggacagcgattgtagcgggtgggggagcaagagaaaggcagagcgagagggcgcgagagtggcggcaaacaagttttttagattcaaaaagcagtgggagccccatcaagcagtgcacagtgggcacgccagcaatccaatcgattaatggactacatatgcaatttaatgtttccaataaacaccattaaagtctataaaatgtgtattcgttcttgatggtagatttgttttttcataaatcagaagattttgttatatccgcttacaaaccaatcaagacaacccactgtgcggtagaagagagctctccattggagagcgggagagagcaagagagacgatccgcattgaaagtaaaagataaggcgcagtaacaacaacaaatccggcatgggggccgcaaggggagcaagggctgtacgtatgtacatatgtcagcaaacgtgtcaacctcaaccacgaacttggactcgcgattcggctgtgtggagccgaagattggagattggacttacatacgtagtgttacgttgagtgacgtagtgggtggggttttgcggttgaatcatgaatccgaagcgtgaccaacaatggcgaaatgcgggaaatgccaacacatacgatgggcctaaatcaataaattaaatctgcactcacatcgcctagcatttgtactgcttatcggggctcaattgggttcaatggactgcttgtgtcagtttgacaaccactgtgcgtggcaataaccaaagccgcgctcaaatgaaaacgcaataggcgggaaaactgcgtactggcgaaatgcgaaaaagcgttagttagtgacatcatcattggcaaacacttaaatccaaccccaatcacatctaacgcttttgcgttgctttccaacatttttatttggcgcgtttgaatgagtaagctgtgtttcaaatgatatcatagcaatgctcgctgacataattcctaaatgcgcgacaacaaacgtacatatgtacatagatgcaattattgtgtgcacctgacattgtcagaaagtctgcagaattgcataaggcaattatagaatagcagcgcattgaagcgaacagaaaataataaaataacccagaaagtacaataataatatgcaaaaaaaaattcaaggtttttttttggtatatatatatccactcacgcacgcaccccccacttgaaaccgcaaaaaagttccatgtttggcgagccactttggcttatcaacccaagttgcccagggggaagtgctgataatagaaaattcttctgagactagaaattgttttaattgtttcgcacagtaatcataaatgaaaaattgtcaccattgatacagcttttctatgaacttattgataacaagttatcaatgataccaaaaatattcacgtaactcctatctaatcgaatattaaacaagtggacttattagccctctacgccaaaattactctttccaatttttccttaagtcctcaacatttttcctaagacactaaaaagaatatttataaataaattatagctgcatttagagagaggggctgatttgaaaagagaggaaaagagagagcacgaggcgaggcgagaaataaaagaaatttccccaagggaaattccgtttcattcgattttcagctggccatgcggtcggccctcatatctagccaaaccctatatgtacatttatatgaacatataataatggaattcttccgcaacaattttcatttaattttacttacacgactcgcggttcaggggcaagtctttgagttcgcccaacgattgcagcagaccctgcagctgttccagaccagcagccatcgtatcttattgtgttgggattgactggattaactgagtatatacggttttagtaatatcactaaagcttttcgcccgactgcaagtggaagacaaaattggaaatgtagcgaaagttcggacgactttttcgcgcggttcacggatcgaggaaatgcgaataatgcaaccgcgggcattaacattagccaactgaacgatcgcgggccagagccgaagacgatcggatccgacctagacgaaagatatagaacccggccgagagttcctcgcacccgctggcggaactgatatggaaagtgccagccagtcgacggggccagataataggataggattaatattattatattatttcattcaccgctgatttatttgctttgcgacgataaccgcattggctaggtaggtgcacgtcttgatattgaatgtgatacagtggtcgctggctatgagagattagttggcttctttaggttactaaaatggccaatagagcagagtgtaccaaataataggtgtttgaaagtaggcaatgatagttagttcctatacagaattatctttctggaactttacactttctagtgaccactgtatccacatttgcatatattgtcagcgttagggcacctatccaagttatataattagaaaagtatccgcacaaaaaacacgaaaaattccgcgagtttttctggggcgggggcacacagattctgaatcggaataatgtcgaatgctaaatgctgcgacgacaatgacagaggcgcggatacgtgttttctgtcagctgcaagtgcaggtcattctacgagttcaaacagctgacacaatccgtggcattcgcagtgtagaaagggtatcctcatcccgcacagacactggcacacacttttaaccaaacgcacgggcacgcagagtgcggaaagaaccatttaccgatcttgttttcgtggtcgcgttctcgtgtttgttttctcgatctcgatctcgatctggacctagatcccgactctggggcaatgtgacgttgtcaaagtccgtacatcaactaaactacaattaatttcagatgcgctcagctcgtcgcagggcgaagcgaatacacacatgcccacacgaacacaagcgcacacacacacacgctgaaattacacacgcaggtacccaacgcagagaacagctgcgagcaatgaaataggttcacttttgtcaagtaaatgtaacacgatgaaaaaccatatgggattttatgtttagattaaaaggcaatggagattctttctttctgtctcagcttcatatgtttaaaaataattacttttataatttcccccacattttacaaaacatttaaaagctcttcaataaatccacaatacgtgaaactaattccttatccgaagatcactaacatcttggcccttactgtaggcaaataagggaagaggaaagggccaatggcgaatttcggaaagctaggtagccgactgattttctcccgaacatgtctctgcacgccacgatcaccgggaacaggtaaaaggaatcacagcgagcgaatgtccaggggagaagatggaagagcaaaaggaagctgaaccgaatcggttaacccgatctataggtcatacaaatgcgaatcggttataatttacagctacagtgaaggtaaacaaattgtcaagatgttgggttaaagtaggggtagtctatactatgcatttatagagattccgcagcttacaattgcttttaatgtacttaaaatctagccaattattgtattgatcgctatggatttaacatatcgagtgcacactgttccaatactctgttggtccccagttcaactgcttgaccgcccagtgcagcctacatcgcaatgtttaaatgttaaaccgcacggctagcagatcaacaccaacaacagcaacaccaacccaaagataatgccaacgacagcaacaaatgacagcgaatggctgaaatacttagctaaaatgctaaaattagcaagcaactgtgagtttgaacattgacgccggccgggtagtcagcatccaaagggggtgcgaacgggacagaacgagattgatgagagcagtaatgaatgagattcaaggttaacgatttcgcgccttgaagaagctgctcactgcttattttcaattgtgagctgcttgcagcaagcagtgcgaactgcttacacaaaagcgctcgaaatttaaaatttagaatgtacctattttcactttttgggatctgacgtcagcatcgataaaaccaaaagctctgggtgctcatgacttggcgacttaacgacgacccttatcttaaatttctaattgcagaccagttatcgcttgccaacgaattaagtcatttctactggcttatcattgttatttgtgcggtttttctaattttgctttttgcacttgaatgcaaatttttcgcatatataaataatcttttttttcggcgctgaattaacaaaggccagaaaaatgccgtcgatgatctaatcgatttcgcctggaagtataaaattaaatatgtatacagacaacaagaaaacttgtcgtccgcggcacgtagcatttctctttttggccgttactcattcgagttcttaagacagttcaagaatttaatgaaataaatacctaaaaaccgttggtttagatagttatatctttaaaattaataccaatgtagtcatggctaaaaactgaaatcatagtcatttcgatatttaaatacgaaatattcataatatatcaaaatttcaccacttcgaatggaaagcacaaactagaacaatggatgactaatcatgattctgaacgctagactggctgcgaaaacaccaatgtctaattaacagttttacattcaccgcccgcttggcttttctctgctggagaatgctaatgtgggccgacttccgactgactgcctcgtttattcaagtattcgagtgcccacagtgggcagtccacggcgagcggcacttaagctcctaaccatgtccaaattgggcaccgcactcgggctgaaagcccggagaaatccatcagcgccacaggttcatgtctagccactcgtgcaaattgtattttggccaatagaggagaatcatgtggaaaagaaggggaagcagatttttgcaaattttggaagtggctgggtaatgaaatattgatattctagagagcttgctgcttttcttatagtatatgtcagtaatatacatatgtacacttaaacttaaaccatgatgaatagctagacaataaatatttacgacatctagatgcaataatgagttagtagcgatgtaaaattaattggcccattaaactattttagtttgacttaagtagaaaatcaaggcaccgattttctttatactgttagtagatttattgatagcaattcgagattctgagcatcacaaatgtaataaaaaagcgatttaattcaaagccaaagtccagcctttgaagtgactaaggaatgcacagtccgagtgcatggttaatgagtgatttttaataataactaaagtcgtcagacggcgaccaaattaaatgcgaattagtcataacaaacgcaaataatttttaataaaaagcggtgcactaagtgagtataagtacatatgtacacagttttatacagacaaatacatactagtacctatagaaagtgcatggagcgttagactgagctcagattgcatgcgaggcctttgccccccagttttgtggtggggaaaacggcagacgccccatatcagttcgagattttcagtggtaaagtgtttttgtgaatatgcaacactagaggagcttctcaaaatcgaaaattttaaatgtcctacaactaagtatgaatttaaaagaaaatgtttggcatttgctgtataacttgactatctttcacaagtcaaaatatagttctggttaagtggttctactgtagtggacggcactgtgccgtttggcggtattgctgggttggcttagcatgcgatccgattacggttaccgctcaccgcatcagtgcaaatcgtttggctgtcgggtaactgaactatatgaaaacgacggctaattgcaatgcgactggacttgcaaccgaatatatgaaaagaatggcagcgaggggtgggggctgcaaagtgagggggcgtggcagcaaccaccatgagcattacagaaaattcaaattatttactatgtaccctccaggtgaaagctgcaccaaacatgaaactaaactttacagtgtagttacaaagaagaaaatgttgcttaaatttatatatgtatttcagtaataaattcatcaataagaggagaggtttaaatacgtactatacatatgtacatatatatgcgtacagttaaaacgttttgaatgttatccgcatcggggcatcccccaatacatgtaatattgccctagaaaagtacagagacaatgcagagtggagcactcgaaaggatatgcggaataatgtggcatactttctggggcactgcttgcagcaaaggaatatgaaaacaacaacagcaacagcaacagcgggagcacaaagcttgtcatttgtacttgtgctcgtaggctcttaaccaaatgggggagcaaaacaaagccaacagcaataataacaacaacgaaaaaggacaaaaaagaacaatgggggtggctcgatgacatcatcatcataatcatataaaacgcatattgacaatcgtttcgtaggatttgtacagttacagttttcagcgcacaggttgggcggtcaagcagcagagtcgcgggcacagtttggtctgcactggacttaccttgcgggtgcaaacgttcgggcttaaaccaggcatctgcaaataggcgattgatatattgattttcgttagtttagcggttagtcgaggtgcgaaaaggtaatgaaaacaggagggataggagatggcgtgcaaaacaaatgctcagtgcacaagcagttagtcagagttaaggaccaagcagttaaagcagtactacaatttaaattttaaagcaaaatcagttaaaatacacaaaagcgttgaaaaccacttgtacaacacagtatatacaaatatattatatggacaaattatacaatccttaagcataaaactaccacccaggccaccgttgacagaggttagttttgttgtttttccaacttatttcacaaatgcggggtgagtttcgtttttttttttttggggaatttcgtttttcctttttcttttaacttactgggatcgagtatggagcaaatcaatgggcgctgcttgcacacgccattctgaccggtttcaccaaatgcggacattatgctggttttaatttgggttttgctttttgcttagcacacttcttcgttagcactacgagttatcctttttattggacagtaacttttccgttatattcgattgttttcgttgagcaaagcgcagcgcagaaagagagcggagagaacgaacgggtattacgacgttaaggtattacgctataagaattttccacttccgtgtggcgacctcacgacgcgtatagagactgaaacgtattgggagaagctttgccgcgaaaagcaggccgggcgttacccccgtcccatcccccctgtaaaggacaaccctaggctcagagcggcggcgccgagagagagagaggatgtctaaactgacccccgctgcgcacactacaaactacagtggagcttcctaacttactgacaaagcgagtccctggaagtgttttcttcaaaaatgtatgcaaaagaattttttaaaaagcttaaaatcgtaagaaattgagatcttttgttataaaaagtttttgaattagtttgttttgaggatttgattagtctctagcatgtgtccactgtaatcgcccggcagggctgaaggcggtgcggattcaatgagagggcagccgcaagtctcgccaagttgagcaaccgtgcttagccctgaactcggtggctcggcagtagcatttgatgtgccgccgagtttggggaaagctcgctagctgggggccatcgatttcacctattgcagctgacccgctgcttggtgagcggagagtttttccgggcggagacttttcttggctttccgcgcagcgcatgcgttggcttccgcaggactcttgttgttttcgttcgacacccaacgagtgggccggaaattaccagacgctgcaacttttgggtgcggtgggtgcagatgctgttgctatcgcccgcacacagcccaaccgccagcttgccctttgaccccgccctgcagttgcgtgcggcgcgagaattagatgggaaatcaatcaaatgggaatcggaaagcaacgcatttttctggccattggttgtctgggcaatcattgctatgttttgctaaattttatacttttggccaactttcgaccaagttatgagacaaatatttgacgcattccacatgagatgtgctgtcaaaatggcaaacttctttgacggtttagcacagttctgtccgaatgaaatcgatatgttggcagg

SEQ ID NO: 18983 - DNA, 1429 bp, DROSOPHILA
tcgtgaggtcgccacacggaagtggaaaattcttatagcgtaataccttaacgtcgtaatacccgttcgttctctccgctctctttctgcgctgcgctttgctcaacgaaaacaatcgaatataacggaaaagttactgtccaataaaaaggataactcgtagtgctaacgaagaagtgtgctaagcaaaaagcaaaacccaaattaaaaccagcataatgtccgcatttggtgaaaccggtcagaatggcgtgtgcaagcagcgcccattgatttgctccatactcgatcccaatgcctggtttaagcccgaacgtttgcacccgcaagtggaatcccttatctactggcgcgatgtgaagaaatccggcattgtcttcggcgctggcctgatcacactggcggccatctccagcttctcggtgatcagcgtgttcgcctacttgtcgctcctaaccctcttcggcaccgtcgccttcagaatctacaaatctgtgacacaggccgtgcaaaagacaaacgagggtcacccctttaaggattacctggagctggatctgacgctgtcgcacgaaaaggtacagaacattgccggcgtggctgtggcacatatcaatggcttcatctccgagctgaggcgtctgtttcttgttgaggatatcatcgattcgatcaagttcggcgtcattctgtgggtcttcacctacgtgggtgcctggttcaatggcatgactctggtcatcttggcctttgtctcgctgtttaccttgcccaaggtctacgagaacaacaagcaatcgatcgacactcacttggatctggtgcgcagcaaattgacagaaatcaccgacaagatccgagtggccatccccattggcaacaagaagcccgaggccgctgccgagtctgagaaggacaagtaaagaacccgcactagcaagagaaacaaccacaaataaacatgtttatttatttattaagcattatttgaatggttttaatattcatccaggcattaaataaataacaagtctagcagcaatgtttacatattaattgtataattgcaatcaacatcaatcgataattgtaaatcaaatttgaagagacccaaaacaatttatcaaccaacaactcgtagcagtttcaaacattgtccaagtgtctttaagtttttaacgaacgaaacatttaaaaagcatatatagtgagggaaattaagaagaaaacgattatatagacgcagcaatgcaaataaatttcttatgagttccacgcaatttccgatttgaatcaactatcttcatttcgatttattcagctttcttagttttcatgtgaccctttttaaattaattctttgctttagttttagttttactattttgttgattttttgtataaaacaacaagaagaactaagattact

SEQ ID NO: 18984 - protein, 234 aa, DROSOPHILA
MSAFGETGQNGVCKQRPLICSILDPNAWFKPERLHPQVESLIYWRDVKKSGIVFGAGLITLAAISSFSVISVFAYLSLLTLFGTVAFRIYKSVTQAVQKTNEGHPFKDYLELDLTLSHEKVQNIAGVAVAHINGFISELRRLFLVEDIIDSIKFGVILWVFTYVGAWFNGMTLVILAFVSLFTLPKVYENNKQSIDTHLDLVRSKLTEITDKIRVAIPIGNKKPEAAAESEKDK

SEQ ID NO: 18985 - DNA, 2806 bp, DROSOPHILA
tgggaatggacaggagcaggaaggccaccagaaaccaggacaaccagtatatccatgccctcacacccatgagttccagcatgtccctcaaatgatcgcgcctttccatcacaatcatctaaaaataccattaagctatcatatatgaaagtttctaacttagtgcatacttgggcaagatatgcggcggatatggtgacgggcaggaagagaactccgcccaaagctaccctattatccaatctgtccacttccgcgacatcgggatagtgctgcaggattacttccggcaggacgacggcttcgtttttggccctgatcaacgcctcgctgagcttggcttgcacaaccaaaaatccctccacctgatagtaatcaacgtccattttggagtgcttcaagattgaagtgttgtcccaaaccatcttgggattcttgcgtaggtgaagcggaaaacgcaggcccaccgtgacattaatcggaagctcatttatgtcgctgaagctgtcatcaaactcaatgcccacgtagccatatgtatcctttcctatcagcgctttattcaattcagatgcgctggcaaaggccttactgccaacggccttcagatcgtgaaccacatcctcgatgacagcagccaagactagattctcaggtgagtagtaaatgtacctggttggttcatgtggtgttgtcagggtggcctggactattgtggcaatcggcttatacatacggcactttggttgtgatgttgacgggcgggtacttcaccgacgtctcctcttgcggctctcggaacaaagccgtcgccgcataaacgaggaagactacgatgggccccacaatgatgatcacgctggttagcgtattggagaactggaagcgggccgtcttgcatatgaccagccacagcaggcatatgctgctctgcgtcttcaccggcgattcaccactggacatattcgtacaatttagatgacgccaacacgtaaacagattagaaatataacaaacttcacgtatactccgcactaaaacgttccggcttccgtgttttcttttattttgtggttgatgtgaaaattaaagtcgaatcggaaatccgttccggcagggaacgctgctaagcttacttcttcttggacacacccacggtgcgaccacgacgaccggtggtcttggtgtgctggccacgcacacggaggccccagtagtgacgcagaccacggtgggagcggatcttcttcagacgctccagatcgtcacgcagcttcgagtccaagttggaggaggtcagctgccagtacttgccatcgatgatgtccttctgcctgttgaggaaccagttgggcaccttgtactgcagagggttcgagatgatggtcaccaccttgtcgacctgcaaacatggcatttaggttggtgtgcgtctcgaacggattgggcgtgctcaacttacctcctcctcggtgcactcaccggcgcgcttggtaagatcgacatcggccttcttcagcacaatgttggagtagcggcgacccactcccttgatggcggtcatggcgatgccaaccttgcgcttgccgtcgatgttcgtattcatgatacgcaggatgtgctggaacttctctgggatgacgagcgactgcaagaatgcaaagaaaaaacattagtataatgcatataaaccacgccatttttgccaacagctaacggcatttgcaattcactataaatttgtcgtttggcgctcagaatcgcacatatttgaggtaactcaccattttgccgtttgtattctcgtatttactcctcactgtaaagaattaagaggtattttgttttagaattttggaaaaatcaaatgggcagcacaccactcaccggaaacgggaaaagaaaagaaggccgaattaatgtggctgcctgaggcggagtaaaaaacctaaaattgcctgccacgttcgggacgcgtgctgttaatagttcgccgtgtgctgttaggcgcactctggtccatcactaatgcaaatttaaaaattcaaaaggcgccgaacttttgttcaatgaaaatgcttaaagtgccatttagatatgctctgtgtgcacatttaaaaaattaaacttcatattttatgtttctttatattttatattttattccccacatttcgtaatacgttttatcgtactgcatccctagagcaccgttatatgaaagcttttcagaatgggtgaaataaatggtaaattatattagctatgcgaatttccaatattgataaaaatgcattgcatttaagcactcagctgcgttggacaggacgatgtcgtttccctgcgcatcgtgtgcaccatggctcgcgacggcaagcagcacaacctcgaggatgtggacatgtacgggaataccgccctattgaaggcctgctatttgggtcgatttgagtgcgctcgtacgctgctggaattcggtgcaaatatctttgctatgaactattttggtcaaaatgccctgacactggccacttatgctgggcatttgactttagtaaaggaactgttgaggcgaagatcctacaaggatttcaatctgtcctcgatgatcccggccctctgtgtggctacactgcaaaaacactccgctttggtggcctattttactcaattggattcgaggggcgtgcaagaaactcaaacagtgcatggttagtaaaaatcaagtgtatttatatagtaacattaaagtaaatttatttcaggtctgggagttgcagagctgcgaggaatgattaaagctgca

SEQ ID NO: 18986 - DNA, 610 bp, DROSOPHILA
cgagaatacaaacggcaaaatgtcgctcgtcatcccagagaagttccagcacatcctgcgtatcatgaatacgaacatcgacggcaagcgcaaggttggcatcgccatgaccgccatcaagggagtgggtcgccgctactccaacattgtgctgaagaaggccgatgtcgatcttaccaagcgcgccggtgagtgcaccgaggaggaggtcgacaaggtggtgaccatcatctcgaaccctctgcagtacaaggtgcccaactggttcctcaacaggcagaaggacatcatcgatggcaagtactggcagctgacctcctccaacttggactcgaagctgcgtgacgatctggagcgtctgaagaagatccgctcccaccgtggtctgcgtcactactggggcctccgtgtgcgtggccagcacaccaagaccaccggtcgtcgtggtcgcaccgtgggtgtgtccaagaagaagtaagcttagcagcgttccctgccggaacggatttccgattcgactttaattttcacatcaaccacaaaataaaagaaaacacggaagccggaacgttttagtgcggagtatacgtgaagtttgttatatttctaa

SEQ ID NO: 18987 - protein, 152 aa, DROSOPHILA [sequence omitted]

SEQ ID NO: 18988 - DNA, 7031 bp, DROSOPHILA
cctctactatatgtacacaaatatactatagactaattatatactcgtgtcgtgtcgcaatcaaccattgaacaataactcggagcagtgaaagttatgtgtatttgtaaaagccaaactgctgatcattaaagaaatctgttctacaaaatgtgattgcctttttttttatttgctgcggaaacatgatacttgcaatccccagctgcagcttggattgaaataattacttcggttggctcatgggtgtttttcagaaatcacgatttgtcgaatacttcctgcgataagcaaattcgtacgctatcagctaccaaggttatgcgaggctctcccaacattgctcactcgatgaggaatctatttcggaacgaatgccataactttcaagcgtttacctttgccaattgactattgcgccatgcgggaacaaagtctaattgcgggtcggagacagcaaattgcttaaaattggagaagccatgggtcagcatgtgaatatgggttcgcctgtaaacaaatgccaattgatagatttgtcgaaacatcattaataaacccagaccacgctcgtcttgctcatggaaagttttcagaacggattgggagttcaaagtacgaatagactcgcatgacacacatttttggctaatgttctggcgaaagaggagaccaaaagcggtggataacatagttacgccataaccgatttttgtttactctaacttagtgtgcgatttactatttttaacaatatttatgttaaccaacaagaatcttaaggcatttatttgtattcattagcaacgtcataaaatataataaccatacagatttacatataagagtatcaatttggcgactgatgattgtttagccttcatttttgcaacgccaacagatgatttgggcgatttgttagcattcggaagcaaagctttcacagatagtttcgctgatacgataagggtttcgtttggatagcattcattgaagtgattcattggggaagatttatggttctattgattctgcttcctcacaaacttcatgaacacatcctggaaagttgtatggctgaccgagtagtacaatatctgcatctcatccttcaagttctccatgtactcgaagatcgcggaccacttaatctgccctctgggaatgcagaaggtgatcatgccacggtaggagtacttctcgctggggggaacaattaattataattaattaaatatatacaactcttagctctttaaataaattacaataactattatgctcgattgagatgtaaggtcataataactttcctttaatcaatcatgactttcttatacacaacgtaaacaagattattttcatttctgtgccagtatgcgcgatttgcccagactatttatatatgagtatattatttgtaaataaaccatattcacatccaaagtgagcagcaaatgtttatgtagatatctgtgtgcgtgcactagtgtattgaaaatttcaatctgctgttgcaagtggtcaatatcgtcaattagcaatgatcgtgacccaaataaaacgaaaatagaaaatcctactttatcaattaatatggatactgttttagtttgattaattttttcagaaaactttgctttaagacgatatgtaatgatgtcaaaatatgcatagaaaattactcatacgaaacatatgccaaaaataatctaagcaaaaagcttggttagcacatatcaatattctgatataacactttagtaaatatttttatgtacatacctgacagtgctgtatggatggtcctttttgaagacctcctccaattcctgcagcaacgcctcgtagtccttgcgcatgttcaattccgaatttgtggtgtccggctgggcgcgactggtcctcgacttcttgactggttccactggtggattgtgatgtctcagcaagtgcgccaacatcatacggcgagcgcccaccgtgcttcccatttcactatcgtttggaggcatcatagtgatctgcatccaattgtcccgctcatcgtccatttctgctctggtacccatcttcaccttaacgaaaatgcccatgttgaagcggtgctttaaacgcgataaagatccgtagcagagcagcgagccgtgatccatgatgcccacattggtgcacagaaactcacactcctccaagttgtgcgtagtcagcagaatgctgcgtccaccctggcggatgccgtccaaaatactccatatctcgtacttggcatgcatgtccacgccggcggtgggctcatctaggcacataagcgagggcgccagggtgcccatggcaatcattagcttccgcttcgttccattgctgtatgtgctgatgcgcttattcatgtgcggtacgagttcaaagcactcggccaatgatgccaccaagctcttgatatattcccttcgaatgccgttgatcaagcaacagaagcgcagcgcatccttgccagtcatgaacgacaagagcatcagttcccgcggacagaatcccacgtgtcgcgaggcgtccttgggacgcgtcttcaggctgtagcccttgatgtgaatgctgcccaccgtgatcgactccatgcccacgatcatgcggaagatgctggacttgccagacccattccttcccagcaagccaacgcactcgaaactggtaaaagatgttgtgacttttttaccttcatactaaagtgatactcacggattgagatccaatgttagggaccgcactgccacaaagctgccataccgcttcgataggttctttaggatcagaggaaagaaggcgtaatgcgctgtggtcaggtaggccaatctccgccgcattttgtccacttccttatcctcatccttgtagcttgggtatatcttttcgttgcgaattgacctaaacaacaattggtaatcggttagcataaagctagagcacaattgatctaaacataacttgaagacatagtttagtcggcgcggaacccatgcgaacaccacaatggtaagatacgccgctccgctgaagatcaggtaaggtagctgcttcaagctgaaggtactcatacgtatcgcctcatacattccgcaacacaatgaataatgtggatggaccaaaagcacggactcaataacagcgtaccgagtttgcggactctttgggtgaatgaagagggccaaaacacctggaaataaagtttccttgcagtatccaaaaagaaatacaatgaagccataattacctatcatattgatgtacaatataatgctgaacatcttgccgaaatcattggacatcaggcacaacagataggtgaatgaaatggcggagaacccgaaggcaagcaactgaactattacgggcaacacggaacctattgtgattccggcgaccacgatcagaggcaagatcattgcgatgtaaaagcaatagtcccaggacaggtgcgacagccagtaggtgctgcggctcatcccgctgctgaattgctggtgctgcactttggaccggcgctcgacgatcggcaaaactgcaaagatggcagtgcccaggactaggtaatggaacaccagcacggcaaattctatggtgctggcgtagatcagtcccctaactgcctgctgtaccgtatcctgatacggtttgttcacaatccgaatatcaagttttgccagctcctgcccaatggccgcgtacaccaggcccattgagagtgcagagccgtgcttgagcttgttgtttgaccaggcgatgatcgagttggcgttgctgtcgaaggtggcgccggccaaaaacgtatgctgcacctttacctgatccgactccatctccgccaggagatagtcatcgataggagttccacttgtactccgaactgttccaccttgcccgatgacattcgccatgtagtgtcgttcaaacctattcccctccgctggtgaatcgatcacaaagaccgccttggggtagatgctcaaatccgtgaccagcagctcggacagatgatgatcgaccaagaagatgaagatggaaaacgagatgatgagcagacagatgatgattggcgtcgcaatgatcatgcagtagaacttttggtggcgcaaagtgaacagtctcttcttctcaacgatcgcccgccactggttgcagcacttcacgcgaccatcgtcctcgcgcacttcgaaggtgggcaggagatctggatattggacatttatagatgttcgaacatacatacacatatatattccacttactgagcagtgacaacatgggcgatggactggacagcaagtcaaaggagctaattcggttccaggactgcctcatttcctctcccatctgcagaaagacacttcccagtgtgggtgcacacacactgatctctgccagattcagttcgcctaatgcctcctccagctccagaaacaaggccgcatattgctgcacatacttcgtgggcagttcgtaagtcacgtaaatgctgaactcgttgtgcagcttgatgtcaggaaaacggatttgcagaaagttcgtcacctccgccacaatgcacgtgtccatcttggtgcagatcagcagataagatgagcccgtacccgcgatctgggtgagaaagcccgtggtgccgtatccgatcacctgggcatcgcacaggaccacaatctgatccgcaaccacctcggcctcgttcatgttgtgcgtggccatgatgatgcagcgacccttgcgttcccgcctcagcaggtcccacatgttgctgcgcattgcaggatccatgctggtgccgggctcgtccaacaggagtatctgcaatacaggaactttacactaaaggccacaaggatagggatagtaccttggagtttccgcacagattgcagcacagcatgagcatacgcttaataccgctcggcagattcttcaccttggtattggcaaagtcctgcaagcggccgatctccagatacttgtccgtctcggcagaggcctcctgccggttcagtcccttgaggcggcagtagaactggaggtgccatcgtgcgttaaccttctcgaacagcacattgggctgcggacaaatgcacatggattgccgggctttcctctgattggtggccaagtcatagccgttgatggtgatttcgccggcgctgggccttaagaaaccggctagcagcattaagattgtcgacttgcccgaatcgttgtggccaagaaatacggtgatctcgtcttggtaaaagttcagattgagatctttaactgcaatccattcgttgaagaccttttcaatgttcctggcccgcacaattaagggatggcctctgatgcccgtctcctgcccttcgacatcgaagtcatcggatcgaggtcgcctattccatcgacaccaaaaggaaggctggaccggaaaataccactttctattttgataactcctcagctgttccatgtaagccagcaccagtatgcgcaacaggcagccaaacagcatgaaaaggaggatggggcccaggtgcacaaattcatcccaatcggtgcgctcaaagagatatgtccagtgcaagcccaaacgaaggttttcgctcttaatgaactgctgcagtcccatggccaacgagctgttcaggaacaagcagacgaatatggtgcgcggcaaagtgggaacatagcccatgagcaataggcgccatggcaggcagccaatcaggtgcacgatcactatggccacttgcacgccgaccgtgtccgagaaaaaggacgaaatcatgaaggccgacgtgaggacctctaaattgtagaccagcagaaagaacagcaccagcgacgaatcactcagcgaaaagtaacgccacttcagcaagagaaccatgaatacggtgggaatggacaggagcaggaaggccaccagaaaccaggacaaccagtatatccatgccctcacacccatgagttccagcatgtccctcaaatgatcgcgcctttccatcacaatcatctaaaaataccattaagctatcatatatgaaagtttctaacttagtgcatacttgggcaagatatgcggcggatatggtgacgggcaggaagagaactccgcccaaagctaccctattatccaatctgtccacttccgcgacatcgggatagtgctgcaggattacttccggcaggacgacggcttcgtttttggccctgatcaacgcctcgctgagcttggcttgcacaaccaaaaatccctccacctgatagtaatcaacgtccattttggagtgcttcaagattgaagtgttgtcccaaaccatcttgggattcttgcgtaggtgaagcggaaaacgcaggcccaccgtgacattaatcggaagctcatttatgtcgctgaagctgtcatcaaactcaatgcccacgtagccatatgtatcctttcctatcagcgctttattcaattcagatgcgctggcaaaggccttactgccaacggccttcagatcgtgaaccacatcctcgatgacagcagccaagactagattctcaggtgagtagtaaatgtacctggttggttcatgtggtgttgtcagggtggcctggactattgtggcaatcggcttatacatacggcactttggttgtgatgttgacgggcgggtacttcaccgacgtctcctcttgcggctctcggaacaaagccgtcgccgcataaacgaggaagactacgatgggccccacaatgatgatcacgctggttagcgtattggagaactggaagcgggccgtcttgcatatgaccagccacagcaggcatatgctgctctgcgtcttcaccggcgattcaccactggacatattcgtacaatttagatgacgccaacacgtaaacagattagaaatataacaaacttcacgtatactccgcactaaaacgttccggcttccgtgttttcttttattttgtggttgatgtgaaaattaaagtcgaatcggaaatccgttccggcagg

SEQ ID NO: 18989 - DNA, 4171 bp, DROSOPHILA
atgattgtgatggaaaggcgcgatcatttgagggacatgctggaactcatgggtgtgagggcatggatatactggttgtcctggtttctggtggccttcctgctcctgtccattcccaccgtattcatggttctcttgctgaagtggcgttacttttcgctgagtgattcgtcgctggtgctgttctttctgctggtctacaatttagaggtcctcacgtcggccttcatgatttcgtcctttttctcggacacggtcggcgtgcaagtggccatagtgatcgtgcacctgattggctgcctgccatggcgcctattgctcatgggctatgttcccactttgccgcgcaccatattcgtctgcttgttcctgaacagctcgttggccatgggactgcagcagttcattaagagcgaaaaccttcgtttgggcttgcactggacatatctctttgagcgcaccgattgggatgaatttgtgcacctgggccccatcctccttttcatgctgtttggctgcctgttgcgcatactggtgctggcttacatggaacagctgaggagttatcaaaatagaaagtggaacattgaaaaggtcttcaacgaatggattgcagttaaagatctcaatctgaacttttaccaagacgagatcaccgtatttcttggccacaacgattcgggcaagtcgacaatcttaatgctgctagccggtttcttaaggcccagcgccggcgaaatcaccatcaacggctatgacttggccaccaatcagaggaaagcccggcaatccatgtgcatttgtccgcagcccaatgtgctgttcgagaaggttaacgcacgatggcacctccagttctactgccgcctcaagggactgaaccggcaggaggcctctgccgagacggacaagtatctggagatcggccgcttgcaggactttgccaataccaaggtgaagaatctgccgagcggtattaagcgtatgctcatgctgtgctgcaatctgtgcggaaactccaagatactcctgttggacgagcccggcaccagcatggatcctgcaatgcgcagcaacatgtgggacctgctgaggcgggaacgcaagggtcgctgcatcatcatggccacgcacaacatgaacgaggccgaggtggttgcggatcagattgtggtcctgtgcgatgcccaggtgatcggatacggcaccacgggctttctcacccagatcgcgggtacgggctcatcttatctgctgatctgcaccaagatggacacgtgcattgtggcggaggtgacgaactttctgcaaatccgttttcctgacatcaagctgcacaacgagttcagcatttacgtgacttacgaactgcccacgaagtatgtgcagcaatatgcggccttgtttctggagctggaggaggcattaggcgaactgaatctggcagagatcagtgtgtgtgcacccacactgggaagtgtctttctgcagatgggagaggaaatgaggcagtcctggaaccgaattagctcctttgacttgctgtccagtccatcgcccatgttgtcactgctcaatctcctgcccaccttcgaagtgcgcgaggacgatggtcgcgtgaagtgctgcaaccagtggcgggcgatcgttgagaagaagagactgttcactttgcgccaccaaaagttctactgcatgatcattgcgacgccaatcatcatctgtctgctcatcatctcgttttccatcttcatcttcttggtcgatcatcatctgtccgagctgctggtcacggatttgagcatctaccccaaggcggtctttgtgatcgattcaccagcggaggggaataggtttgaacgacactacatggcgaatgtcatcgggcaaggtggaacagttcggagtacaagtggaactcctatcgatgactatctcctggcggagatggagtcggatcaggtaaaggtgcagcatacgtttttggccggcgccaccttcgacagcaacgccaactcgatcatcgcctggtcaaacaacaagctcaagcacggctctgcactctcaatgggcctggtgtacgcggccattgggcaggagctggcaaaacttgatattcggattgtgaacaaaccgtatcaggatacggtacagcaggcagttaggggactgatctacgccagcaccatagaatttgccgtgctggtgttccattacctagtcctgggcactgccatctttgcagttttgccgatcgtcgagcgccggtccaaagtgcagcaccagcaattcagcagcgggatgagccgcagcacctactggctgtcgcacctgtcctgggactattgcttttacatcgcaatgatcttgcctctgatcgtggtcgccggaatcacaataggttccgtgttgcccgtaatagttcagttgcttgccttcgggttctccgccatttcattcacctatctgttgtgcctgatgtccaatgatttcggcaagatgttcagcattatattgtacatcaatatgataggtaattatggcttcattgtatttctttttggatactgcaaggaaactttatttccaggtgttttggccctcttcattcacccaaagagtccgcaaactcggtacgctgttattgagtccgtgcttttggtccatccacattattcattgtgttgcggaatgtatgaggcgatacgtatgagtaccttcagcttgaagcagctaccttacctgatcttcagcggagcggcgtatcttaccattgtggtgttcgcatgggttccgcgccgactaaactatgtcttcaagttatgtttagatcaattgtgctctagctttatgctaaccgattaccaattgttgtttaggtcaattcgcaacgaaaagatatacccaagctacaaggatgaggataaggaagtggacaaaatgcggcggagattggcctacctgaccacagcgcattacgccttctttcctctgatcctaaagaacctatcgaagcggtatggcagctttgtggcagtgcggtccctaacattggatctcaatcctttcgagtgcgttggcttgctgggaaggaatgggtctggcaagtccagcatcttccgcatgatcgtgggcatggagtcgatcacggtgggcagcattcacatcaagggctacagcctgaagacgcgtcccaaggacgcctcgcgacacgtgggattctgtccgcgggaactgatgctcttgtcgttcatgactggcaaggatgcgctgcgcttctgttgcttgatcaacggcattcgaagggaatatatcaagagcttggtggcatcattggccgagtgctttgaactcgtaccgcacatgaataagcgcatcagcacatacagcaatggaacgaagcggaagctaatgattgccatgggcaccctggcgccctcgcttatgtgcctagatgagcccaccgccggcgtggacatgcatgccaagtacgagatatggagtattttggacggcatccgccagggtggacgcagcattctgctgactacgcacaacttggaggagtgtgagtttctgtgcaccaatgtgggcatcatggatcacggctcgctgctctgctacggatctttatcgcgtttaaagcaccgcttcaacatgggcattttcgttaaggtgaagatgggtaccagagcagaaatggacgatgagcgggacaattggatgcagatcactatgatgcctccaaacgatagtgaaatgggaagcacggtgggcgctcgccgtatgatgttggcgcacttgctgagacatcacaatccaccagtggaaccagtcaagaagtcgaggaccagtcgcgcccagccggacaccacaaattcggaattgaacatgcgcaaggactacgaggcgttgctgcaggaattggaggaggtcttcaaaaaggaccatccatacagcactgtcagcgagaagtactcctaccgtggcatgatcaccttctgcattcccagagggcagattaagtggtccgcgatcttcgagtacatggagaacttgaaggatgagatgcagatattgtactactcggtcagccatacaactttccaggatgtgttcatgaagtttgtgaggaagcagaatcaatagaaccataaatcttccccaatga

SEQ ID NO: 18990 - protein, 1382 aa, DROSOPHILA
MIVMERRDHLRDMLELMGVRAWIYWLSWFLVAFLLLSIPTVFMVLLLKWRYFSLSDSSLVLFFLLVYNLEVLTSAFMISSFFSDTVGVQVAIVIVHLIGCLPWRLLLMGYVPTLPRTIFVCLFLNSSLAMGLQQFIKSENLRLGLHWTYLFERTDWDEFVHLGPILLFMLFGCLLRILVLAYMEQLRSYQNRKWNIEKVFNEWIAVKDLNLNFYQDEITVFLGHNDSGKSTILMLLAGFLRPSAGEITINGYDLATNQRKARQSMCICPQPNVLFEKVNARWHLQFYCRLKGLNRQEASAETDKYLEIGRLQDFANTKVKNLPSGIKRMLMLCCNLCGNSKILLLDEPGTSMDPAMRSNMWDLLRRERKGRCIIMATHNMNEAEVVADQIVVLCDAQVIGYGTTGFLTQIAGTGSSYLLICTKMDTCIVAEVTNFLQIRFPDIKLHNEFSIYVTYELPTKYVQQYAALFLELEEALGELNLAEISVCAPTLGSVFLQMGEEMRQSWNRISSFDLLSSPSPMLSLLNLLPTFEVREDDGRVKCCNQWRAIVEKKRLFTLRHQKFYCMIIATPIIICLLIISFSIFIFLVDHHLSELLVTDLSIYPKAVFVIDSPAEGNRFERHYMANVIGQGGTVRSTSGTPIDDYLLAEMESDQVKVQHTFLAGATFDSNANSIIAWSNNKLKHGSALSMGLVYAAIGQELAKLDIRIVNKPYQDTVQQAVRGLIYASTIEFAVLVFHYLVLGTAIFAVLPIVERRSKVQHQQFSSGMSRSTYWLSHLSWDYCFYIAMILPLIVVAGITIGSVLPVIVQLLAFGFSAISFTYLLCLMSNDFGKMFSIILYINMIGNYGFIVFLFGYCKETLFPGVLALFIHPKSPQTRYAVIESVLLVHPHYSLCCGMYEAIRMSTFSLKQLPYLIFSGAAYLTIVVFAWVPRRLNYVFKLCLDQLCSSFMLTDYQLLFRSIRNEKIYPSYKDEDKEVDKMRRRLAYLTTAHYAFFPLILKNLSKRYGSFVAVRSLTLDLNPFECVGLLGRNGSGKSSIFRMIVGMESITVGSIHIKGYSLKTRPKDASRHVGFCPRELMLLSFMTGKDALRFCCLINGIRREYIKSLVASLAECFELVPHMNKRISTYSNGTKRKLMIAMGTLAPSLMCLDEPTAGVDMHAKYEIWSILDGIRQGGRSILLTTHNLEECEFLCTNVGIMDHGSLLCYGSLSRLKHRFNMGIFVKVKMGTRAEMDDERDNWMQITMMPPNDSEMGSTVGARRMMLAHLLRHHNPPVEPVKKSRTSRAQPDTTNSELNMRKDYEALLQELEEVFKKDHPYSTVSEKYSYRGMITFCIPRGQIKWSAIFEYMENLKDEMQILYYSVSHTTFQDVFMKFVRKQNQ

SEQ ID NO: 18991 - DNA, 2997 bp, DROSOPHILA
accatcacccgagtccaccacaatgcccacagtacgcccggtggcgtaaagtgagagcacagcctgaactgctacataaaaagctggcacctgaaagtgttcgaacataatctctgtcatcttctctctattcttcttcggattcagtggggcttcggtgagtagagccggcaaatccattggatccgcccgcaagagctcgtacgtgtgctgccaaaccatctccatttcatcccagttcttgaccattccgtgctcgatgggatactttagggttagtattcccctttttcgggctgccgcctcgccaataacactatcaccgatcacggaatccagcaggacgttcaggtgacgaggtctgcccacaatcgacgggaagacagcacggggagtatcttctggggagaatccagccttacatactccagagccgttgtcaataaccactgcggcgtggtgtgaattactatctacctcgctgctcatgtttccaggagaggttgctgaacgaatcatggtcaaatcataaaatctttagcttatttaagcaacttacgtaaatgtagatatttgtgaagaatgttctgtgcccgtttatttgttatatcgattttgattcgggaaggtatttgaaatgtagacatgttgtgtgctgtgttccagtcggatttttaaacttatgacgttaatttcatggtttatttccaatttagcgccatgacatacagaggccaaaaatcgattaattcaagtatcaatcgaatggatgcagtcgatacgtaagcagctaaaatatgctaatagtcactaaagtagtatttaaacataagaaatatttaagaaatcctcaatatgatttgaatatgtttcagtgcaatgtttcaattaaaaatagtttttaatttcttttagttttactatttaacttcaatatatataagttgatctcacatcactgactgattggggtctttcgatattttctcatctgctcatctctagcagtaaattgttcaaatagaacaagcgaaataacgagaacgtaagccttgttttatttgatataaaatctgatatcgggacttagccttattagcagtcgaataaaacgcagatatgttcgtggcccgtaaaatttcgcaaactgcaaggtaagttgcgaaaaaaagtatgcccaaatcgatgccggctgattacataaatagcaacaaatggcgaccctgatcttgaggacattataaaacaagacacacttaaccctttgcagcctggcggtgcgtggcaagcacaccctaccgaagctgccctacgactatgccgccctggagcctatcatctgccgggagatcatggagctgcatcaccagaagcaccaccagacctacgtcaacaatctaaatgccgccgaggagcagctggaggaggccaagtcgaagagcgacaccaccaagctgattcagctggctcctgccctgcgtttcaatggcggtggccacatcaaccacaccatcttctggcagaacctctcgcccaacaagacccagcccagcgatgatctgaagaaggccatcgagtcgcagtggaagagcctcgaggagttcaaaaaggagctgaccacgctgaccgtggcggtccagggctccggctggggctggctgggcttcaacaagaagtcgggcaaactgcaactggccgccctgcccaaccaggatcccctggaggcctccaccggcctgatcccgctcttcggcatcgatgtctgggagcacgcctactatctgcagtacaagaacgtgcgtccctcctacgtggaggccatctgggacatcgccaactgggatgacatctcgtgccgcttccaggaggccaagaagctcggttgctaagcacagccggcgattgcgtatgtttaatctataagcatctgcggatcggagatcctaaattgtagtctaagttgcggctaataaattggtaccagctagcaactaatttttataatttttatgaatgggaataaaacaatttaaaacataatttccgaagataacgcttcacaaaggcgtattgaaactattacttcattgaggaattaaaaaatatacatatacctattcatattttttatttttatcaattttattacgctccaaaaaaattaatttttatattaaattaaaatatcgcaaatactgtaaatgttttacaacactgccgcccatggtgccatctctagcaaatcagctgtgcgcgagccaaacaaaaacaaaacaaaagtcagcctgccgcgaaatcgggggaggaaaattgacatttccaccgagttttcccgaacttgcgtgcgcgcagctgcaaacaattttccagcacgcgtatccgaatggtggaacaaatggccagccgctggcagagtcgtttgttgcctgttcgcgtaatggccatcctcgaaaatcgcccggagttttgaaatcgagagaccagtacgaaacaaaggaaaatcatttaatttcctgagggcggtgacgaatgaaaaacatacaaaataaaccacttgagtgcaataataatttaataaagaactgtgattgtgagtgtgtgaggagaactgttgacgcccatcaaggaatttaacttctaaacttctaaacgtaagtaagttaccaaagaaaacacaaaacttgataagaaaatatgagattgggtttcaattaaaggtgttttcgattagttttttgaaaaactccacttgacggtattcgggaaaatgtgtgaaaaatcaatattccacagccagttgccccagaagtgcgcacgcatctcccttcgggaacttttccaactttcgtcctgttgcggatcctgcttgaggtccttcagcagctgtccgcccccagtggattctataaataaaacctctccactcttgtttgcgaatttccccgagcatatggatgcaacctgtcattcagcgcgtttcaaaatagtagatatgga

SEQ ID NO: 18992 - DNA, 881 bp, DROSOPHILA
tctagcagtaaattgttcaaatagaacaagcgaaataacgagaacgtaagccttgttttatttgatataaaatctgatatcgggacttagccttattagcagtcgaataaaacgcagatatgttcgtggcccgtaaaatttcgcaaactgcaagcctggcggtgcgtggcaagcacaccctaccgaagctgccctacgactatgccgccctggagcctatcatctgccgggagatcatggagctgcatcaccagaagcaccaccagacctacgtcaacaatctaaatgccgccgaggagcagctggaggaggccaagtcgaagagcgacaccaccaagctgattcagctggctcctgccctgcgtttcaatggcggtggccacatcaaccacaccatcttctggcagaacctctcgcccaacaagacccagcccagcgatgatctgaagaaggccatcgagtcgcagtggaagagcctcgaggagttcaaaaaggagctgaccacgctgaccgtggcggtccagggctccggctggggctggctgggcttcaacaagaagtcgggcaaactgcaactggccgccctgcccaaccaggatcccctggaggcctccaccggcctgatcccgctcttcggcatcgatgtctgggagcacgcctactatctgcagtacaagaacgtgcgtccctcctacgtggaggccatctgggacatcgccaactgggatgacatctcgtgccgcttccaggaggccaagaagctcggttgctaagcacagccggcgattgcgtatgtttaatctataagcatctgcggatcggagatcctaaattgtagtctaagttgcggctaataaattggtaccagctagcaactaatt

SEQ ID NO: 18993 - protein, 217 aa, DROSOPHILA
MFVARKISQTASLAVRGKHTLPKLPYDYAALEPIICREIMELHHQKHHQTYVNNLNAAEEQLEEAKSKSDTTKLIQLAPALRFNGGGHINHTIFWQNLSPNKTQPSDDLKKAIESQWKSLEEFKKELTTLTVAVQGSGWGWLGFNKKSGKLQLAALPNQDPLEASTGLIPLFGIDVWEHAYYLQYKNVRPSYVEAIWDIANWDDISCRFQEAKKLGC

SEQ ID NO: 18994 - DNA, 20829 bp, DROSOPHILA
cccaaaaaatgactctggaaaatccttgcagccagtcgcactcgcaggcgctacggggcaggttgcttgatacggcagcatacgcggcgtatacgtaacgtggaaaaaggacaagattttttcgtgagtcgagtgaaggtgcacggctgtctcttaacatagcgttaaagtcccaaacattttcgtcatcaattaaaaccccccactgaccgactgactcacctaattcgcgtgccaaatttatttgatttcgtgcaaagggcagttggcgtaaacaaaacgtgtccaaagcactggaagagccatctatcgctctaactggaagttgcgtcagactcacgcagcttccaagttggtttcgtgggaaactggcgaatctgctctgcgacattcaccgttctgagttggccccaagtgcacgtgggccagctttcagcttcggtgccatttcaccccgagcaccaagagcatcagactatagaatttaccataaataaatccaaaggcatcctctgtaatcagccagccaattttcccatcctccagtgcgcgaattttgcgagccctgtgattcggcttttgtgcaacttttcaccgtgtaattgaaattaatgatcattgtgcggtttggctctgtaattccggtttcgcagctctgaaataacactaatgccccgcatttaatcttgaagaaatcgcggcactttgctttattaaagtgtcaccccagggacaaatatcactcaaagtttgacgaaattcatctcacaaattgatatgtgacagccaggtgtgaaatattgtccagggaaaatagaattacctttgggagtcaagtgagagcagctccttagggcactgatttttaatatttatacgttttagaaagaaaatatacaatttgccttcgaaatgtatatgaaaattgtatgtaatttttagttcttccttttcgatttttccatacccttacaatttcccttagggtctgaataaaatataactttattcgaaaagccatttgcaccaagatttgcaatcatcgaactccctttacagaatgcaaaattgattgcagcgtatcagcggcaaatttagcaaacagaaaacagcatgcgaaggaaaaagaaaagtgtaatgatagcgccaaggaaccaaatccgactttagtgccaattgtgccgtgcgaaatgctgttagtgccgcgttgttgttcgtgtccatgttgtgattacataatgagacgctgctgaaagtcaaagtccaaggagaagtcccaagtgtgtatgtaagccaggcggcagccatatctcaacttgccgccactaactcagccgaagtagaaggcgaagcaaaagcctaaggaccagccctccatctgcaggataacgaggagcgtgaggagccgcaggaggatgcccttcggccgcaagtccccgctggaggcactggcccttcccggcgtcatgctcgcctacaagtacagccagttccgccagcgccgccgggaggccgccagccgacgggtcaccgagcgcgaactctcggcgctgcaccataaaatcgtgagtacaaatggcgagcttcggaaaacaaagtcatttctgtgcgtcaacgggttgggttgcttctgaaacacggaagcacttccggcgaaaaaattagattctcgaaaagaaagaacgtttaacaaaaaatgatgatagaaaactaagctcaaaaggcatgaataaatgagacgtatccaatgcactctcttatttaataaaataatcaagttagcatgatataaaaacgtgaggcaccaaaaaaaagttaatccgttaatctataaaactgccatcagcatcattatactccacgatgctatgaagaggctgtgaagaaacttgaaaactttaaacatattgcagtgcagggtacttgacccattatcctccgaagttgttcttggctttttgtttatgttccggtttggtcctttcggcttttcgccttcgcctgcgacccataaaaagaaacgcaataaaagaagcgaaaactggaaaacagaggtggctgtttatcaaaagcaggcaaaaggcggacgaaagtcaggcatcattagccgcgtggttcgatggggaagcttcccagctcttgagcctttttaaagtgtcgctcttcctgcttttctgtttgttttggctccggcctctcacatttacagctggcaaatagttataaaaatacaaggcacacacagcacatcaaacacatcaaaacaaggtgaggcccgactaagctcggtttgtcatggcccgcaaaagtaggcaataaaaaacgccataacttctgcgatagttcacatgtgtgtgtccgcctaaacttatttgcattttaagggtcaataaaaaatgtacaggagagctagaagaagcagagtcccagaaaagttttatatttcagatttctttggacatttgacgtaacatttggctttcttatgagatacatattttgatctcagccataaaaaaagtaaatataactattattgcttgttcattgtataaattaattaagtcttatacagtatttattaattggggaagccataaatagccagtaattgcatcaataacccaatttacgacgaataattagcattcttattagtcagcatcattaaatatatactcaacgtatgagaatattaagttagtataaggcacaactcatttgcattcgcaacaggaccgaaatgtgcagcgcggccaactgcaaaaggctaagttcacttgggattttagtagacttgtttttgaaatttatgactttcaaagccatagactgccacgcccacttgccaaacacactcagtctcttacacacactcgcacacatcagcacactcttgttcgcacttgggcacttatataaggagagcagctgcaacaacaattgccaagtgcacaaacaggaaaaaagtcctggcagcactaagctaggcttaactattttgcataaaatctgatgcgtgactgtaatttctctacgccgaccttgaaaagcagctcacacacactagcacacacgcacaccagcagcaccccgatacattagcaaaactgggcaaatacacgaaaaatgcttttatgccacattaaaattcacaaaagcctgaccagactgccttcgtaaaatgctttcacaattaaatggcccctggctgaaaatttttactttaggtggctgcattgcgaattacggctaattatactgaaaggctcttaaactagtggtatgaaaatgtttactgtttgattaaatttgaaaaaagtaatctgcaattttctgtggtaagttcggagttggaaaaattgcctttgcacaataacaaaatcgtaaaattaaagatatcgtaattatgagcatgtattaatcaagctgcataagacaatgtcctttttgttttgctgtctagtgttgccagtcacaataacatttttacaagaaaaattaaaaaatattcaaacagataagcagataagcattatagacagataatattataacagcaggtattgaacccggaaaaatatgataagcattacaaaattaacgaatctgtatcgaaattcgaagggttatgccaaataagctacagatcctggccataacatgtctcataagaacctcacacacaccacgcaagtattccagctgagacaagctaagccgatgtaatcccgcagagaagaggacaccgcactcacacacacacacacacagaaacaggcgagacacgcacacatggtgtcgtttcgtaatccccaaaagtatgcagcgacaaaattgtcatttactccgtgctgagaggaccggcaagaagcaggcctaaaaacgccgcgcagtagcaggtctttcgcgatatgttattaatgcaaatacgcataatatataacaagttgattagctgagcgcaaggggaatagagccatagggcaatgggttttggagcccggcagacaatccttttcgtggttaaaagggaaatgctgtcaaaactagccccatcccgctgcaggaagtcgcgtgactatccaacatcaggacgaaaaacacagaaactggaaaaccccaaaacgagacctctagccaggacctctaactggacattttcggtcaggcaatgggaagtgaaatttataatttactttgcagaaaggacagcgggcggaagttgtcacctggcgtggcattggaaataggtgcaaattaatgaatcctcagtttgccgcaaaggtcaaactctgccctttgcctggtatttttttccccctttatttgtttgaaactaaattgaaatgtagtcaagctgatacatgattattagctgctgcagttcctgcagtcaaatgtccttttgcattttcctccctccctctctcgctctctctctcccttacccagcagctgccgcttgacctccctgcagccgtctctttctacgcccctttgtgggtctttagcaataaatgaccgcacaatttgacttggcacttgcaacgtgcacacaaaaaacattggtaaaaagaatccagcttagtcatccaaatgccaaaacagttggtttggccaacactgctttttggcctggtctttggtcaacggctttcttttccttgcaagtccttttaagttgccttggcattggctgtagcttttgaaagtatataatagtcttcactgaattaggtaaatttgctactcagctcacgttttaccaaacaacagaaataatattggcttgtcctttttaaaacaaacagtaggtatctaaagagtaaaaagttataaatttagtaagatagtgcaacataaagtgaattttctccattttgttcttgtattcagacatatcatattcatatatatcatacataaaccttatatacaattttttcactcttcttgaaatattgtaaaattatttcaaatgacaccttatttagctgtgataagcaagcaactgaaagagtgttgcagagtgtgtctcatatataatcctttcaatctactccgttgccgttcttttgtggtcagtgcaaatatttgccattgcattttaccacccgcccggaattggaatcggaatcgcttgaccataaatcagacacaaaaagcatttgaaagtaattccattttgagtgcccgctttcggtgtgctcgacatagcgccttgggtgtcgtttcggatcggtttaccttgcactgaaccagcgccaatcagaagctgtttgtgccacctggccacctggtcacttgcccttctgcaagctggcgatttcaatggctggacacttgaaataaatcattaacatcgggcattagtcaatttgatggtcggctgagccattgccatttagcgggaaatggtcattaaagaggtccgcggaggtccctgaattgggcacgcaatgcaggaaccggatatccgctgggtgtttattcgactcccactttccaagaagtaattgaacttttgtgtcgcagcagacacgcaactttgtgcaggataatggcaagcgacgcagtcgcctctccccattcccccgactacccttcatatttaactttatatgcgaaaatgtcagcgtgtgctcctttgtcgtctgcgaacttccgcctcttcacttccgtttccccgctctcaattagagtgcattaaactttagtgtttacgcatgggttgccttgttgttccctttgttgctgccagattttcttgggccatcacgtgctgcatcgaaaaaaagggttgtgccaagtccagagccccccgccatattttccaaccattctcggtctcttggggcgcggccatgcattagcgcaggtcacgcgatgtctgcaccattatactatatagtctgtacacacaaacgtgcacagaagacaagctggaatcagggtatatggtatatttataaggggggggttattttccaacgcagacgtttaccttaattgcattgattggagcatttagagtggccagtcgatgtggaacgcgatacgatatgtatatgcaattattttcgaaggctctccaagtcacacattaggattgtaattatttacagagcgaaaaatagagtatgccttaaaaaatgtgcattctacgtaaaaataaacttgctaaatattcaatgatattcagttatctcacagtcctgcgtaatttaatttcaagtttcagctactgtgcatatcgaactgatttaagttgagacaagctaaatgggttaaggccagcgcgcactttattcaatattccaggcaatttacacaagctcacattcatagattttcccaactctttgctttgaccattgtcacatttcattacgcggcactcgagataagcccgcaaaaagttttatcccctgccgagtggattctatgctagaaagaataaatataaaaaaattcaggcaagataataaaaaatggcaggcacagcgaaaaatgtggctgaacaaaaaagtacaatatattgcaaaaaagggaaacacagaaggcggatgcgaaattggaactgggcccagtgcaccaacacagttgccactacacgcacacacacacacaaccaaaccacccacccaccaacacacagaaaactccagccccgagcaatgcgttttggtttcggctcaaggccagatttcaattaaaatttattgtttgtgccaaaacgaaagcgaaataaattgaaaaataataaattgaaatgtgagatttatttttaaatggcgccgaacgcattagtttctgtgggtgccgccctcctcagaaagaatggcctttcaacagttactaaatactcgccactcaatggatcccctgcgatttgtgaacacgcacacatgtttgtgggaaaaaatcgctttacaggccaacacttcatctgggaactcttctcaataacgtggaaagggtgaaggggcattcaaccacggccaatgaacacttacaaaaaacaacgaatgccaggaggaaaaacgaaaacaacttgttccacacatgagctgccctgaaagcagcctggaaatataaataaccaaagggaaactttcaaaggcacatacgtgtctcacctgtctctcccctttgccaactcacctgtccaactgcatccaacaactgctccccgctcaccaccgtcatttcgatttcaatgagtttccatccgaaaatggcatcgcttcggtttcactttgcacttttgtgttaaaagccctaattacactctcagcagctttccacctttgccgaccacccacaaatcctggcccacatgagtctagttggcaaatttgacacttttctcataattctgtatggttggcaaacaactatgatgcacaggaagaaaaaaagccaagtacattcatatatgctaattgtgtgtagttttcagttttctgtgctttaatataatatataagttttaaattagcaaaaattagtaggataattttctgaatattttcatgtccttttctattttttcggtgtactgctgctgtgtgagtcctctcctcctgtggtttttgttgctgttgtggcccgggcacagaagctgcaatcatggctgtgttttgcctgtttgtgttggccagagtttcgcaattagcccagagcctgacaattgatggcattcggcggaggatgagcactatggtgctccctggaaacccatacaagccctggtgcagattgcctgtcctcaattagttgtcgacaagccattccgcctctccccccgcacacacacatattgtttgatttgacttttatggtttataattggtttttaatgtggccggaaattagcagccagtgacgagaagtgggacatcttaaagattccattctaccataaagcattctttggtggccaccataaagttttcgccataaaaacgcttgatttatgcacagccattgaggagtgacacgaaaaacatattaaatgcaataaattcacttagcggcagcacgggcaagtaaagagaaacacatatatacactcaaaaaaaactcactgacacttaaacgacgaccgatacaaatgctatttctcatcatgacaatgttttcccatcgagcgtgcttcaaataaagcagtcaagagctgtggaatgggctggaaatgtgggtggtgcttggtggttggttggtagggggctgtggaaaatggggtaggtcgtgtgcaggtcttaatggaattgttgcctccacttcacaattatcgatgcatgaaaaggggagtgcagcggcgcttgtaatgaagaacaacagaaacatcaacatcaggaaagtcatatgccagcactttcccacagaatcgctgtgaagagtgggcgaaaagtgggaaagacctgtatcgatttaattaattttcctttccttaaaaaggctgcaggtgccgaaaactgcaagaatgattgcttgactggctgagtgttgttggtatccaagttattgtagggcactatggtatatgaggtcacctactttcaggtgtcaaaatgcctgaagtgcttaaaacaagtggggcacccgctttggtttaatccctaaaaaaatcactagagaactaatactgctagtatgtgtaagtatttttcatgatttaagaacattgttgttgaaaaggactttttgtgggcatatttcattttctataaaccttatttgctttttttcatcgtcattcttttatttcacccataggttgtctccactataaatggcatgtttatagctattttagatcaatgtaagattagaaactagatccttgttctgaccccacctggtttagttaaccgaaaaaggagcccacttttcctcactctcacatcccctctcacatgtgtgttcaagttaaggtaaacaagaatagagaccagtcacggtatttataatcaattccaacctcaatcaatcagcaaacgctcattgacagctccaggaatttctcctcgaagccagagtaatccccttatcctttgtcgctcctgtttgctcctttctgagcctcattagccaccacattttttgtgagtcagcagcgagttgttcgcacgtgtctcgcgcagttgtcgcctggttttccatggcatgcctaactgccatatacataaaaggggcgaatcccgggacaggggcaacgaggggttaagccgggctaaggagtgttttattattggcctactttacctggccacccgccgcgaaaatgtccataattgacagtccgatagaaatacgctggaaattacgaagggaaaggaaataggtgaatgcacaatcacagtgaatttatttgattgctcaataggcaaattgaatggtatttatataaatattctagaccttattaggcctttctttggagattattttctgattaggttaatatatgcttagatcaattaatgctattttatttctttttagttctgcacagttaaatcagaaataaatctgatctaaatactatactattagccaaattaatttggaatatttttacggcctatttgaaccactaaccccaactagagatttcaattgaatggcagtaatagggtcataaaaacagattaagttttacaggcaattactcaaaccttaaacatcagaataacaaggactttcaacggggcattatccgctaccgtgccccagggattgtgcaactctttatcgattcgagccaaaccatttagatgtgttcgctcatcaaggcggccattaaatataaattcgacaggcactcggccatctgcagttgacccaaaaagccactccactggggacctgagctgagccaataggtccaaaaacctaaaactcacaaatcattgaacgggggcatgcaataccggtatcggtgatgagtgatggggaaattgcatctgcattcagttggcccaaagtctggctcattattaatgcagccggccatatgaagcttcatgttcccgaacgaaccacgtcgtgccccatttgcccttccggctggccacaccaacttccacttcccgaacttccccaacttgccgcgacttccgctgctcgttaggcgatggctcgtgaaatgagctccgacattcattgcacattatggcccacgtcctgtatggcttcagttgctctttttcagtgctgttttatttttgttttttgtgtttttttttttttgcaccaggccttgcataattacaggcggcggctgcaacccaagttaataaacaattttcgcttcgtggggcgaaggaggtgcctccttggccgcgcattattcattaattactttttaattgcacgggcaatagctcaacttcgagcacaatattttttcgctttttctcgctcggtcctcggtgcgtatacttgatatattgtttggtatacttgtattttgggtgtttctttctaaggtttccccttgcgtcataggcgtatctactttgcatgtccctcggctcggcaggggggtattttactgagggtctgggccaactaaattaaattacccgccttttagagcgattgtcatgatgagtcacggccaaaagtgtgcaaattgagcctccgctgccttttttttagattttttttttcggaatgacgaaggctctgctaaaggtcgtgttgctacctgaatttttaaagatgtattaagaggggagaatgtggagctaactgttcaaatcgctgagatgaaacttaataaatttataggaaaaatatagaaaatcatcatcaccttttgactttttatatcagcaataccttgggacaattgtaagttcaatctttttatgttggctcttattaccatctgcaaagtcatgatgaaaagaccctttgagtatcctttccaatttccttttctatcataaaacccccacgtttcaactattcatacttagggatatttatttaaacggcttacaaatgccctgattacgtgctagaaatacttaaaaataagatcacaagaactctgttgcccaccaatgcaacatagcagcccacataaatctcatccgatgccgaaggatgctcttgggtgtgggaaattacccttgcccgtatccttcgagaatcgtgcaaattctatcacgtcagtgagaacctgtcaatgttgttgctcagcgcgttgttgtcctcgtcctcgttgtcctgctccttttggccattggcccaccgactgacagatggctgtctggtggcattaggtggcaatttgtaggcaataggcagccgaggagccagcgagacaattgccctcgcccggctgttcctcccaaacggcttggcatcgttcgtatccagatagaatttgccacgaatcctgtaaccagcattatcagttggatttgcagagattgagcggtttccaactactcacctgggatccgcccccatgcccatgaaggcggggccacctcctggttcacggcaaatgccgaacatatcggagggctcgcaacgctgggcgggaaatcctcgaggctgggctatgctctccacgaagtattcccaggcacgctggtgactgcagccaactgcaaaggaaattggagcaattagctgtaaggttttaaaatttaaaaatgtttaataggaaagttcttgaagttaaaaacaaataacttctctttgccaaacagacaataataaaatactaaaattaacatttatcaatttcatctaaatctctatctttatgtgtgaccaatgctcaccaatgattcccagccagttattggcaatattctgtttggcacaacccggctgcaggggtcgtccgccattcggatagaagtctgcatgacccatgggcgctggattgcccagaaggccaccgtcggtgtggatgacatccacgaacctagcgtcactgggactcaagcggcggttggagctgttgccctcgaaaagcggtagagctggatcgagggccgttatcctgggcagcttgatgccccactcctgcagctgcttgcccgcaaaaccggccacctcggcgcccagactgaagccaatcaagtggatgtacttcgctgggtaacccttgtccaccaggaatcgcaggaacctggccaaatagcgacccgacaccggcagattctcgacggcattcgagtaccagggcaccgctgtcatcgcgctccagtcgatgaggatgacattgtagttgcccctcctgagaaacgctgccgggggaaatcggacagggatggaagatggacagggtatatattgttgatttttttggtcgaggtggcaggaagtccccactcaccgtcctttagctcctggctgctctgccgttcgccggtggccgattccgagaagccgtgcagatagatggccagcgggtaattgaaattgaaattgctctgcgccagccgggcatcgtcgctcaggtggagcagttgtgcggaattgcggttccgactgcaaaaggtggacccatttttgatggcccctcaatatgcatgagctgggatgaaatgaagatgggtcgccgcttgcttacctggtgtacagcatgaactttatgtcctcgcgctctttaatggcacagcaagtggagcaggatccacgcggagcggcgctgtagaaaatcggtgaaccagctgggatatacaaaaaaaatacaatccaaataggaaattataaaagaaataagaagttattttgtcaaaagacttactgaaaggaaaccaattaacaaaatgtttgtaagcaaattgttctgcaacttcttacaacgtagccacaaaatgaaggcggaaatcgaatttgtcaagtggtaagcgcaagccaatttgttgagagcttggaatacaaaactaattgattcattagcttcattaacccacgcgtccaacaaccaggtagccgcagccataacataacaatccaaaaaaaagtaataacaaagatgaaaaccaaaagtcaaacaaaaacagtagcaaagaaatcgaaactggcctaacgaagaccaacttggccatgaacttggcgggagtaaatgaaatcgagtggaatggcatgtattgtggggccaacaaaaacacaagtggcagtagccactaggcagcacgtgacgcatacgccgcgtgttacgtagcagcggtggcaaaatgaaaacaagttttcatttccatcaggttttcgatgttcacacggccaagtgcttaatcagatcgattcgcgagtgggtggtgtctttaagaggcaacaccaccgtcagtgggtcaaccacattgggatgtcaatgacggctttttcgtactctctgttttgctacacatttttatcgtcagctgcgaatgcatacggataatacacttgattagatgccaactaacaatgacgttgaccttactcactgccggactcatttgcgattccgtccacttatcaccttccgttttgctcaataaaaaaccatatcaactttggaatggtcttctccccctgagtttctaattgttgaacaagtgctgataattaattcctaaatttaataaattatgctgtaagccaaacttgtatattatcatcgaagcgtgggtgtttaaataataataataaatggggtatgattattctgatggctatataataatgtctaagtgtataaatataatagacatcagaaaacattaatgcccgcagttaataagcaatttcaagttagagtgtctccaattcgcgtttctggtgctcttcgtggctttaatcgtactccaaatattatgaatgtagcttaaatatcttttatttatgtaaatgtggggtctgcattcatatatatatatttttttttgtacagagcggaagagtttgtcgcgcttatttatgaggaatgttttatagttgttgctgatatagccacttaataataattttcgtcttctttgttttgcttggattggctttgtttccacgttatttcacgacgtcatgccgtgcatttaatttgtatttctttttttttaattatcgcactgctggctttaatttaaatgtacgtgtggctggcacttaattagcagctttaagccatgatgatcgttatggttgcactaagaactttacgggtaccggctttatgattctagcgaagtgatttccagactgacattgaaaattgtgtggttcacgttattgagaatagcgttaagaactatttaagactataatgatctatataaaagcgaacataaagaggaagactgcacaagtctgttatgcgatatattgatgatttgtttggatagtaactatctctttagttcccaaccctttgttttttttttttttttgacaaccttctttcacagcccactggccatccaagctgacctaccccaagtcaaatattgccgatggtcaacaattgaatcttttgagtgcgcgtatcaacaaagacgttagcttgtttggcttacaagccgttccgccttgaacttatgtgcatagttacgccccaaccgcccacttgggacacgattttccagctgacattgaggcagaatcaatgctaatagatgccactttccgtttcagcctaagtttccactccacggcgatgtctcagcttacccagcagaaatgtaaatacattgcataatgtcgaggcagccgttagcaccatggcaaatacaataaattagtttaaatattgtttcaagttctgcgacggtttgcgttcaatgaaccgccgaatttgggcgtgcaattccaattcactttcgtacgcgaaaattaacattcaaatcggtttccgcatttgtttatgtatttctttgcctaatttagctaaaacatatcacgactacgatcgataaaaaaaacgctctgttctcaacgagctgccaatactgactgaacgatcggaactcccgatctgacgagctagactctctgtctcagtcgacggcgctgctgacgtctctgcttccttcgccggcaatctgataaacagaatttgcgcggccctaaaacgaaagactcagacagcaaactttagcgcgattgtaagccataatacgttccgtatttaaatgagttaatcaggcatgcaaaagccggccgagatcgtaaaacagttttcggtttcctgatcgtcgtgcgtccaacacccacccaccgccacccatttcatgccgggcattcgcaatgagtaggccacccaagtgatctttgccgggaaaaaggcaatccaaaagttcagccggatccatctgacaggcagctcaccttgaccagatgagactttccgtttcaattcacatatcacctctcgatcgcatccaacctccgacatccgacagccacaaaaggggcagatatatcttgaattaagataaatcgcttaagtcgttggtataagcaatcatgaatatgccgttacattattgggacttaagttccaactaatatgaaattcattttttctctagtgggagaacttatttttaactaatagttttaattaatttaaatgatcccaataaacagttattaaaattaacgaaggacagccactccttttagttgtactcaattttatctgacccattctttgtgaatcgaaaccctgttgtttgtgcagatcaattagtatggcgctgatttattcattaatcactccaaatatatgcaaggttttaaataaaattaaagatcttgattatcttagcatagtcgaatgctctgactatgcttcgattacttcgattacataatttgtgggcgtgcgatttcgcggcttttttcgccaacgtctcagctatcgatacgaatacgtcgaattcagtggcgacttaaagggtatatcataacaaacatacaaaatttaaatacaattatgcattcaatgctaataaaaaataaagaaaaaatatgtttctacgcgatgttttaaaatactattccattacgtacagcgtgaatatttaacttaaatccgaaaggtacaaagccattgaaatctttgtcatgacagcttgtcatggtagccaaaacgatgaccagtcaaccgtaaatccctcagctgttgatacagatggcaggagataattgcataaagattctttggacatttgtggttgccaatcgaacacttgattgatttgccattgcttgtaaagccacggaattccaattaaacgtatatctagctagcatatatgcaattaaaccgcagataccttcgatggcgaacaacttgcacggctttcgatgtgacattgaaaagccatcaagtgcaagggctcagagccgcacagtcaaggaaatatactttagccatgtattagccatgtaggttctatatcaagagcaaactaattagtcgtacttacacccgcagttgtgcaaaaaacagactatgagaataactttacaacttccgaaagccttggcaatccgatggctcgcaaataataaataaatttggaatggaacaaagggagcagttaccaaaaatagccatagtaactattaatagcttaatgcgatcgttaaccagttcattcaatcagcgcttaaaaagctgctgaatcacaaaattaattacccgaggggatggtcaacaatgcgcgattcttataaatggaaagattcgaaatcaataacaagtatcatatgtttaacgatctgtcagtctgaggtcgagcacccaaactgacctcagaaggcgtctatgcagatattaagatatggagatacgaacttatcgagcacagctcatcattaatttgcataatcacttgctaattcgatatgaaatcagaccgaaaggcaatgaaaagatcatgttcaatgggtaatacttagcctaatttttatggatctgtaaaaaagcttctggacaaaatgcttgacaataagctgtcataacttacacctaatcagcagttgacctaataaacttggtcgatcaatatttgaacagttactttagggtttttatgattttcaaatttatcaaggttacagaaaaaacttcagagaccaattaaaattaaatttaaacatatgaattccatgtttattagacttatgcctgcagtacgttctggtaaaaattatactttagtcaacttaaaagaatgccgaatttgagcaggtcttattaataaacttccctcatttaggacgacttagaacacgtctgtcaccataaactttaagataatttcaataaaaagtgaatgttcatttagcactagcagcatcataaagttttaacctaaacagcagctgcaaataatttttgttgccgcagaaaataggcgttacttttatcactattcgtacttttgctttatgacaaaaatatttaagaataaaatgttctttttggatctttaaatttaaacgaataaaacgtatcatatcaaatcgaagaaaaaaatagattgtcagttttcttgggactgaatgttttataaacttaaatgaaataacttgcatactttatggctaacaattataaccaatttctagacgctagtgaagtgactacttaagggcttaatttaatttcctcttccaggacaaactactgagtaaactggaggaggaaagcgagccggatcctccaacctcccaggaggacgaatgtgtgatctgcatcaatgcccgggccaccatgcagacatcgccatgtggccaccgcgtcgtctgccgccgctgctttgtgaagaccattcagagtgcggtggcccaacgactgttgccccttcgctgcgtcatttgtcgagcgcgggtcaatcgtctgacctcgtcctcgggcacttggcgaatccaggagtcggccagcagctactcaatgggcgccaagagttgggcctccgccggagtggccgccggcggtgtggtaccctcggcgagctcctactcgatgaacgatgcgcacagcggccaccattcgttccaccagcccacgctgcacaagtcggcggtgggacggcatcacccgcatcattacgccgcccgaggatcagcccatgctcgagtctcccagtcggacagcctgtactcgatgagctcgacgggatcggcggcttcatcggcctccggttattcacactactccaagacgtcttccatatcgagcaacggtccctgctcaccggcctcgccggccgtggcttccagctccaatcacctggcaccgccatcgcccaccacccaccatcacagtcatagtctggcctcacccactccatcgggatcatcgggcagttccctttcaccgcgggaaaatggaacttcacattcgcatcatggtgggtgtcccattggttgctccggtgccgtgccaagaaaaccgcttcacacgctcaccaatagctcatccacgcccatttccggttcatcgtcgagcggaagtgggggaggaggagtgggcaacggcaacggtagtgtaccaagtggaatgatgacgcctacgcatacgtatcctggccgaaggcatgtaaagaaccgactgatggacatccagaaccgcctgccgccgatcaaggagttccgcagtccggccaaagtgccgcatccttcgcccgtgcacgtcagcaatcccagatttcggtgagtggaataccaggatcaaatatgtatttatatatgatataaatggttatcgatgtctccttgcagttactccacttatacaaagtccagtgcccatgaactggctccgttgctgcgtgaatccggatcgtcgcctccgccacgtcgccccagtccgatgaacatccagctgagctgctccgcactggccccgccccctttgaaggcgggcggggcaaagatctgcccactgacctcgaagaactcgctgccgaaaaacgcttacgtgatgcccaaggataagaagcagccagcttctgttccgcaagggaaagctactggtactgcctccaagtcgactccacaaggagcaggctgctcgagggcatcagctggatgttctgctgccaattcaggatcaactggagctggatcggctagtaatcccaagccctcgtcaagctcttccagtcgcagttttccgcttttctccgccgccagtaatcagagtgagttttaaaaagtggtttttatagcaaaatcgcttactcgcttatcatatcacccaaaaactttgaattccaggagagaaggctgacaataagaagaacgaatctgttgagcgcaagaaaaaggaggaaaagctcaagctgaaggctgagaaggaagccagaaaggtgggtgaaattgcagagaatccgttgtactcgcgttccttttttgttagcaggatgcattgttttcccccacccttaagagtttctgaaccagcctgtgcatatttgcattgtttgtaattggcctcgttccccttttttctttttaccaactgttttggaaaagtttttcattaatcgcgggcgaaagggcttagggaaattggcggggaaatgctgaaccttttgtgccggcaaagcataaatttccaaacttatgagcacggctggctcataaagcgctaacaattccgattttcttgtttatgatttccactgcatgcaaatgcaagccaagtttattcactctcaattttgcaggaggaaaagcgactggccaaggaggaggagcgtctggccaagctgcacgccaaggaggagaagaagcggggcaagaaggaggccaaggagctgctgttggccaacgatgggaacagcaagaagtgagggaagggcacccaattagccagcaaaaacgcatatttccagttgcaattctagccatgtaagatcatcaccaagtacccgtgtaaccgtactatatcaagccagataggatcggatggaatcagacctccaactcacacacctcaacaccccctacccatatgaatcgagcttgattgtaattttatgaacgtaatttgtcagttaggcctcaatcatttccatgattttttactcgaaatagaaaatagagaagccaaatatttaaaaatagtttcttaaaaaaaagaattcactgtagaatcgtgaaatttaaatcaccttcattgtacttgtgtctgcatatttacttcttttgtgggcgtttttggcatttaatgcttttaattcaaaagaaaaactatgccaaacatttgtatttaaatgataaacctttggcaagcactgattttttcactaatattttgctttcatttcgtttatagtcgtaagcagaaacttccacttagttttcattacgttcactgcccactttcataactcttcaccgtctagagatatgataagaataggatgatattgctgcctttcgttcgacattgcctcagtctcagtctcaacatgaatcattaccaattaaaaaggttgttgaaacaatttcaatttgaacagattctgatgaaaatatccgtaacagtcctttttactttcaagtttccatatactagactaccaaacagaataccccttaatagagagaacctcatctcgagatatagaaccatgaccactgaatggcaaaccaatgttagagccaagctttagcaaacgtaagccagaatctgaataaattaataactatgtactaccagtatgttaacatgtttacaaaaagcgagagcatattaaagtagttttcatatacccctctatatatattatatatatatatctgtatctgtaactaaatctatagaatccatacctatattggaaactg

SEQ ID NO: 18995 - DNA, 2242 bp, DROSOPHILA
taactttattcgaaaagccatttgcaccaagatttgcaatcatcgaactccctttacagaatgcaaaattgattgcagcgtatcagcggcaaatttagcaaacagaaaacagcatgcgaaggaaaaagaaaagtgtaatgatagcgccaaggaaccaaatccgactttagtgccaattgtgccgtgcgaaatgctgttagtgccgcgttgttgttcgtgtccatgttgtgattacataatgagacgctgctgaaagtcaaagtccaaggagaagtcccaagtgtgtatgtaagccaggcggcagccatatctcaacttgccgccactaactcagccgaagtagaaggcgaagcaaaagcctaaggaccagccctccatctgcaggataacgaggagcgtgaggagccgcaggaggatgcccttcggccgcaagtccccgctggaggcactggcccttcccggcgtcatgctcgcctacaagtacagccagttccgccagcgccgccgggaggccgccagccgacgggtcaccgagcgcgaactctcggcgctgcaccataaaatcgacaaactactgagtaaactggaggaggaaagcgagccggatcctccaacctcccaggaggacgaatgtgtgatctgcatcaatgcccgggccaccatgcagacatcgccatgtggccaccgcgtcgtctgccgccgctgctttgtgaagaccattcagagtgcggtggcccaacgactgttgccccttcgctgcgtcatttgtcgagcgcgggtcaatcgtctgacctcgtcctcgggcacttggcgaatccaggagtcggccagcagctactcaatgggcgccaagagttgggcctccgccggagtggccgccggcggtgtggtaccctcggcgagctcctactcgatgaacgatgcgcacagcggccaccattcgttccaccagcccacgctgcacaagtcggcggtgggacggcatcacccgcatcattacgccgcccgaggatcagcccatgctcgagtctcccagtcggacagcctgtactcgatgagctcgacgggatcggcggcttcatcggcctccggttattcacactactccaagacgtcttccatatcgagcaacggtccctgctcaccggcctcgccggccgtggcttccagctccaatcacctggcaccgccatcgcccaccacccaccatcacagtcatagtctggcctcacccactccatcgggatcatcgggcagttccctttcaccgcgggaaaatggaacttcacattcgcatcatggtgggtgtcccattggttgctccggtgccgtgccaagaaaaccgcttcacacgctcaccaatagctcatccacgcccatttccggttcatcgtcgagcggaagtgggggaggaggagtgggcaacggcaacggtagtgtaccaagtggaatgatgacgcctacgcatacgtatcctggccgaaggcatgtaaagaaccgactgatggacatccagaaccgcctgccgccgatcaaggagttccgcagtccggccaaagtgccgcatccttcgcccgtgcacgtcagcaatcccagatttcgttactccacttatacaaagtccagtgcccatgaactggctccgttgctgcgtgaatccggatcgtcgcctccgccacgtcgccccagtccgatgaacatccagctgagctgctccgcactggccccgccccctttgaaggcgggcggggcaaagatctgcccactgacctcgaagaactcgctgccgaaaaacgcttacgtgatgcccaaggataagaagcagccagcttctgttccgcaagggaaagctactggtactgcctccaagtcgactccacaaggagcaggctgctcgagggcatcagctggatgttctgctgccaattcaggatcaactggagctggatcggctagtaatcccaagccctcgtcaagctcttccagtcgcagttttccgcttttctccgccgccagtaatcagagagagaaggctgacaataagaagaacgaatctgttgagcgcaagaaaaaggaggaaaagctcaagctgaaggctgagaaggaagccagaaaggaggaaaagcgactggccaaggaggaggagcgtctggccaagctgcacgccaaggaggagaagaagcggggcaagaaggaggccaaggagctgctgttggccaacgatgggaacagcaagaagtga

SEQ ID NO: 18996 - protein, 526 aa, DROSOPHILA
MQTSPCGHRVVCRRCFVKTIQSAVAQRLLPLRCVICRARVNRLTSSSGTWRIQESASSYSMGAKSWASAGVAAGGVVPSASSYSMNDAHSGHHSFHQPTLHKSAVGRHHPHHYAARGSAHARVSQSDSLYSMSSTGSAASSASGYSHYSKTSSISSNGPCSPASPAVASSSNHLAPPSPTTHHHSHSLASPTPSGSSGSSLSPRENGTSHSHHGGCPIGCSGAVPRKPLHTLTNSSSTPISGSSSSGSGGGGVGNGNGSVPSGMMTPTHTYPGRRHVKNRLMDIQNRLPPIKEFRSPAKVPHPSPVHVSNPRFRYSTYTKSSAHELAPLLRESGSSPPPRRPSPMNIQLSCSALAPPPLKAGGAKICPLTSKNSLPKNAYVMPKDKKQPASVPQGKATGTASKSTPQGAGCSRASAGCSAANSGSTGAGSASNPKPSSSSSSRSFPLFSAASNQREKADNKKNESVERKKKEEKLKLKAEKEARKEEKRLAKEEERLAKLHAKEEKKRGKKEAKELLLANDGNSKK

SEQ ID NO: 18997 - DNA, 9810 bp, DROSOPHILA
cacttgctaattggaatcgaaaagtgtcaaagtttcaggaggttctttttgtttaataatactgtgtttaatatgcatatgttcgcgtgtgtggtgctcatgacatacatacataaatgccaacaaagtcccaaatatcgcattcatttgcgaggggacttcgcaggacgttataaacacctttataccacattctggaaatgccaaacgcagtgccaagcccacgcaactttataataggatatacattgaatgaagtagtgccatgaatgccgtgccgcatgatatttgatccattcacggagtcggtcctggacctacaaagtcacaataaaccttctgtttagtgagacagcgtaatgtgaaaaatgttgaggacgtacaagccaggcatttaaatttattaacttacaataaacatttatgtaaatcataaaaaacccagtgacacaataagtaaataacaaagaccagaagtaaccaagtgcttacaaataagatgaatagagtaaaatctattgagtgacacctacgcaaagaacgagtgtgcttaagtgtaacatatacacaacatatacatcaggtgggcgggttttgcgcatagtaacccccctcccccaagcccaaaactttgcattaactttatattgtccaaaacctagagacaaaaaatcattgagtgaatttcattattttaaaagttacgccccgccccccctcaaaaaaagaaatatatatataaaactctagatccgccttggtagcaaaatatgttatacgcaagcgctcaatacgaaaacctccttctctctaccttcctctctttctcttaacagaatcggaacagcagttagcagaaagcaacagcacagcagcagcagcagcagcagcagcatccgcttagcagagcagcaaatgcttcggaagcaaaagcagtaaagctcgcagcgctactacgttacgtgcctatgagtgggcgagtttgtgtacatgtctggacatgtatttgacagcctttcccttttggccattggtatgcttcgtgtggctctgtaagtattgtcctcgcaacacagtttgtcctggggggagatgaagggtatctctctgttaacgcccacgatgcgctcagaccaacagcactttttgctcaatgaaaacttgcacacgaaaactagccaattgagaaaattccctgctcaagagggcttaattgtaatacgaatttccaggaacatgcaatctataatatgtatgtgcaaggcatcaaagaacatgcatcgaattgaatgaaacttttttatttaaggatattgcttgcatacaaaacgtgtccatgactatgtacatatgtatgtatgtacatatgtatgcatgtttttgtaaagctgtttttgaactattggaaaaccttttaactcaagacatgacctttgtatgtatcaaatcagaagcattgcattcaatgctcctttcctatgaaaagtgttgtattttccaagaacattgcagtggcgtgggaacaatagcaaaacgtgccttttgctatctgctttgaatgagaaataggggggttttcctttaactacttgtagttaacattcaattcaacttaacacgactgaacttgtatgataaggcaaaagcctttgctgcattttgagctaattagaagttaaatggtatcgatttaaatcctttgactaggtctcggtctcggcgacttgacaaaaactgctgtgaaacgtaacgcgccccactatggaattcacccgacaaacgcactgggtcgttgggattggaataagcacaagcagctgcactcggatgccagaatcggacatttagaggcgggcaacgagtcgcgggaggatcagctgtcggaggagctgagcaagttcggcgagaaactctttcccgtctccaactatccgccgtatcagcagaataacgaggatagccaggaggtgcatcatagtggagagggaagattgcatacgatggaatcgtctgtgccatccaagactagaatatccggtggcacaaattcaaacgatactcccaagttccggaacattggcgcccagaggggtagaaccgaaatagccggcattcgcgaaactgatcgaatcagttcacgtggtcgagatggttttataggtggtccgagtaacaaacagaagccatttagagtcaatctggccgttctggtgcaggacgatcccagtcaaccgggtgagacatactccaattgccagaactccaatgaatccgacgagaactgcaatcccgaggaggatgcagtgccgaatttgcaaagggattgcgagaagaccgggatacatgtgatgtgcccgcgaacctttcgatgcattagcaagtattggctctgcgatggagatgatgactgcggtgactactcggatgagacgcactgcggagccaggacgaattgtacagatgatcagttcgagtgtctcaacggattctgtattccacgaacctgggtatgcgatggcgagaacgattgcaaggacttctccgacgagacccactgcaatcgcaccacctgcacggatgagcacttcacctgcaacgatggctattgcatctccctggcctttcgttgcgatggtgagcacgattgcaatgacaactcggatgagctcaagtgcgcggcggtcataaacagctgtccggagggcgagttcaagtgccgcggcggtttgggtggagcaggtggtcccagtggccagtgcattctcaatcgtttccgctgcgatggcgacaacgactgcggcgactggagtgacgaggagaattgcccccagaagccatcactatgtacctcgaatgaatacaagtgtgccgatggcacctgtattcccaaacgttggaagtgtgacaaggagcaggattgcgacggcggagaagacgagaacgactgcggtagtctcggctcggagcatcccctgacctgcggatccgatgagtttacctgcaacaatgggcgctgcattttggtatgaccactggagtctccttaacttctttacctcattgagttttctgttgtcaaatcagaaaacttggctctgcgatggctatccagactgcgctgctggagaggatgaggttgagtgccacctacaatgcgacctgggacaatttttatgcccaaccaaacaaaacctaacaaatcttaagtaagttgaattgctcatgatgtcctcatatcacaagcaatccaattaccaattcccgattgtatttttcaggatatgtgtccatcagaagcacatttgcgatggccacaacgaatgccccgccggcgaggacgaggccgactgtcccaaggaacgaaagtgctcggaaccgagtccttgcgagcaactctgcattgaaaccactgcaggatcgaacgagtgtgcctgtcgacttggatatgtcatggacaaaaacaaagtcaagtaagtagacgatttgtttaccgggtatttcgtatgatattaaagtgatgccacgattgtttagctgcacggatatagatgaatgccagtacctgaccagtccggtttgctcgcaaaaatgtcacaacactatgggttcctttaagtgctcctgcgaaacgggctacatacttcgtccagatctcagatcctgtaaagcgctgggtggtgcgatgaccctgctggtggccaaccgatgggacatacgacgggtgacgttgagtaataaccgatactcggcgattgttaagggacttcacaatgcgatcgcattggacttccaccatcgcaagggcctgatgttttggtccgacgtgtccaccgatgtcatcaagatggtgtatatgaatggaacgcgagttcgagacgtcatcaaatggggtctggagtcgccgggtggcattgcagtcgattggatacacgacctgctattttggacggattcgggcacgagacgtgtggaggtttccaatttccagggaaacctgcgcaccgtcatcgcatcctacgatctggacaagccacgtgccattgtggtgcatccgggcgaggcgttggccttctggagtgactggggaccgaatccgaagatagagcgcgcttacatggatggaacacagcgaaaagtaatcatatcaaagggtgtaacctggccaaatggcctggcaattgacttccccaacagcaagatctactgggctgatgccaaacagcatgccatcgaatgctccaatttggatggcagtgatcgaaacaagatccttagcacccatttaccacacccatttgctctcactctcttcgaggacaccatgtactggacggactggaatacgaaaactgtgtcggcggcggacaagataacagggaaggaattcagagcggttcatgagaatttccatttcccaatggacatccatgcctatcatccggctcgacagccggaatatgctgatcgttgccaaaaggatcggcggggtctgcgcggtgggtgttcccatctctgtttgccgaacaagacatcacgacgatgcggatgtcccattggactttcgctgaaggaggacggcaagacgtgtaagagtacggccgataaactggtgttggtggcgcgacgaaaggacattcgcttgcgtcatctgagggacaatcaagcggatcccaacgatgttgatatgattgtaccattggataatctgaaacatgccgttgccctggattggtgcagcgacacggacttcatctattggacagacgtggagcgcagcaccatcaataaggcgcatctcaatggaagctaccaacagcgagtggtgcactcgaatcttgtttcccccgtgggtctggccctggactggataaccgataagctctattggacagatccgtcgacgaatcgcattgaggtcgcaactacgaatggaaagatgcgaaccttgctcatatgggagaagctgtacaagccacgggatattgttgtaaacccgattggttagttgaaccacgtataatttatttatctatgtcatgttttggtgtatgtagctagctgtaggattaagatacttgctcaagtcctgcatgaaatggacgtacttttgggtactccatataacttgttaaagtcgtttcatcatttgcactgtgaccactcagtctagagagttgaaacactcgagttctatgttcaggtaggctccggttttgactttcgaatgcatgtttcaatttactttttaaaacgcaaaaaaaaaaaaaaggaaatgcatccgcttattattatatcaagcgttttaaagggttaaatgagctcttacacctataatcaattattattttacatattccatgggttaagctattgtgctaatctcttctactctccattttaagagggctttatgttttggtcggattggggtgatgatcctatgattgaacgtgccaatatggatggacatgaacgtgtaaccataacatcgaagaaattaatatatcccaatggcctggcgattgattatgagaagagcaagatctattttgtcgatggtggcacaaagacgttggagaacatgaatttcgatggcagcggtcgccaagtgattctaagtaagtattcactaataataattcaaggataatcacttcgaaatatcaatatatctacaacttgtatcctaacaatgatcgccttatgcacagatggacttggccatcccttcggcttggatgtcaacgagggccgagtgttttggacagattgggataccaagtcggtgatgagcgccaataagctgactggcaaggacaccaatgtcatcatcgccaacagtacagacctgatggacatccgggtgttccatcgcacccgcaggcgcatcttcaatgcgtgcgacaagctgaacggaggatgctcccatctgtgtctcttgaatcccaccagctacacttgcgcctgcactgtgggtgttcaactgaaggaggataggcacacatgctccgaaggaccaactcagtacatattgttcgctcataggatcgatataaggcaaatatcattggatttcgatcatctgatcgatgtggtgctaccactaccgccaatctcgaatgcggtggctctggatgttgatcgtaagacgggctacatctattggtcggacaccattgagaacgtgatcatgagctcgagtccagatggtctgcacgttcagaaaatcgtcggcgatagcctggagaatcccgatggtctggttgtcgattcgattggtcgtactatctactgggccgatgccggtcgccataccatcgaagttgcaagtcttgatggtagcaataggcatgtgattgcctacaaggatctggagtcgccacgtggcttggccttggattacgaggctggcttgttgttttggaccgactggggacactatcgcaagattgagagatcccatttggatggcaacgagaggtctcgcattgttaccgccaatctgggatggcccaatggtctgtcactcgatttgaagagcaaacgaatctactgggtcgatgcccgcctgaagaccatcgattcttgcgattatactggaaatcaacgcaagttgataatgtcatctttgcatcatccgtatgctctagctctatcggatgataatatctactggaccgactggaagtcgaaggcattgcacatgacggaaagacgtaacatcagtgcaaagcgggatataatcaccaacatcgatggcctgatggacattaagattatctatcagaatcagaatcaatcaacgatgaaaaatgcgtgtggtaacaacaacggcaactgttcgcatctctgtctacgtaatccatctggatattcatgtcaatgccccattggattgcgattgcgccagaatagcacaacccagtgtcaaaatctaccagaggtaaggattaactttcattagcaaacccaactaataagatcattctttcaggattatcttcttattgccttgcgttcgggaattggtatgatttcgttaaactctggagatttcatggacgtcgttttgcccataaacggagtgcatggagcagtcgtactcgactatcattaccgcaagaatctactcttctttgccgatgttaatttggatgttattcgtagagttaacctattgaacttaaccgaaagcaaggtgattgtcggtacggatgtgcttacgcccaacggaatagccgtcgactggattgcggataatctgtattggtccgacactgatcgcaaactaatcgaggtatctcgactcgatggaagctgtcgcaagaggatcgtcgaggataacttgggtgacccacgatcgcttattgtgcatccaaagaaagcgtaagattacctcaattattcagtttatatttgtatactactcatcatcaccattgtagctacctgttctggtcggattggagctcgccggcgaaaatcgaacgtagctacttggatggctcaaatcgcacggtgatcataacatctggaatcggctttccaacgggccttaccatagatttcacgttagttgcgctaggcggtacttaaatttggaatactatacaatattcatattattactttacagcaatcgccgcttgctgtgggccgacgccctggaggacaatatcggtcaagttgatttcaatggtaaacgtcgtcagaccattgttccttatgcaccgcatccttttggtctgactttggtaagactgactgcatgttttaccatgcaaaattcactaataagcctcatcattcatttagtttgaaaatagtatattctggacggactggtacaacaagtcggtgtatcgatctcagaaactggcgcgcagtggatatggcaatccgtttgaggtgcgcgatgccctaagtggagcactcgatattcgcgctgtctcgctgagccgtcaaccaaaaagtgtgaatcactgtgcccaggataatggtggctgtacgcatctatgtcttaatcgcaatgtggactatgtgtgtgcctgtccggatgtgatggatcccaaggatgtggcatgctccattaagccaaaagttttggtgcacgccaacttggagaacgatcagttgctggaatattccgacgaatccaccgatgattccacaccgcctgagctgctcggcgagtccaatgatcatggtgatgatggtcatacgaagaagagcgatcaggagcgagaattctttgtcctcgtggcgctgggcgtggtcattgttatggtggtcatcataatacttgttattttcagtaagaaaatgttgttgttcgaaagggataaagaaatctctggagcaatggaatgctatgaaagcacttctagagatttctataaccttcacaatgttctacatttagtttcgatcttaatctttatatcctatacttaccagtgcttgctttcaacacgagcaagaagaaaaacaaacgcaattcccgcggctccagtagatctgtactaaccttctcaaatccaaactacaacgttgatggcacgccaatggaaccgaagacgaatatatggaaacgttttaaatacgataaaacccatgtaagatatcgaaagtgaaacgaaagtgctggattataattgcaatccttttagcaggaacgagccggggtctatgaagagcgcagtctaaccacggagacggcatcctccagcctcttcgttccgactccatccccgatggcgtcgccctcaacaaaaacaatccaactgacaacgctctcgactatcacatagttggcataaatagttaatggcccacaaaggggatcctctgaaaccatttaccgattcatgccatcaacgtgattgatttgattgtaaatgtaaaaaaaataacaactgtttttaatttgatcttgaaaccccagtagaatattctgcgatttttttttgttttttttttttttttgtttttgtgaaagtgcaaacgtgtcctgttaaagctcaaaacaaaaaaaagtgggggttttaagataatacaaaatgaatatattatatatgtaatatgatatatgatattcaattatgtaatcactaaattattttcctattttgtaataataagtaataactattaagtaattcgggtgcttcgactttgaaacaaaaaaaatatcctactgttgggcgcgttttttgtttgctgatcacgaaattgatattgaaaattgtaatgaccatacataccatggtttatgtttatgtctgattgccaatgataaaatcattgtcaagtccaatcataaacaacacagtgcaaacggaagttcttcagcgatttccgtttccgcgtcgcgattaagtgcaaatgtcgaaaaacttccaattctcttattttatacatgtatgtatgtatgtgctagactgttgatttaagtctgtatgcaaaattgtacaacgtaattaaacgaagaagtgttaacaaaaatttccagagtccaaggaatacaaacaccatggctcattatacattttattaaacgggttttgttttaaggcatgtttttcaaaatacaaaaatcgcgaacttaattccattcagggattcgtcaaaatatctggtaacttaagttttctatccgtgtttgtaaatatattttttgcttgcagatgtataaactattaaatacacaaagaagcattcttttatttgctcaacaatttcggggcaacatgattttcggtcttatgtgtttttccaatttatgaatttcctatgtttttggaattttta

SEQ ID NO: 18998 - DNA, 6030 bp, DROSOPHILA
atgtatttgacagcctttcccttttggccattggtatgcttcgtgtggctctgtctcggtctcggcgacttgacaaaaactgctgtgaaacgtaacgcgccccactatggaattcacccgacaaacgcactgggtcgttgggattggaataagcacaagcagctgcactcggatgccagaatcggacatttagaggcgggcaacgagtcgcgggaggatcagctgtcggaggagctgagcaagttcggcgagaaactctttcccgtctccaactatccgccgtatcagcagaataacgaggatagccaggaggtgcatcatagtggagagggaagattgcatacgatggaatcgtctgtgccatccaagactagaatatccggtggcacaaattcaaacgatactcccaagttccggaacattggcgcccagaggggtagaaccgaaatagccggcattcgcgaaactgatcgaatcagttcacgtggtcgagatggttttataggtggtccgagtaacaaacagaagccatttagagtcaatctggccgttctggtgcaggacgatcccagtcaaccgggtgagacatactccaattgccagaactccaatgaatccgacgagaactgcaatcccgaggaggatgcagtgccgaatttgcaaagggattgcgagaagaccgggatacatgtgatgtgcccgcgaacctttcgatgcattagcaagtattggctctgcgatggagatgatgactgcggtgactactcggatgagacgcactgcggagccaggacgaattgtacagatgatcagttcgagtgtctcaacggattctgtattccacgaacctgggtatgcgatggcgagaacgattgcaaggacttctccgacgagacccactgcaatcgcaccacctgcacggatgagcacttcacctgcaacgatggctattgcatctccctggcctttcgttgcgatggtgagcacgattgcaatgacaactcggatgagctcaagtgcgcggcggtcataaacagctgtccggagggcgagttcaagtgccgcggcggtttgggtggagcaggtggtcccagtggccagtgcattctcaatcgtttccgctgcgatggcgacaacgactgcggcgactggagtgacgaggagaattgcccccagaagccatcactatgtacctcgaatgaatacaagtgtgccgatggcacctgtattcccaaacgttggaagtgtgacaaggagcaggattgcgacggcggagaagacgagaacgactgcggtagtctcggctcggagcatcccctgacctgcggatccgatgagtttacctgcaacaatgggcgctgcattttgaaaacttggctctgcgatggctatccagactgcgctgctggagaggatgaggttgagtgccacctacaatgcgacctgggacaatttttatgcccaaccaaacaaaacctaacaaatcttaagatatgtgtccatcagaagcacatttgcgatggccacaacgaatgccccgccggcgaggacgaggccgactgtcccaaggaacgaaagtgctcggaaccgagtccttgcgagcaactctgcattgaaaccactgcaggatcgaacgagtgtgcctgtcgacttggatatgtcatggacaaaaacaaagtcaactgcacggatatagatgaatgccagtacctgaccagtccggtttgctcgcaaaaatgtcacaacactatgggttcctttaagtgctcctgcgaaacgggctacatacttcgtccagatctcagatcctgtaaagcgctgggtggtgcgatgaccctgctggtggccaaccgatgggacatacgacgggtgacgttgagtaataaccgatactcggcgattgttaagggacttcacaatgcgatcgcattggacttccaccatcgcaagggcctgatgttttggtccgacgtgtccaccgatgtcatcaagatggtgtatatgaatggaacgcgagttcgagacgtcatcaaatggggtctggagtcgccgggtggcattgcagtcgattggatacacgacctgctattttggacggattcgggcacgagacgtgtggaggtttccaatttccagggaaacctgcgcaccgtcatcgcatcctacgatctggacaagccacgtgccattgtggtgcatccgggcgaggcgttggccttctggagtgactggggaccgaatccgaagatagagcgcgcttacatggatggaacacagcgaaaagtaatcatatcaaagggtgtaacctggccaaatggcctggcaattgacttccccaacagcaagatctactgggctgatgccaaacagcatgccatcgaatgctccaatttggatggcagtgatcgaaacaagatccttagcacccatttaccacacccatttgctctcactctcttcgaggacaccatgtactggacggactggaatacgaaaactgtgtcggcggcggacaagataacagggaaggaattcagagcggttcatgagaatttccatttcccaatggacatccatgcctatcatccggctcgacagccggaatatgctgatcgttgccaaaaggatcggcggggtctgcgcggtgggtgttcccatctctgtttgccgaacaagacatcacgacgatgcggatgtcccattggactttcgctgaaggaggacggcaagacgtgtaagagtacggccgataaactggtgttggtggcgcgacgaaaggacattcgcttgcgtcatctgagggacaatcaagcggatcccaacgatgttgatatgattgtaccattggataatctgaaacatgccgttgccctggattggtgcagcgacacggacttcatctattggacagacgtggagcgcagcaccatcaataaggcgcatctcaatggaagctaccaacagcgagtggtgcactcgaatcttgtttcccccgtgggtctggccctggactggataaccgataagctctattggacagatccgtcgacgaatcgcattgaggtcgcaactacgaatggaaagatgcgaaccttgctcatatgggagaagctgtacaagccacgggatattgttgtaaacccgattgagggctttatgttttggtcggattggggtgatgatcctatgattgaacgtgccaatatggatggacatgaacgtgtaaccataacatcgaagaaattaatatatcccaatggcctggcgattgattatgagaagagcaagatctattttgtcgatggtggcacaaagacgttggagaacatgaatttcgatggcagcggtcgccaagtgattctaaatggacttggccatcccttcggcttggatgtcaacgagggccgagtgttttggacagattgggataccaagtcggtgatgagcgccaataagctgactggcaaggacaccaatgtcatcatcgccaacagtacagacctgatggacatccgggtgttccatcgcacccgcaggcgcatcttcaatgcgtgcgacaagctgaacggaggatgctcccatctgtgtctcttgaatcccaccagctacacttgcgcctgcactgtgggtgttcaactgaaggaggataggcacacatgctccgaaggaccaactcagtacatattgttcgctcataggatcgatataaggcaaatatcattggatttcgatcatctgatcgatgtggtgctaccactaccgccaatctcgaatgcggtggctctggatgttgatcgtaagacgggctacatctattggtcggacaccattgagaacgtgatcatgagctcgagtccagatggtctgcacgttcagaaaatcgtcggcgatagcctggagaatcccgatggtctggttgtcgattcgattggtcgtactatctactgggccgatgccggtcgccataccatcgaagttgcaagtcttgatggtagcaataggcatgtgattgcctacaaggatctggagtcgccacgtggcttggccttggattacgaggctggcttgttgttttggaccgactggggacactatcgcaagattgagagatcccatttggatggcaacgagaggtctcgcattgttaccgccaatctgggatggcccaatggtctgtcactcgatttgaagagcaaacgaatctactgggtcgatgcccgcctgaagaccatcgattcttgcgattatactggaaatcaacgcaagttgataatgtcatctttgcatcatccgtatgctctagctctatcggatgataatatctactggaccgactggaagtcgaaggcattgcacatgacggaaagacgtaacatcagtgcaaagcgggatataatcaccaacatcgatggcctgatggacattaagattatctatcagaatcagaatcaatcaacgatgaaaaatgcgtgtggtaacaacaacggcaactgttcgcatctctgtctacgtaatccatctggatattcatgtcaatgccccattggattgcgattgcgccagaatagcacaacccagtgtcaaaatctaccagaggattatcttcttattgccttgcgttcgggaattggtatgatttcgttaaactctggagatttcatggacgtcgttttgcccataaacggagtgcatggagcagtcgtactcgactatcattaccgcaagaatctactcttctttgccgatgttaatttggatgttattcgtagagttaacctattgaacttaaccgaaagcaaggtgattgtcggtacggatgtgcttacgcccaacggaatagccgtcgactggattgcggataatctgtattggtccgacactgatcgcaaactaatcgaggtatctcgactcgatggaagctgtcgcaagaggatcgtcgaggataacttgggtgacccacgatcgcttattgtgcatccaaagaaagcctacctgttctggtcggattggagctcgccggcgaaaatcgaacgtagctacttggatggctcaaatcgcacggtgatcataacatctggaatcggctttccaacgggccttaccatagatttcaccaatcgccgcttgctgtgggccgacgccctggaggacaatatcggtcaagttgatttcaatggtaaacgtcgtcagaccattgttccttatgcaccgcatccttttggtctgactttgtttgaaaatagtatattctggacggactggtacaacaagtcggtgtatcgatctcagaaactggcgcgcagtggatatggcaatccgtttgaggtgcgcgatgccctaagtggagcactcgatattcgcgctgtctcgctgagccgtcaaccaaaaagtgtgaatcactgtgcccaggataatggtggctgtacgcatctatgtcttaatcgcaatgtggactatgtgtgtgcctgtccggatgtgatggatcccaaggatgtggcatgctccattaagccaaaagttttggtgcacgccaacttggagaacgatcagttgctggaatattccgacgaatccaccgatgattccacaccgcctgagctgctcggcgagtccaatgatcatggtgatgatggtcatacgaagaagagcgatcaggagcgagaattctttgtcctcgtggcgctgggcgtggtcattgttatggtggtcatcataatacttgttattttcatgcttgctttcaacacgagcaagaagaaaaacaaacgcaattcccgcggctccagtagatctgtactaaccttctcaaatccaaactacaacgttgatggcacgccaatggaaccgaagacgaatatatggaaacgttttaaatacgataaaacccatcaggaacgagccggggtctatgaagagcgcagtctaaccacggagacggcatcctccagcctcttcgttccgactccatccccgatggcgtcgccctcaacaaaaacaatccaactgacaacgctctcgactatcacatag

SEQ ID NO: 18999 - protein, 2009 aa, DROSOPHILA
MYLTAFPFWPLVCFVWLCLGLGDLTKTAVKRNAPHYGIHPTNALGRWDWNKHKQLHSDARIGHLEAGNESREDQLSEELSKFGEKLFPVSNYPPYQQNNEDSQEVHHSGEGRLHTMESSVPSKTRISGGTNSNDTPKFRNIGAQRGRTEIAGIRETDRISSRGRDGFIGGPSNKQKPFRVNLAVLVQDDPSQPGETYSNCQNSNESDENCNPEEDAVPNLQRDCEKTGIHVMCPRTFRCISKYWLCDGDDDCGDYSDETHCGARTNCTDDQFECLNGFCIPRTWVCDGENDCKDFSDETHCNRTTCTDEHFTCNDGYCISLAFRCDGEHDCNDNSDELKCAAVINSCPEGEFKCRGGLGGAGGPSGQCILNRFRCDGDNDCGDWSDEENCPQKPSLCTSNEYKCADGTCIPKRWKCDKEQDCDGGEDENDCGSLGSEHPLTCGSDEFTCNNGRCILKTWLCDGYPDCAAGEDEVECHLQCDLGQFLCPTKQNLTNLKICVHQKHICDGHNECPAGEDEADCPKERKCSEPSPCEQLCIETTAGSNECACRLGYVMDKNKVNCTDIDECQYLTSPVCSQKCHNTMGSFKCSCETGYILRPDLRSCKALGGAMTLLVANRWDIRRVTLSNNRYSAIVKGLHNAIALDFHHRKGLMFWSDVSTDVIKMVYMNGTRVRDVIKWGLESPGGIAVDWIHDLLFWTDSGTRRVEVSNFQGNLRTVIASYDLDKPRAIVVHPGEALAFWSDWGPNPKIERAYMDGTQRKVIISKGVTWPNGLAIDFPNSKIYWADAKQHAIECSNLDGSDRNKILSTHLPHPFALTLFEDTMYWTDWNTKTVSAADKITGKEFRAVHENFHFPMDIHAYHPARQPEYADRCQKDRRGLRGGCSHLCLPNKTSRRCGCPIGLSLKEDGKTCKSTADKLVLVARRKDIRLRHLRDNQADPNDVDMIVPLDNLKHAVALDWCSDTDFIYWTDVERSTINKAHLNGSYQQRVVHSNLVSPVGLALDWITDKLYWTDPSTNRIEVATTNGKMRTLLIWEKLYKPRDIVVNPIEGFMFWSDWGDDPMIERANMDGHERVTITSKKLIYPNGLAIDYEKSKIYFVDGGTKTLENMNFDGSGRQVILNGLGHPFGLDVNEGRVFWTDWDTKSVMSANKLTGKDTNVIIANSTDLMDIRVFHRTRRRIFNACDKLNGGCSHLCLLNPTSYTCACTVGVQLKEDRHTCSEGPTQYILFAHRIDIRQISLDFDHLIDVVLPLPPISNAVALDVDRKTGYIYWSDTIENVIMSSSPDGLHVQKIVGDSLENPDGLVVDSIGRTIYWADAGRHTIEVASLDGSNRHVIAYKDLESPRGLALDYEAGLLFWTDWGHYRKIERSHLDGNERSRIVTANLGWPNGLSLDLKSKRIYWVDARLKTIDSCDYTGNQRKLIMSSLHHPYALALSDDNIYWTDWKSKALHMTERRNISAKRDIITNIDGLMDIKIIYQNQNQSTMKNACGNNNGNCSHLCLRNPSGYSCQCPIGLRLRQNSTTQCQNLPEDYLLIALRSGIGMISLNSGDFMDVVLPINGVHGAVVLDYHYRKNLLFFADVNLDVIRRVNLLNLTESKVIVGTDVLTPNGIAVDWIADNLYWSDTDRKLIEVSRLDGSCRKRIVEDNLGDPRSLIVHPKKAYLFWSDWSSPAKIERSYLDGSNRTVIITSGIGFPTGLTIDFTNRRLLWADALEDNIGQVDFNGKRRQTIVPYAPHPFGLTLFENSIFWTDWYNKSVYRSQKLARSGYGNPFEVRDALSGALDIRAVSLSRQPKSVNHCAQDNGGCTHLCLNRNVDYVCACPDVMDPKDVACSIKPKVLVHANLENDQLLEYSDESTDDSTPPELLGESNDHGDDGHTKKSDQEREFFVLVALGVVIVMVVIIILVIFMLAFNTSKKKNKRNSRGSSRSVLTFSNPNYNVDGTPMEPKTNIWKRFKYDKTHQERAGVYEERSLTTETASSSLFVPTPSPMASPSTKTIQLTTLSTIT

SEQ ID NO: 19000 - DNA, 17269 bp, DROSOPHILA
tgaattccaaattaaattcctaattaaatcagaccataagcacgcaatggaaaggctgaccggaaggaatgtggcactactggtgctgtgcctgtgcgccggatacgccctggtgttcgccgagggcgagaaggagataccggttaccaaattcggacagaacatagcgccgacgatgactttcctttactggtgcgttatatgcggggcaattaacataattgataacaatgacctctgtgtttctcaccattgattcgccaaatagctactcctgcggctatcgcaaggcgttcgaggactacgtgggcctgctgggcgagaagtatccgcaaattcaggtgaatggcggcaactacgatccgccgggtctaaactattacctctccaagatgatattcgccctgaagatcataatcattgtgtccgtggtcagtgcggtcagtccgttcaccttccttggcctgaacacgcccagttggtggagccacatgcaggctaacaagatatacgcctgcatgatgatcttcttcctgggcaacatgctcgaggcccagctcatctcgtccggcgctttcgagataacactaaacgatgtgcctgtgtggtcgaaactgcagacgggacgctttccctcgccggaggtactctttcaaatcatcgacaaccatctgcagttcaccgaaaaggtgcaggagaatccggactttgttaaataatagcattggactgactggacggacggaggagcgcggaaaacagcagttggacaacaccaaaacagccgcagacatcgatttccggctctgaacctaacttaaacataagctcttgtcccgacattatccacttagctgtatttctgttttcaccccaactatagcctactctacacatcctaaacgcatccaatccgaaccgaacaaaatcgcatttgatcggatttagatgggatataaagttcgctttaatttcaatcaaacgaaatttcttgtgcattcgttttatgtgttgtacattttatttatcaaaaaactgggctttctttttggttgtgttacgtttacaataatcccaacaggggcacaagatttactttcgttgcagtggaggcagtggttactcttctcgacccctcttccataattccataattatatttggtatgtggcatatgtgtcatatggttttagtttttggtgtccacgtaattagattacatctccacggaaaatggcactgttctgtggttaaagttttgtttgtttggtactcgagttggggtttggatcgttatctcgtttcctggataggatagcaaattacttaagacgtatatttaactgctacttagttcgaactgcaatctagggggcggtggtgtcctcgcgtgggcgtcggttgtactggcgggtattgccaccatggcgagcatactcatcgtaggcctgcaggttgctcgggtgaaccctttgctggtaccttccgttcagatagtttgatgggccgcgactgcgcgtgatccaagaggagcgcgtggacccggcgttagattcgggattggaaccaggactggagcccgtggaccagctagagtacgatcccggattggagaccgatcctgctacgggtccggaatgccagctggatccagcattggtcctcgattgccaggcggcgttggagccaggataagctccggcattggagccaggataagctccggcattggagccagaataagctccggcattggagccaggataagctccggcattggatccagatgaccaggatccggagctggaaccaggactggactgagagccaggactggaagaccggccggattgccagtttgccctgtaattgccatctgttttcaaactgcccgaaggattactcgaggcagaaccatctgtgaaaccggaagacgcatctgccctggactttgcagtgcgagccacaaagctgttgcctcgacgacggcaaaccgtgcacctgaaagatgataccgccattgtagatacatatgtatacagctaatgggtttgctcaagtaacccacctgcttatcttgctggtaaaatccgcctttagcgtctgctggcgcggctggacgaactgatcctgctcctcgatgacggttaaccagaaggaggccagcgcatcgtagtagttgcagcgtccatggccatggcactcgatcaccggctgggcgcggaactcctccaagcaagagcccggggagacgaggttctgcccaacgccaccgacgttgtccaaggtgctctgaaaggttgggtaacggtgggttaacctttaattccttatgctgagaatagtaacctaccatgaagtaactgtagccggtccacatctcctcccagccgcctggacagtccggaatggacatggattgcgagtggagggcgatgatcctggtcgtcgtttcgcacacaacgcaactgaggaacaagacatgtcaatagtctaagggatttctaggggaggaggaaattggcacttaccgcgaaatgtacttcatgaggtccctgccctggatgggcgtcatggtcattggcatgggttcggcggtggacagccagagactgtcatcgttgttctgggcaaagtggcagacgttggtgatgtcgcacagcatgtacggcatggttgtaaaccgcatcatacaggagccggactgaccgagatcctgacccaccgctctgctggcggccacgttgcccgacagtgagtagccctcccatagcagattcgtgttggccggacactgaggtacgtggacggactgcgagtggcgggcgaagatgaatccgcggctcttgggtgccggcggtgctggcgctggttcaccttgtggtccgggcagaccacgcaagccgggtgctccggtcaagcccatataacccttgtcaccacgttgtccctgcggtccatcggctccggtgtagcccacctcgccctggtcaccgcgatatccgacggcacctctctgtccttggaatccaataagtcctggtgctccaccatcgccttcctcgccctggaacccatcaagtccgggctcaccacgatctccgggtcgggccatggagtaggagtatgttacacctggttgacccttggggccaacgagtccgtccatgccatcgattccaccccagccggcgtcgccagtgggtccccgtggtcctggggcacccacccttccgttcttacccggaagtccgggatatccttgctcgcccttggcgccatcccagccaggttcgccctggaagccgatatctccgatgtcgccctgcctgccgacaatggcatatccagattcaccgcgctcaccctggcgacccatgtcgccaagctctccctttggtccgattagtccatgacgaccattgtgtcccggtgctccgggaaagccgacatctccctgaggtccaggtggcccctggatttggggtccacggtgtccgatcgcaccgttgggtccattctctcccggtggtccgggtgctcccttctggccaaagtgtcccggacgtcctgctcgtccatcgagtccagcaacgccttcgtcacccttctcggcgggcaatgttatgcccggaggacctcgtggtccttggtcaccctggaagcccttaaggccttcagctccatcgaatccaagttgtccagcatagccaatgtcaccgcgttcgcccttggcgccgggaggtccaataaatccaattggtcccatatcaccctgctcgccacgttcaccctgtagaccttgatctccggtgaagccgcgatagaagctccgatcccgcaggttctccaagcgacccggaataccgacttcaccttcgtcaccctgctcaccctgctctccctgctcaccaatcaatccgcgtggtccttgatcaccaatctgaccatttcgaccatccaagcccacaactccgctctcgccctgaggacctttgggtccctggggtccaggaaaaccagtggcgcccttcaggccattaattccattgcgtccaggatagccgcccaatcccttggctcctggctctcctggtctaccctgttggccggggagaccgcgatctcctcgctgtcccttcagtccatggcgaccgggaagtccattgggtcccggactgcctacttctcccttgcgtccagcaactccatcgagagctggttgcgaatctccaacgggtccacgctgtcccttcgctccgggagctccggggtatccgatgggtccggtcaagccggattctccgtcatcaccctttatgccactgtaggcggccacgcccttcgcgcctggacgtcctgggaatccaggatttcctgtctcacccttgcgtccgggaaggccgttagctccgggatagccatccggtccatcatcaccagagagacctaaaggatagcaaggtatacggtattatagatcatgattagacaaagtggtagcttcttttttatatgttagatttttagtccaaatatccgctcacctttaggtccgaactcgccgttgggaccacgaggaccgatgtcaccctgccgtccattgtatccaatctcaccacgctctccgatctcgccaatcattcctggaagaccgggtatgccaggactaccaggcaatccctgcagacccgcattgccgaggagtccacgacggccagagaaaccgatgctgcccttggcgccgttctgtccattctggcccagcgagccaacctctcccttctgccccttggcgccgtgcggtgcctggcgaccattgcgtccgggctgaccctttggtccgggcggaccaaccaggaagtcaccgcgctggcccttgttgccaggcagtcctgtttgtccaactgcgccatcgggtccttgctcgcccttcacacccttcggtcctgggcgtccggcgagtccgtattggccgggtgcgccgacatcaccggggaagcccttaatgcctgatcgacccggtggcccaatctcgccctgaatcacctcctgaccaggtacaccgcgttgtcccttgtatccaatgcctccatccaaaccaggttcaccatcgcgaccaggcagtccgggagctccctgctgtccgtaatcgccagttgggccgggataacccttggcacccacgggtccgggaataacttcgccagccgggccacggtcaccaatttcgccacgaagtccaatagctccttgctcgcccttggctcccttaacgcccttcggtccggtataaccatcctcgccaggctcaccagtgttgtcgtagatctgaccgggattcggctcacccttgacgcccttgaaaccggtatcaccatcatcgccgcgctcgccctttattccgtcatatcccggctcgccgatcaagtagaccttgggagtggtggcgtttctaccgggagctccatcacgaccatcgcgtcctggttcaccatcgcgtccttggtaaccggcatcgccgtagtcaccgcgttgtccggtttctccgcgctcacctttgctaccatcggatccatcccgacccttttcaccgtcgtcacccgtatctccgcgatgtccactgtcgccggtgtcaccgatttcgcctttccttaaggagcccacttcgatcgcctttccatcgggtccggctgctccaactttgcctggctcgccgggaatacccgctggaccgggcagacctttgtgaccagcccgtccggggttaccttgcaagccctgtacgccacgcggtccagtgaggccgatagctccacggtttccatggctacccgggtagccggtgtcgccctcctggccacggggtccacggggtccggcattgcacacggggcagtcgtcaccgcgcaatcccttctcaccgggcagtccacgtagtccgttataaccatcgtcaccgggaagtccacggaaaccgggcggtccctgggaaccaggaggaccaacgatgttgtagccctcgccgggcagacccttgtcaccgggcaaaccgacctctccgcgatcaccgcggtagccctccaaaccaggttgtccatttaggccaggctcgcccttcggtccgaccacattttgtccaggttctccgtgcagtccgtatcggccgggtagaccagcttcgccagggggaccctgcggtcccggtggtccaatgaatccatagtctccggcctcaccgcgctcactacgaccaggcggtccgcgactgccgtttaagccgggatctcctgactgaccagctagaccgatgggtccgcggcgtccaggtttgccgggcagacctggtggaccttgttctccgggcggtccgatgtctccctgcgatccaatcgggccgggcagcgatttcgtgaggctaggatcgtaaattcctgggggaccagcgccgccttgaacaccgggcatgccggtgaatccatcctctccacgctctcctgggcttccgtccaatccatcagctccagtccagccgggcgcacccttcatgcccttgtctccgaatcgaccgggttcaccatccttaccgggcttgccgcgctctccgggtccaccgatctcacctcttgcaccgggcaatccattacgtccaacggcgccttgttcgccggtcggtccctgtggcccctcatcaccctggagtcccacatatcccttgtaacccttcaaggtgtcgtctggcttcagcactccggataggctgtcacctggctcacccttggcgccaggtggtccaatcagtgagtatggcagctccgaaacggcgccagtgtcacccttgggtccaggcagtcctggatctcccttctcgccagttaggccagcatatccagtgtcacccttgctaccgcgatcgccatcgaatccgggcggtcccacaccgccaggctgtccagtctcgccccgattgcccttggtgcccttggagttgatgccgccctcgccagcctctccaggtggaccctgctgaccgggctttcccggcggaccgcgaactccgttctggccaggtgctccgctgggaccctgcataccaggccgtccgtcgcagccatcgattccacgtggtccaggtgttccgggctcaccgcttttaccctatgatggccaggaagtaatggagattattacaatttgccttgtgaactagtctcatttcatttcataggatatcctggatatcatctggatcatgtgagtatcaaattgtttgagtctttgaaatatgtacaataactatctataagatacaattattactcaccataattccagggtaacccatttcacctttaggtccgatatcgccctgtaaacatattacccatgcataagtcatcatttaaggatactttgatatcgatttcttacgcgatgtcctttctcgccttgttcgccatactcgccgacatctcccttctcgccgagtggtcctgctcgtccaggtggtcctatatcaccggcaggtccttccaagccgggaactccgatgggtcctggggcgcccatgcgtcccttgattcctttgcagtcgcatagcgttgtgttgcagatctgaaatcaagcgtatatatatatatgtacatatgtataaactatatagcacacggtagcccaaggaatatggaaccaggcttgattgcctctgattgaaacactcgtttgggcaatcgaatatgtcacaatcaaatcgttttctattgcttgtgccatttgctcatggtgccaactaggaactagcatccagctagtatatatgtatacatcaaaattcatttaaattcttttagcttgcttgcagcttaaacataagtgttgtaaagcactcatatattagttttaagctaacggataccctttagtagttctgtgaagttgattatttttgaattccgcaacaaacttgctggaatcctacggaaatgaccttctgctggatggataaatggattcgtgctaattcctttgcaaaagtcaaacgaaatctcgggccgccttagccagaaaatcaacaataataagtagagctgcaacatttttcagctgcagttcgcagctttaattgcacggtttccgtttgcaatgagataatcttctatatgagtacgtttacttttgcccagtcaattgagcgagtgcatagaacacgctcactggacctcggaatgaagttgaggcgattccgaagtgaaaatgtggcagatgcggttggggaaatggctggaggaaaatgctgggcaatgctatccacaggcagcgcatttctaacccattttaatgtgcatttatttataaacaatgtgtgcaattcggtaaaaagcgattatctggaatatctcccattatgaaatcactttgaaatcccatttttgaggtaggttgcaaaagtgggcgatgaacatgcgcctacataggagattcctatcgtatttatagaattgacataatttcatgctggttaaaagtccgaatttatggccgccttcattaatttgaaatttcagtggtcgttcaagtttttcaccgacagttcctcaaaaaaaaaaaacaaaaaaaaaaaccatttaaaaatggagaaaaaaaaactgcacacatgttgcacgcatgtttcgaggttctctgcgtaatattttaaacatatttgcatacgaaatttgttgtttaattgtcggctgcctggatgaattagtgtcaaatgtttggcaaattcttttctgttctggatttacaaacacctccgctgatttgagacaagcgacatcagcggagttcaaagccccggaagatgctactccattcgattcccagaagtgaatctgctcgatagagatcaaaccatctgttaaccaaatattcacatcaccaaatcccgaaacgagaacgccaaaggtaaacaacactgagcactgaataaaaaattaaaaaaaaaaaataaaaagactttgccactgcggtgaaccaaaagatgttgttctcgccgggcgaacaaatgaaaaatccgagaaaatgcagataccaaaataaaatccaattccaacctccccccccaacgaaaaattctggtgctgcaggtgcacaaacgcaattgcactcgattgctggaaatgccaagtcaaatgtgagaaacatcacaatatgtgggtgtaccaagtcttatgataatacgaatttatttcgatcagttcttgtctttttcattcaagtcttttgtttcacagcacacattccttcaatcgaaatggctgccaggtaaaccgaaagtatccaaggagacaccatcgaatttcattcaatcaattgccaaatctgaaacccaaggaattctgctcggataacaaacgaaatggtcatattatatatattatatatctgtgaagatatccatattcgcatgcaaatgtatgtcaaactgtggaaattgttgcggtaagacgttcaaaagtgacagcactgcaatttccttgaacttgacactgggccacatatgccacatatagcaaactatatatgtatgtatgtatgcatgtatatgctacatgtacattgtgtctgccatatatgggccacttttttcgtatttaatttgattttttttttttaatggcagacggaaaacgcactgccaagtggcgtcgtcgttggcggcagggggatgagaaaccacttggaatcgagggaattggcctgttgcactgtgcgctcctctttcacatacatacatatatatatatgtatatacccgtacgataccctcgattctgccgatgtcagcagtggagaggcagtgactgggaatattcgccaaactaattaccaacattcctcaatgggcacgcgtgtctgcgcgaattggctaaccaggtgttgggtatcctgcttttaaggcgatagtgcgctagagaggattgaggacagagtgtatagcatttcgtagcttaaacccttggctaattcaatctgttacgccactgtgtctgaccagatcggtggactatatatcggactatatacatacatgtatgtcgacttacagataaaattctgtgcgagtggcgcgcacttaagcgcatttacacatgttaatgccaattgcgccagttgcccgtccagccaagcattcaagcatccaagccatggtttaaggtcagagcgaggcctccacgcggatatatcttgatatctggcatatatctgaggcgacaattgggcacacccacccacgctaatcgcttgccgggcggaaagctgcacaagtgacgagcgctccggctccggctgcatcgaaatgcatctgcatctgcatctgagcagccaagtttattggcccgagacgttctgtatatacacatatatatctgcatatatctgcagtctatggtcctgggtatctgatgacaatcctcgggtgctaacttttcgcctttccgccgaactgtaaacgatactaccttaaactctggccaccaattcgacggattgcaattattcagggaatgcaaagcgcagcgaaatgacttggaaagggatggatacacttggaggaaagagaaggagtcacttggaggaaagagaaggagtcacttggaggaaagagatggagggctaaggaaagagagagggagaggcgtctggtaatctgggtctcaaagttggtggcctgctacgcccggatgtggcatacaaaaaaaaaaaaaaacaaaaaacaagcataattattataattatcagaatgtcacatataaatcacagctgataagactctggacacagcttcaagccgggagggagagcggaattaattaatacatttaaatttagcattaaattgtatttcatgcacatgtgtattgtttctcgagtttcgtgtttcaggctgcggacaaaggggttatctgttgcaaacggcaagacatcaatgtgtgttctttgttgccaaggaggatacctaagactttactttgctggatatagaatgcttagcaattgctatcttatagatacacttctcaagctcgagatcaagattcagctgcatccaaagacgaggatccttttgtgcgtcacagttgacccaattttctctgtcagacaacacgcgccatcaatcaaccgcattttcattttcacatttatatgccccatgaaatggagtgggaactttttgcaccatcaacaatagcaacaacaaatctgttgttaaatgtgcatcataaacgtttggaacactgcacacatgcaacaatgaaaggcattcaaatgaaggtattagacgcgcaagtactaagtaaaatgtaaaatataagttattcttttattgggtaaacatacataagtacatgctatagtcacaaaactgacttcaaatagttggctgacatcctacaaatgcattttattgaccactcaacctagttgcacattacaaaagtgccagattcatgccagattcagttggcataaaaacgcccgattttggggcacagctacagggtagcagtaaaaaaaaaaaaaaacgaatatgggccaacatatgagcagcgtgtgattgacatgaaaaggcaacccccgcacttactcacaccaacattcatgtggagcatagcatagtaatggatgcacatctggacgggcgcacttgctgcatgacatcattttgctccggcttgacattaagtcaacatgtggagaagatgcaaaagaatctgcactgccactggcacatggagaacacccacgcactccgtaaccgtgcgtctggagcaaaacccagttggatctgcttgagtgaccggttacggcatcgtggcgcataattgtttggacacaagcctgacagatgataactaattgccgtgcactcaaattaacattgaaattgatggacagcgggctgtcacaacttaatattcgcaacgatcgtcaataaggtggcgataaggaagcgccaagtgattgaatcgcctatcaaagtatgtacatacattcgtcagattgggaaactatattgttaccttttgaaaatgcacttaaaatcataagtcacatcatgccagcaaccattatcgttcgaattttgcatcaaaggagctgccagttagatttcacccagttataaatcgcttgaaatcatgaagccattggttaaccatctcaatggcctgcaaataattcagacaatcaaagcactagaaagttaaccaagcaaattaagcagaatttatttttagccatgacagtagatgtctgccgtctgaaatggaatctcagcaatggaatcgcatcatacattgtacacatatgcatatgtacatgccatatagtgtctaaatatatgtatatatgtatagaatttcaaatgctcagatgaatatcaatttcatgagcccgtacggactgataaggcggcaaaaaaaaaaggagaagagcgagctgcagttatgagacagatgactgataacccaatttcactagcttcgctcataaataatcgtttcaattcacgaaattcattacaaaggcggctactaagtggcccctgcccatatcactcatacgacatgttgtccatatcgcacacacacacacacacacacatacacgtacatatagagagcgagactccgcataatttccgcattcagttgcagataaataaataattgagtcaaattgaaatgcaactcgccaaacaattcagctcaagcacgcaaataaacttccacaaggagtccaacaatgagatgatgatcattgttgtccgagctccgagctgctgcccccgctcttcgttttcttgggcggtcttcagttggatcgaaatcccctccaccagctggacacccatcaccagttggccccgctcagtctggccggcggtggtcagtgatttatgccagcagcatcgggtcactttggaccaggatcgggaataaacaaaacccaaggagaacgaaactgaagactgaaagggaaggtgcacggaaagaaatggttgagtggcaataatcaaacccgctagatcataattttataatttgatagaaattactcctcttcttaaataaccaattcaatataatacaatatttttacaagctttttataagaaaatttcggaattcatggtaaatttcgaaggttttagattatgtatttatttgatattgttttgtatgtagttaagatttttctaagtgcaccatcgaagtttctaagactttggacggcagcagcagccgccgcagaagcaacaaaacaacaaacagccaagaactttcaattccaatttgaaatggtgcagaacgtcaaaagattgccgaccccctcaccccctgaagtcgccataccccggcaacccttcttcatttcaattccagtgattctccaagagagcccctcaccgatcacttgagctgctgctaattgtcggaatcgaactgcgcacacacacacaagcgcactggcgaaagagcacacttattcacaggcaataacggcatttccatatatgtatttatagctgggcaagtgcaggagaaaagagaaagggtgcatggggtagtggtgcagtggtaaagtggggagagcgactgataaagaccatttatcaaaattcattcattgaaagcctcagctgcatctgcaatcgatgagttcatctctctctgtctcttctgctcttcgattgaagcggctcttaagcgatcggctctcttttcgcggaacggaaaaggaaatcatttgttcggctaatgaagcgccaaactggttgcaaaacccattgcgagaacagttttagagccattgcctgagagctgttaactgtttaataagtatattcaaatgatgctggaataaatacccttaaaaacattaagtatgaatatatcttactcatagcagataattccctttataaatttctttatagattgtaaataatggcatacatacaatgtgtgtttctaatcaaaactaattccagcgaaaaatgtgaatccccttctattcagattagcttaatgcacccaggatataattaattatatcgttttcaaatactgttgcaagtgaaacaactttttttgtaagccttcgcttatcgtgagggtaacacgagcaacggtagctaagcgaagtcaagtttttcatcgttttgcggttagtcctccattggcaacccacaagacctggagacctggcagctctcactcggaatccgggagttagggtcccaagcccatggcattgaccacgtaaccgagtgcgaaaagagctgtggatcggattaccaaagtcgtcagacgagctgcacacttatgatggcaaacacgtgagcgatggggccagatttccagatcccaacgaattgagtgcacgaattgtgcattgagttaactgctcaactggtatgaaaactaaactctgatctctggtaaaggcaataaagtcaagccaagccgatagcctctgcgactgctggcgacacttgtttcaattctaaagtgtatttattctaaattcgagtctagaaagccatgtcgcaatcagcggaacatgctatcaatggcgtcaatgccgccaacatagcaataggtctaattaaatgtgtgtagatcagtcgcagcctgataagaccagccgaatgccatcaaaaagtaggtgccgccggcatgtgctccatttttcatccagcattacgaaatctctgtgatccctagccatttaaatattaatactcaatttaatttggtacatacacaaggtacactgaattgggcaactcggtgttaaaaagtagtgcatagtttttggggcaacattgagtattgcgtttgcctcgcacttttgtgtcaaatcatttttgtgtttgcttaaaaaatcattcataaataaatgaaatattcgcaacctcaatggttaatgtgtcttattttgaataataatctattcaattggggtaataactaagaacctgcgcattctttgtttttcatactcattcccgtttcattttacaaatgattatatgccaattaagcgactaatctggcggttattaaatataattctaattgccagccggaaacgttcaatggcgaaccacaattggtatgccaaaaaagcaatgtcctccaaattgaaagattaggggggttatcaatgggcgttatcgccaacctcttcacctacaaaattatgttgccaaaattatttaatgacataatcgatcccaagctggacttggacttcattgaacccccggaatcgggaacgagctgaaaggaattatctgtcgaagccaaagagttgcaactacgcgatgttttcatgccggaagtgtgaataaatcagagagtgcagtgctgcagaataacaataacaatagcagcggtgattaagagtcgagctccgagctgacccaattttacatagttgtttatggttgatactatgtaaatgcgaaatcaatgactacggatacagtttggagagcattggtggacatgataattttctttcaaagttaattaagaatattattgttataagcttcaagtaacttaaaaatgctgcgttaatgaaataggcatatacagtttgacaagcactttggttagtatttagcaatctcataaaattcaaacggttatggtctgagaagcactttaaatagtaagagccttattttaaatatcatttcctaagttgttttaagacataaaaaaaagttgaaaaaagttattgcactacaatctatacatttctcaatccaagtctttaaagagctgtcaatttttggatattatactaagcatttcgattgcacttacctttccatccgccaaggtaacggaaaccaggctgcccaacagataaacgacgcccagaagacccgagagatgccttagatctctgggtaacatcctcgctgggtcctttggtcctatccgcaacgtatttatgtcgcactctatctaattgcctctgtctctccccgcttaaaacacacacgaaactgccaacgaaataagcataaaattagaaattgaagaattttcgattcttataaaatgccctcaaataaaaccgacattagcaaatcaagtattaaagagttgacgatcggaaaagtgtgggaaactaacagaaaacgctgatttgctgctgctgcgatcgtcgggcacagcactctccccacatgtggagatcgtctagcgttcgaagtattactaaacacgagtcccgctaaagaaattcgaattcttcgcccgcacactcggcacgctcggctccactcgtaaaagttcggccgttcgcgatcggctctcggcccaccaatactatcgcaagtggaagttgcagcagtgtgagtgtagtaggcacaggccagggacaggcccggatggatgttttggatggagatttggatggaggtttggatgtagatgtgactccgggctctggttatggttcggaatttagcactttgacgccttgaaacgaggaaatgaggagcagagccctctaaccaaatcaaagcggcccgattctaagcatacaaattctatttcccattttggtaccgtatccctgaaggggtatgatcaatcagattctcactttgttctttttattaggcacgtctcttgggaaaatacaaattattaaataatttattaattaatgttactattactaactattactaacaggcacataccatttatacataataaccatccgcatataacttaaatgatagttccaactagcgacacacgatatttcttgcggggtaaaagctattctaatactcaatcccagctatcctagtgatttcaatacaattagatgctagtttgtttgtcgcgcttctcgtgattaggttaaggctttttcatttagtacttacatatatggcatatgtgaggctgataagacggatatggctgagtatttcctgttagaacgaactactgatcaactgaaaaccgaacatgagttttaagctccaataagtccgacgcagaaaagccaaatgggaacctttcgaaattcgagcctgattttgggtttcggggccacagtgttttgaaataagtcttgatagggcggctataatcaaggcctcgttctagttgggaaagctcttttgttctagggtacgtgcaagtcggatatggcccagtggcctgaatatatgtct

SEQ ID NO: 19001 - DNA, 6343 bp, DROSOPHILA
ctccacatgtggggagagtgctgtgcccgacgatcgcagcagcagcaaatcagcgttttcttttcgtgtgtgttttaagcggggagagacagaggcaattagatagagtgcgacataaatacgttgcggataggaccaaaggacccagcgaggatgttacccagagatctaaggcatctctcgggtcttctgggcgtcgtttatctgttgggcagcctggtttccgttaccttggcggatggaaagatctgcaacacaacgctatgcgactgcaaaggaatcaagggacgcatgggcgccccaggacccatcggagttcccggcttggaaggacctgccggtgatataggaccacctggacgagcaggaccactcggcgagaagggagatgtcggcgagtatggcgaacaaggcgagaaaggacatcgcggcgatatcggacctaaaggtgaaatgggttaccctggaattatgggtaaaagcggtgagcccggaacacctggaccacgtggaatcgatggctgcgacggacggcctggtatgcagggtcccagcggagcacctggccagaacggagttcgcggtccgccgggaaagcccggtcagcagggtccacctggagaggctggcgagggcggcatcaactccaagggcaccaagggcaatcggggcgagactggacagcctggcggtgtgggaccgcccggattcgatggcgatcgcggtagcaagggtgacactggatatgctggcctaactggcgagaagggagatccaggactgcctggacccaagggtgacactggcgccgtttcggagctgccatactcactgattggaccacctggcgccaagggtgagccaggtgacagcctatccggagtgctgaagccagacgacaccttgaagggttacaagggatatgtgggactccagggtgatgaggggccacagggaccgaccggcgaacaaggcgccgttggacgtaatggattgcccggtgcaagaggtgagatcggtggacccggagagcgcggcaagcccggtaaggatggtgaacccggtcgattcggagacaagggcatgaagggtgcgcccggctggactggagctgatggattggacggaagcccaggagagcgtggagaggatggattcaccggcatgcccggtgttcaaggcggcgctggtcccccaggaatttacgatcctagcctcacgaaatcgctgcccggcccgattggatcgcagggagacatcggaccgcccggagaacaaggtccaccaggtctgcccggcaaacctggacgccgcggacccatcggtctagctggtcagtcaggagatcccggcttaaacggcagtcgcggaccgcctggtcgtagtgagcgcggtgaggccggagactatggattcattggaccaccgggaccgcagggtccccctggcgaagctggtctacccggccgatacggactgcacggagaacctggacaaaatgtggtcggaccgaagggcgagcctggcctaaatggacaacctggtttggagggctaccgcggtgatcgcggagaggtcggtttgcccggtgacaagggtctgcccggcgagggctacaacatcgttggtcctcctggttcccagggaccgcccggtttccgtggacttcccggtgacgatggttataacggactacgtggactgcccggtgagaagggattgcgcggtgacgactgccccgtgtgcaatgccggaccccgtggaccccgtggccaggagggcgacaccggctacccgggtagccatggaaaccgtggagctatcggcctcactggaccgcgtggcgtacagggcttgcaaggtaaccccggacgggctggtcacaaaggtctgcccggtccagcgggtattcccggcgagccaggcaaagttggagcagccggacccgatggaaaggcgatcgaagtgggctccttaaggaaaggcgaaatcggtgacaccggcgacagtggacatcgcggagatacgggtgacgacggtgaaaagggtcgggatggatccgatggtagcaaaggtgagcgcggagaaaccggacaacgcggtgactacggcgatgccggttaccaaggacgcgatggtgaaccaggacgcgatggtcgtgatggagctcccggtagaaacgccaccactcccaaggtctacttgatcggcgagccgggatatgacggaataaagggcgagcgcggcgatgatggtgataccggtttcaagggcgtcaagggtgagccgaatcccggtcagatctacgacaacactggtgagcctggcgaggatggttataccggaccgaagggcgttaagggagccaagggcgagcaaggagctattggacttcgtggcgaaattggtgaccgtggcccggctggcgaagttattcccggacccgtgggtgccaagggttatcccggcccaactggcgattacggacagcagggagctcccggactgcctggtcgcgatggtgaacctggtttggatggaggcattggatacaagggacaacgcggtgtacctggtcaggaggtgattcagggcgagattgggccaccgggtcgatcaggcattaagggcttccccggtgatgtcggcgcacccggccaatacggactcgccggacgcccaggaccgaagggtgtgaagggcgagcaaggacccgatggcgcagttggacaaacaggactgcctggcaacaagggccagcgcggtgacttcctggttggtccgcccggaccaaagggtcagcccggacgcaatggtcgccaggcaccgcacggcgccaaggggcagaagggagaggttggctcgctgggccagaatggacagaacggcgccaagggcagcatcggtttctctggccgtcgtggactcctcggcaatgcgggtctgcagggattgcctggtagtcctggcatacccggtcttccaggaatgattggcgagatcggagagcgtggtgagattggatacaatggacggcagggtgacatcggtcctcgtggtcccaacggcgagttcggacctaaaggtctctctggtgatgatggaccggatggctatcccggagctaacggccttcccggacgcaagggtgagacaggaaatcctggattcccaggacgtccaggcgcgaagggcgtggccgcctacagtggcataaagggtgatgacggagaatccggcttgaccggacccatcggataccccggagctcccggagcgaagggacagcgtggacccgttggagattcgcaaccagctctcgatggagttgctggacgcaagggagaagtaggcagtccgggacccaatggacttcccggtcgccatggactgaagggacagcgaggagatcgcggtctccccggccaacagggtagaccaggagagccaggagccaagggattgggcggctatcctggacgcaatggaattaatggcctgaagggcgccactggttttcctggaccccagggacccaaaggtcctcagggcgagagcggagttgtgggcttggatggtcgaaatggtcagattggtgatcaaggaccacgcggattgattggtgagcagggagagcagggtgagcagggtgacgaaggtgaagtcggtattccgggtcgcttggagaacctgcgggatcggagcttctatcgcggcttcaccggagatcaaggtctacagggtgaacgtggcgagcagggtgatatgggaccaattggatttattggacctcccggcgccaagggcgaacgcggtgacattggctatgctggacaacttggattcgatggagctgaaggccttaagggcttccagggtgaccaaggaccacgaggtcctccgggcataacattgcccgccgagaagggtgacgaaggcgttgctggactcgatggacgagcaggacgtccgggacactttggccagaagggagcacccggaccaccgggagagaatggacccaacggtgcgatcggacaccgtggaccccaaatccaggggccacctggacctcagggagatgtcggctttcccggagcaccgggacacaatggtcgtcatggactaatcggaccaaagggagagcttggcgacatgggtcgccagggtgagcgcggtgaatctggatatgccattgtcggcaggcagggcgacatcggagatatcggcttccagggcgaacctggctgggatggcgccaagggcgagcaaggatatcccggacttccgggtaagaacggaagggtgggtgccccaggaccacggggacccactggcgacgccggctggggtggaatcgatggcatggacggactcgttggccccaagggtcaaccaggtgtaacatactcctactccatggcccgacccggagatcgtggtgagcccggacttgatgggttccagggcgaggaaggcgatggtggagcaccaggacttattggattccaaggacagagaggtgccgtcggatatcgcggtgaccagggcgaggtgggctacaccggagccgatggaccgcagggacaacgtggtgacaagggttatatgggcttgaccggagcacccggcttgcgtggtctgcccggaccacaaggtgaaccagcgccagcaccgccggcacccaagagccgcggattcatcttcgcccgccactcgcagtccgtccacgtacctcagtgtccggccaacacgaatctgctatgggagggctactcactgtcgggcaacgtggccgccagcagagcggtgggtcaggatctcggtcagtccggctcctgtatgatgcggtttacaaccatgccgtacatgctgtgcgacatcaccaacgtctgccactttgcccagaacaacgatgacagtctctggctgtccaccgccgaacccatgccaatgaccatgacgcccatccagggcagggacctcatgaagtacatttcgcgttgcgttgtgtgcgaaacgacgaccaggatcatcgccctccactcgcaatccatgtccattccggactgtccaggcggctgggaggagatgtggaccggctacagttacttcatgagcaccttggacaacgtcggtggcgttgggcagaacctcgtctccccgggctcttgcttggaggagttccgcgcccagccggtgatcgagtgccatggccatggacgctgcaactactacgatgcgctggcctccttctggttaaccgtcatcgaggagcaggatcagttcgtccagccgcgccagcagacgctaaaggcggattttaccagcaagataagcaggtgcacggtttgccgtcgtcgaggcaacagctttgtggctcgcactgcaaagtccagggcagatgcgtcttccggtttcacagatggttctgcctcgagtaatccttcgggcagtttgaaaacagatggcaattacagggcaaactggcaatccggccggtcttccagtcctggctctcagtccagtcctggttccagctccggatcctggtcatctggatccaatgccggagcttatcctggctccaatgccggagcttattctggctccaatgccggagcttatcctggctccaatgccggagcttatcctggctccaacgccgcctggcaatcgaggaccaatgctggatccagctggcattccggacccgtagcaggatcggtctccaatccgggatcgtactctagctggtccacgggctccagtcctggttccaatcccgaatctaacgccgggtccacgcgctcctcttggatcacgcgcagtcgcggcccatcaaactatctgaacggaaggtaccagcaaagggttcacccgagcaacctgcaggcctacgatgagtatgctcgccatggtggcaatacccgccagtacaaccgacgcccacgcgaggacaccaccgccccctagattgcagttcgaactaagtagcagttaaatatacgtcttaagtaatttgctatcctatccaggaaacgagataacgatccaaaccccaactcgagtaccaaacaaacaaaactttaaccacagaacagtgccattttccgtggagatgtaatctaattacgtggacaccaaaaactaaaaccatatgacacatatgccacataccaaatataattatggaattatggaagaggggtcgagaagagtaaccactgcctccactgcaacgaaagtaaatcttgtgcccctgttgggattattgtaaacgtaacacaaccaaaaagaaagcccagttttttgataaataaaatgtacaacacataaaacg

SEQ ID NO: 19002 - protein, 1940 aa, DROSOPHILA
MLPRDLRHLSGLLGVVYLLGSLVSVTLADGKICNTTLCDCKGIKGRMGAPGPIGVPGLEGPAGDIGPPGRAGPLGEKGDVGEYGEQGEKGHRGDIGPKGEMGYPGIMGKSGEPGTPGPRGIDGCDGRPGMQGPSGAPGQNGVRGPPGKPGQQGPPGEAGEGGINSKGTKGNRGETGQPGGVGPPGFDGDRGSKGDTGYAGLTGEKGDPGLPGPKGDTGAVSELPYSLIGPPGAKGEPGDSLSGVLKPDDTLKGYKGYVGLQGDEGPQGPTGEQGAVGRNGLPGARGEIGGPGERGKPGKDGEPGRFGDKGMKGAPGWTGADGLDGSPGERGEDGFTGMPGVQGGAGPPGIYDPSLTKSLPGPIGSQGDIGPPGEQGPPGLPGKPGRRGPIGLAGQSGDPGLNGSRGPPGRSERGEAGDYGFIGPPGPQGPPGEAGLPGRYGLHGEPGQNVVGPKGEPGLNGQPGLEGYRGDRGEVGLPGDKGLPGEGYNIVGPPGSQGPPGFRGLPGDDGYNGLRGLPGEKGLRGDDCPVCNAGPRGPRGQEGDTGYPGSHGNRGAIGLTGPRGVQGLQGNPGRAGHKGLPGPAGIPGEPGKVGAAGPDGKAIEVGSLRKGEIGDTGDSGHRGDTGDDGEKGRDGSDGSKGERGETGQRGDYGDAGYQGRDGEPGRDGRDGAPGRNATTPKVYLIGEPGYDGIKGERGDDGDTGFKGVKGEPNPGQIYDNTGEPGEDGYTGPKGVKGAKGEQGAIGLRGEIGDRGPAGEVIPGPVGAKGYPGPTGDYGQQGAPGLPGRDGEPGLDGGIGYKGQRGVPGQEVIQGEIGPPGRSGIKGFPGDVGAPGQYGLAGRPGPKGVKGEQGPDGAVGQTGLPGNKGQRGDFLVGPPGPKGQPGRNGRQAPHGAKGQKGEVGSLGQNGQNGAKGSIGFSGRRGLLGNAGLQGLPGSPGIPGLPGMIGEIGERGEIGYNGRQGDIGPRGPNGEFGPKGLSGDDGPDGYPGANGLPGRKGETGNPGFPGRPGAKGVAAYSGIKGDDGESGLTGPIGYPGAPGAKGQRGPVGDSQPALDGVAGRKGEVGSPGPNGLPGRHGLKGQRGDRGLPGQQGRPGEPGAKGLGGYPGRNGINGLKGATGFPGPQGPKGPQGESGVVGLDGRNGQIGDQGPRGLIGEQGEQGEQGDEGEVGIPGRLENLRDRSFYRGFTGDQGLQGERGEQGDMGPIGFIGPPGAKGERGDIGYAGQLGFDGAEGLKGFQGDQGPRGPPGITLPAEKGDEGVAGLDGRAGRPGHFGQKGAPGPPGENGPNGAIGHRGPQIQGPPGPQGDVGFPGAPGHNGRHGLIGPKGELGDMGRQGERGESGYAIVGRQGDIGDIGFQGEPGWDGAKGEQGYPGLPGKNGRVGAPGPRGPTGDAGWGGIDGMDGLVGPKGQPGVTYSYSMARPGDRGEPGLDGFQGEEGDGGAPGLIGFQGQRGAVGYRGDQGEVGYTGADGPQGQRGDKGYMGLTGAPGLRGLPGPQGEPAPAPPAPKSRGFIFARHSQSVHVPQCPANTNLLWEGYSLSGNVAASRAVGQDLGQSGSCMMRFTTMPYMLCDITNVCHFAQNNDDSLWLSTAEPMPMTMTPIQGRDLMKYISRCVVCETTTRIIALHSQSMSIPDCPGGWEEMWTGYSYFMSTLDNVGGVGQNLVSPGSCLEEFRAQPVIECHGHGRCNYYDALASFWLTVIEEQDQFVQPRQQTLKADFTSKISRCTVCRRRGNSFVARTAKSRADASSGFTDGSASSNPSGSLKTDGNYRANWQSGRSSSPGSQSSPGSSSGSWSSGSNAGAYPGSNAGAYSGSNAGAYPGSNAGAYPGSNAAWQSRTNAGSSWHSGPVAGSVSNPGSYSSWSTGSSPGSNPESNAGSTRSSWITRSRGPSNYLNGRYQQRVHPSNLQAYDEYARHGGNTRQYNRRPREDTTAP

SEQ ID NO: 19003 - DNA, 2886 bp, DROSOPHILA
ctttttctgcattgcaaaggtgctaaaatatgttcgaattttgtattcatttttctgtatccaatcaatagccctcatttaaaatcgtttttggcaatagatcgatcaatcaattaaacaactcatcaaactaatgaagctttcattgtctcacatagcacttaatcagctaatcggaaggaaaagacatgaaatattaatatttgagccatattaaaagtcaagttcagctgggtgattaatcaagcggagatccgcataataaatttcataagttgccatcatcatcgcagttaagattaccatcaatttgtttaggatagctactgttttttatggtaggttgcggaattagaacaccgatatcattcgcctgggaaacaattgcaaccagcgatcccagttcatttctagggtgtgggtaacaaacagaagcaacaacagctgccgctgcttggggtcattttgcaatgaataaattagagaaactttaagtggcggaagaagaactactggacatgcccaagtaaggcagtctggagatgaccaggcggcgataaaaaaaaaatacagacaaaagcgcagccaaaaagcatagcattttaacgccaatgaagcatgaaagtcattgacggccctgtgcctaaacactcggccagaagatcttttgcacaagattcggaaataagttgtgtaagagtgagccgaagtggttctcccacaggttgtccgcgccacacggcgaatacttaagattcagacgcattgcgcaagatcacgagattagcccttcacttgcagcccagctaaatccaatccaatccgatgggagcttcacctgggacccaattactacagatttgcatatgcctcagctaaatgctgtaaagatgggaaagacaaagccaattctgggcctgctcgcaggccatcaaatccaaacaaaagattgtcaagcgggtcacagcctgagcagttattgttatgagagtttaatgagctggcagccagccgggcgaacagtgcccacttattcgagaagtacgcgacagttgcttatgagaaattttagctttaggatcaaatgtgggatgggctatcgatttctcctactggcgtcattgtcacatctttttggatctcagcggcagtacggtaggccgtggggtggattttaaagccataaagcctgggaaaacatagttacattagttatacattattagtaactaccttaaaaacatagggaaatagaaggaaacacaggaaacggaagatctaacctgggcacaaacttctgctttgcccgcttgggcctagcatccggtttctccataaagaacatatgagggaatccagtgccaaagaaggctccatccagattcgaatgtctcgacgccttgggaatgtacacatcattgcacttggggcaatagatgcgtaccatatcctcgccaggattatcactcaaaccaatgggcagcaccggctggctatggcagaatgcacgtggacatgtgccgaattcgcccttgttgtacttgtccaacatcagttcgatgcccctgttggttaggataaagcgagcatggatcaagccatacagtttctctgcactagcctccagttctggttcagcggggtcttccgaagctgaacccggattaagatccaggatcacctccaaggcacatttgtagttcttaacgttcgaatcaagaaagttaaggttaaacttgtcctggatatattcctcatccacctcgcaaaagaattcgttgccacgctgcttgcaaaaccaatgaatccaggaagattcgtccgaatcggtcatagctgcttcttttaagctttaatttaatcagtcaaaatcacgagagcttaacaataggacttatttaatttcgaatgacagctgtcagggacggagtgttcaatcaagggttgtcaactcaaaacgaaaactgtaatgtaaatgcaaccctgaattttcattcccaggcttttacatccattgccctgctcgtgtgcctggctgcctggacccatgcggaaccaccagttccccagaaccagtacctgccccccaatcagtcgcctcaggcgccgtccaacaactacctgccgcccacgcagggctaccagtcgccgtcgagcaactacttgccaccccagcgggccggtggcaatggaggagcgcccagcaacagctatggcgcccccatcgctcctccccagggtcaatatggtgctccagcgctgactggtgccatcttcaagggcggaaacggaaacggaaacggcggctatggcggcggtaatggcaacggcaacggctacggacaacgggatgaggagcagtatggaccggccaagtacgagttcaagtacgacgtacaggactacgagtcgggcaatgacttcggccacatggagtcccgcgatggtgatcttgctgtgggccgctactacgtcctgctgcccgatggacgcaaacagattgttgagtacgaggccgaccagaatggataccgcccaaccattcggtacgagcaggtcggcaatggcaacggaaacggcaatggcaatggtcgcaacggtggcggttatgatagcaacgcgcagcagggcaaattcaacggctactaagatggggaagtgaggatacccgatttaggtcgaccccgcaactatactcgtctacttcatgggatcgctggccgagtattaaacgcacatccagccagtgggccagcgatcgcagtcagtctatccatataaccctattcccatctctgtgcatacccttagtgggacgcccgccattttgccatagacaggcgcgttcctttccgtttccgtttcactgctgttcgttatcctgtt

SEQ ID NO: 19004 - DNA, 792 bp, DROSOPHILA
gttaagctctcgtgattttgactgattaaattaaagcttaaaagaagcagctatgaccgattcggacgaatcttcctggattcattggttttgcaagcagcgtggcaacgaattcttttgcgaggtggatgaggaatatatccaggacaagtttaaccttaactttcttgattcgaacgttaagaactacaaatgtgccttggaggtgatcctggatcttaatccgggttcagcttcggaagaccccgctgaaccagaactggaggctagtgcagagaaactgtatggcttgatccatgctcgctttatcctaaccaacaggggcatcgaactgatgttggacaagtacaacaagggcgaattcggcacatgtccacgtgcattctgccatagccagccggtgctgcccattggtttgagtgataatcctggcgaggatatggtacgcatctattgccccaagtgcaatgatgtgtacattcccaaggcgtcgagacattcgaatctggatggagccttctttggcactggattccctcatatgttctttatggagaaaccggatgctaggcccaagcgggcaaagcagaagtttgtgcccaggctttatggctttaaaatccaccccacggcctaccgtactgccgctgagatccaaaaagatgtgacaatgacgccagtaggagaaatcgatagcccatcccacatttgatcctaaagctaaaatttctcataagcaactgtcgcgtacttctcgaataagtgggcactgttcgcccggctggctgccag

SEQ ID NO: 19005 - protein, 219 aa, DROSOPHILA
MTDSDESSWIHWFCKQRGNEFFCEVDEEYIQDKFNLNFLDSNVKNYKCALEVILDLNPGSASEDPAEPELEASAEKLYGLIHARFILTNRGIELMLDKYNKGEFGTCPRAFCHSQPVLPIGLSDNPGEDMVRIYCPKCNDVYIPKASRHSNLDGAFFGTGFPHMFFMEKPDARPKRAKQKFVPRLYGFKIHPTAYRTAAEIQKDVTMTPVGEIDSPSHI

SEQ ID NO: 19006 - DNA, 4995 bp, DROSOPHILA
cttggcagcagcagccactgtgggctttccaccggccaactggggcagaggagtacccgaccaagcggcacgctcagcggcctcaaaggaggcgatgtggcggtaccagcgggccacgttcacattgtcggcagagggggccttgcccagagcatcgaacacggacagatcggccttgctgggagtatatctaatgggagtatagtaatgggtagaaaattattcgatcaatacatctgccgacgtggtgaggtcgtacataacctcacatttaatgacgcgtgcttacccgctgatgtagctgttgtcggccaggaaggcgttcaactccttcagtccctgcggggtggtcacatcaccgaatgccattttaaatgcgtttttgtggggtaaattcgcgtttaacaaatctggagccgtgctctgcgcaacgttgccgacgaaagaagaacagagtgaccttcgcgggaaacggtctttaaacatataatgaaaatactgactttttcctagtatttcaagtagttgcaacacagggtgacccggagtttgagtaaatatcgttcaaatataccatacattcaaatagatttttaacgcttacttgtattttttttaataaaacataaggattataattaataccttatacttaagctagctattggctacgtaaatttaaggccaaacaattacatttaatattctgaaaaggaaaaaaattgtatagaaattgtatgcttctactttgtaacttgtgaaaacaatatgcatttccttgggcaaattcacacaaattgggagcttgggcttaatagaaattaagtttaagtagatcctttactttcaaataaattcatataagtcattgaatatttaatttaacacaaatataccaaaagcgcggactaaaaccgtgaatatcttatgcgcagtgttaccgttgcagtgaaaatcatgagggtgaaaaaacgcctccaatcaagctataatgctacacaatttttttgcaaacgcataattttcactgaaaagccgaaagaaaaattaaaaaaaaaaacgtagaagcgcatgaaaaaaacggctcaacaataaggcagagtagacattcgaaagccacttaaacaaatgccataggaagcgtttatagtatttcctcagcatttgtgaaaaaatcgtcgctttcggctattgaattttcaacgcgtgcggtcaaacagaacaaaaaaaaaacaagtggtaaccataaagaaccgaattgaacctattataaacccagaactatgagcgacttccagcaacaaggcatcaatcaatcgcaggcactcgcgcaggcaattcagcgtgccaagcaggtgagttcccaccacttggaagaggaagaagcggaagtgggcattgattcggcttcttttgccccaatccccaaaccagatcgcagccaagatccagcccagccagcagggcggcggcacagcgggtccatcgccaccgtcttcgggtggagggcctggctttaagcgtatcaacgacgacggcgacagcggtccggaatccaaacgctccttgggcagtccggagtacgccaacaacagctccaacatgagcagcggtagcgggggtggtggtggcggcggcggaggtcccggcggtgccagtattactcaggcaatcgcccaggctgctgcggtagccgctcgtttggccgcctcggcgggaacaagctgtgaggagcagatccgtctgcccgaatcggtagccggcgcctttatgggtcgctccagtaacgacaccatcacccacatccaggccgagtccggtgtaaaagtgcaggtcatgcaggatcaagatcgcgttatcatgttgcgtggtcaaagggatacagtcactaaggggcgcgaaatgattcagaacatggccaatcgggctggcgggggacaggtggaggtgctgttgacgatcaatatgccgccaccgggacctagcgggtatccaccttaccaggagatcatgattccgggcgccaaggtgggcttggtcattggcaagggcggcgataccattaaacagctgcaggagaagaccggagccaaaatgatcatcatccaggacggaccaaaccaggagctgatcaaaccccttcgcatatccggcgaggcgcagaagatagagcacgccaagcagatggtgctcgatctgattgcccagaaggatgcacagggtcagcaacagggtggtcggggcggcggcggaggtggcggcggtccaggcatgggattcaataactttaataatggcaacggcggcgagagcaccgaagtctttgtgcccaaaattgcagttggcgtggtcatcggcaaaggcggcgacatgatacgtaaaatacaaactgagtgcggctgcaaactgcagttcatccagggaaagaacgacgaaatgggcgaccgcaggtgcgtcattcagggcactcgccagcaggtcgacgatgccaagcgcaccattgatgggctaattgaaaacgttatggtgagtcgaaagtattttcttaaagatgcaaatccattacctatgtctgatgtgatagcaacgaaatggcatgaatcgaaatggcaatggaggaggcggtggcccaggaggagactctggcaactccaactacggctatgggtacggcgtaaatcacgctcaaggtggacgggaggaaattacattcctagttcccgcttccaaatgtggagtaggttcaaaaacattccgccggagtatcaagctctctaaacgttacacatttccatgcagattgttattggtcgcggcggtgagaccatcaagctgatcaaccagcaatctggagcgcacactgaaatggatcgcaatgccagcaatccccccaacgagaagctcttcaaatctaagggcaccaccgaccaggtggaggctgcccgccaaatgatttccgagaagatcaacatggagctgaatgtcatttctcgcaagcccatcggtggaggtcccggcggtggtggcggaaattctggcggtggccagaacaattcccaccacaatcagcagcaaggcggctatggcggccagaatcaaatgcagggcggcgatcccaactcgggagctggctaccaacaacagccttggggtggaccctacgggcagcagggttgggatccgtccggtcaacagcagcaaatggccatggctaatcaagggggctctgctgcgggaggagcttccggtggtcaagactactcggctcagtggatcgagtactacaagtaaccatttaccaagaacgctttcataaatatctttatataaacctatatatttacaatttagacaaatgggatgccatcgtgaggctgaaatgatcgagcagcaaatgaaggccaaacaggcgggcggctcctccggtcctgtccagcagcaacaaccccaacagcagcaacagtcccagcagcagacaggaggcgccggtgccggaggagcggactacagtgcccagtgggcggagtactatcgcagcgtgggcaagattgaagaagctgaggcaatcgaaaagacattaaagaataaggtgggtggaaagccatcctttctatacaatattatctatataattataacattagcagcagaacggatctggtggccagagcagtacgccgaatcccagccagggcggctccggccagcagcagcccaatcccgctgcggcggcggcggcagcagctgctgctgcagcggcggccggtggttatggccagagcatgacgcccactcagtatgcacagtattcgcagtattatgcagctgctgctgcagctggtggtcagccccagggagcgcctcagcccggcggagggcagagcggtggtccgccgggcaactatcctggcaattatccgggcgctggttacggcggctatcccggtgcgccgggccaacagcagcagaaatcgcacaaaaacgacaatcactgaggacgttcgggatgtatcggaatcgtcggtagggggaaggaggtgtatgtgggagtggaagcgaacgccgaagtggaagatgctgcgggttgaggacgatgcaggtgccttgaatggggtgagttttaagcgctaagcatttccagtagttgtcagaggagtgtgtttatgtatattctattgaaattgaattgccgcctataaattatatgcattatgtatttttgctttgtccatctgcttaaaaatgatcgctttattttagataatcagtactcctcatctgcattacaaatatttttacacaatacaattttgggttcacattttccaattatgttcgtacgaatttgtattttgggcgagatcaatttttcggaaaggattttaggcaatgataatcatgtgccatagtaatggccctcctcatcggatgggtggttgtgtgtttgcatatgattatcattatcctccaaatctaagtttgttgactcaattggaaaatggtgtgatccattgccttacattatgacttgtaatagcctaaccaaatcttgtttaccatgcgtaaaactctttgcagtgatctattgttctactatgtccctatgtcttttatccccccacaaaactagcaaatcagaaatgaaaagcaaatgatttttaattgcaataacaacagcaaaagcaaaagcagaagcatcaccaccaccacatagacaacacacgggatggaggcggacatcaggcgaggacccggataaatcggagaacgttaagcttttgcagaattgtaaattaatactattaacactgtctattatttggatactgcatataatttcaccatagcttgtaagagattatcccgagatcctaagtctacttttacctaataattatacataattccgaccgattgaaacataatgctcttgctgttcatgatcaccacttgcacagacatactaagagacgctaattgaatccgttttgggtg

SEQ ID NO: 19007 - DNA, 2677 bp, DROSOPHILA
aatttttttgcaaacgcataattttcactgaaaagccgaaagaaaaattaaaaaaaaaaacgtagaagcgcatgaaaaaaacggctcaacaataaggcagagtagacattcgaaagccacttaaacaaatgccataggaagcgtttatagtatttcctcagcatttgtgaaaaaatcgtcgctttcggctattgaattttcaacgcgtgcggtcaaacagaacaaaaaaaaaacaagtggtaaccataaagaaccgaattgaacctattataaacccagaactatgagcgacttccagcaacaaggcatcaatcaatcgcaggcactcgcgcaggcaattcagcgtgccaagcagatcgcagccaagatccagcccagccagcagggcggcggcacagcgggtccatcgccaccgtcttcgggtggagggcctggctttaagcgtatcaacgacgacggcgacagcggtccggaatccaaacgctccttgggcagtccggagtacgccaacaacagctccaacatgagcagcggtagcgggggtggtggtggcggcggcggaggtcccggcggtgccagtattactcaggcaatcgcccaggctgctgcggtagccgctcgtttggccgcctcggcgggaacaagctgtgaggagcagatccgtctgcccgaatcggtagccggcgcctttatgggtcgctccagtaacgacaccatcacccacatccaggccgagtccggtgtaaaagtgcaggtcatgcaggatcaagatcgcgttatcatgttgcgtggtcaaagggatacagtcactaaggggcgcgaaatgattcagaacatggccaatcgggctggcgggggacaggtggaggtgctgttgacgatcaatatgccgccaccgggacctagcgggtatccaccttaccaggagatcatgattccgggcgccaaggtgggcttggtcattggcaagggcggcgataccattaaacagctgcaggagaagaccggagccaaaatgatcatcatccaggacggaccaaaccaggagctgatcaaaccccttcgcatatccggcgaggcgcagaagatagagcacgccaagcagatggtgctcgatctgattgcccagaaggatgcacagggtcagcaacagggtggtcggggcggcggcggaggtggcggcggtccaggcatgggattcaataactttaataatggcaacggcggcgagagcaccgaagtctttgtgcccaaaattgcagttggcgtggtcatcggcaaaggcggcgacatgatacgtaaaatacaaactgagtgcggctgcaaactgcagttcatccagggaaagaacgacgaaatgggcgaccgcaggtgcgtcattcagggcactcgccagcaggtcgacgatgccaagcgcaccattgatgggctaattgaaaacgttatgcaacgaaatggcatgaatcgaaatggcaatggaggaggcggtggcccaggaggagactctggcaactccaactacggctatgggtacggcgtaaatcacgctcaaggtggacgggaggaaattacattcctagttcccgcttccaaatgtggaattgttattggtcgcggcggtgagaccatcaagctgatcaaccagcaatctggagcgcacactgaaatggatcgcaatgccagcaatccccccaacgagaagctcttcaaatctaagggcaccaccgaccaggtggaggctgcccgccaaatgatttccgagaagatcaacatggagctgaatgtcatttctcgcaagcccatcggtggaggtcccggcggtggtggcggaaattctggcggtggccagaacaattcccaccacaatcagcagcaaggcggctatggcggccagaatcaaatgcagggcggcgatcccaactcgggagctggctaccaacaacagccttggggtggaccctacgggcagcagggttgggatccgtccggtcaacagcagcaaatggccatggctaatcaagggggctctgctgcgggaggagcttccggtggtcaagactactcggctcagtggatcgagtactacaaacaaatgggatgccatcgtgaggctgaaatgatcgagcagcaaatgaaggccaaacaggcgggcggctcctccggtcctgtccagcagcaacaaccccaacagcagcaacagtcccagcagcagacaggaggcgccggtgccggaggagcggactacagtgcccagtgggcggagtactatcgcagcgtgggcaagattgaagaagctgaggcaatcgaaaagacattaaagaataagcagcagaacggatctggtggccagagcagtacgccgaatcccagccagggcggctccggccagcagcagcccaatcccgctgcggcggcggcggcagcagctgctgctgcagcggcggccggtggttatggccagagcatgacgcccactcagtatgcacagtattcgcagtattatgcagctgctgctgcagctggtggtcagccccagggagcgcctcagcccggcggagggcagagcggtggtccgccgggcaactatcctggcaattatccgggcgctggttacggcggctatcccggtgcgccgggccaacagcagcagaaatcgcacaaaaacgacaatcactga

SEQ ID NO: 19008 - protein, 797 aa, DROSOPHILA
MSDFQQQGINQSQALAQAIQRAKQIAAKIQPSQQGGGTAGPSPPSSGGGPGFKRINDDGDSGPESKRSLGSPEYANNSSNMSSGSGGGGGGGGGPGGASITQAIAQAAAVAARLAASAGTSCEEQIRLPESVAGAFMGRSSNDTITHIQAESGVKVQVMQDQDRVIMLRGQRDTVTKGREMIQNMANRAGGGQVEVLLTINMPPPGPSGYPPYQEIMIPGAKVGLVIGKGGDTIKQLQEKTGAKMIIIQDGPNQELIKPLRISGEAQKIEHAKQMVLDLIAQKDAQGQQQGGRGGGGGGGGPGMGFNNFNNGNGGESTEVFVPKIAVGVVIGKGGDMIRKIQTECGCKLQFIQGKNDEMGDRRCVIQGTRQQVDDAKRTIDGLIENVMQRNGMNRNGNGGGGGPGGDSGNSNYGYGYGVNHAQGGREEITFLVPASKCGIVIGRGGETIKLINQQSGAHTEMDRNASNPPNEKLFKSKGTTDQVEAARQMISEKINMELNVISRKPIGGGPGGGGGNSGGGQNNSHHNQQQGGYGGQNQMQGGDPNSGAGYQQQPWGGPYGQQGWDPSGQQQQMAMANQGGSAAGGASGGQDYSAQWIEYYKQMGCHREAEMIEQQMKAKQAGGSSGPVQQQQPQQQQQSQQQTGGAGAGGADYSAQWAEYYRSVGKIEEAEAIEKTLKNKQQNGSGGQSSTPNPSQGGSGQQQPNPAAAAAAAAAAAAAAGGYGQSMTPTQYAQYSQYYAAAAAAGGQPQGAPQPGGGQSGGPPGNYPGNYPGAGYGGYPGAPGQQQQKSHKNDNH

SEQ ID NO: 19009 - DNA, 4057 bp, DROSOPHILA
tcatcttcgtcgtcggaatgttgatgtctggacctaggtcagtgctccaatttagagcggatttgtggcttgatcaaaatgcgatcgggcagttttttttatttaaataataatgatataagataatattatgagtgcaccgtgaatttatgcatgtaaaaatgtaaaaaaaaaacaaaattatttttataataaattacttaaaaatgaacttatacaaaaaattaactttcattatcaacatttaacatgtttatatacttttctgtgcctacgtttttttttctttgcaatcatctaatgtgccaggtgtcgcttaaatttcatgcgtgctgcctgttctaatgcgaaaaaaaagggtttttgccactaatggacataaagtaaaaggcgtcttgacttaattgcaacatgctttgcgcatggcgaatacaaactgtgccagcggctattgatgctgcattatataaagcatgtcacaacgtgcagcactttcaatacggacaagtccaaatagtgatgagaatgtcaggatttcggtgtgctgcagtataacaaaaaaaaaaaacaagtacatccagtacaaaaaatatatagccgaaaatattcctttagcccaaagtgatattaaaaatggttcgagtatcgctagttccattcattataatcgggtaagttttccaacgcaagttagttcttaactagactctagatttgaacgtatctttctgtatacggaatcactcaactaattttgtggtatacaaaacttaatcaagctaagtgccgactcaaattaatttgactgacacttgcagcaatgaaattttaatccatgtctaagtacacaacgacttgtctatttagcttaaaggcaaagcaatcaataaaagttgacaaacagtcgattgattttataatccctacactctgggcgaaagtgaatgaacccaaggacagcagatacaatagtttattcaaatttatatacatttttcagatttatggcgcacttttgtgcgtgtgaggatgttacatcctcagatcttctgtatattaagaccatgggaccctcggcgattttaacaaaaatgccgaacataaccaatgagtttagttcaagaattttcagttcttttcgcatattgccatcatcaaagccaaaaacaaatggatcgcttaagcgtagtcaaaacgccacgaacttgagttactcctcctctgagatttccaatcaaagacgagttcgacgaaaagcagcggccgacatgcttagccgtaatatctcaatgattttggaaaatctactcaaacgctacgagcaatcccaactacccacgcatggccagggagttccgacggtggtgcaaacgaatatcctaatccgtagcatgggtccagtttccgaattggacatggactactcgatggattgctatttccggcagtattggcgggacaaacggctgagcttcaagggacccatcaagagcttatctctgagcatcaaaatgctggacaagatctggaggccagatacatatttttacaatggcaagcactcgcaaattcacatgattaccgtgcccaataaattgcttcgattggatcagaatggagggattctgtattcaatgaggtatgttaaagaaactttttcgtaaatttcccaaataattagtaattttgggtcatatagactaacaattaaggctacttgtcccatggagctgcaaaactttccaatggatagacaatcatgccctctagtaattggaagttgtaagttaatgaacatttatttatttatttatttcccctgtgtcacattaacctttccaacccccttagatggctatattaaccaacagttgatctatgaatggaaaaatcaggacgatgcggtgtcctttgttccaggaatgactctaaatcaattcgatctcattagcatgatgcatcgcaattttacaaccgttcgacgggaaggtgatttttcagtcctgcatgtagcttttaatctcaaacgtcacacaggatattttctcattcaagtaagatagacattaataattgaacaagtgcatgaaagtgtgctaacaattttatggaactttgtttaggtatatgtaccctgtattctgatcgtggtactgtcatgggtctccttctggatacatcgcgaagccaccagcgacagagtgagtctttgcgttacctcagtgctgaccctgtccaccattagtctggactcacgaaccgatttgccaaaagtcaaatatgccacagctttggattggtttctattgatgagctttctgtactgcattgccaccctgttggagtttgccggtgtccactactttacaaaactgggaagcggagagagtccgcaactggaggatcagtgggaggacatctgtatagccaactcattatcggatcatgccggcgaggtggatggcgatggtgaagctgacgccgacccatttgcggatgaggactccagtaatggcagcgaaaatgatgacaacgaggctggagcaagtgaatccgttgagtccaagagcggtgtctgtgtatgcaacaaaaacgatgctctcggtctggaatatgaggtttcgctacagaattcactagctggtgctggttttctcaaaagaaatgctattttttgtcccacatataacgtgagtaaagtttttaatgttccggcaagcaactgaaattcatgtatgtatatctcaggatccatcgtacattttgccaaacaccatggagagaaccacccaaacggagcctccggccgtttcgcgattgcatcagatgtggatgtgcctgaagagcgacaacagtttccggaaacaacgagaacgcaacgctgcggcccaaaagagcgaacaaggtggcgccaactgctatgtcaatagtgtatccctaatcgatagggtggcgcgtattgccttccccatgtcctttgcatttctgaacctactgtactggtgggcctacggaatgtacaagaaggagttctcatggtccaatatgaagtcatagtcatgttgattaataaacgttgattccgaattgaattttgaatgcatcctacgtgggggcactgttttgccggcaaaaagctcgtcaggcggtgggtgaccgcaataaatgtggtttaagtgccaatcaatccgcacttatttatggatctgtgtcagtgtgttcagatgcaatgctcggacatttttctaggacaattctagaaagcaataaggataaacgcatcaaaacggagcaattgcaattttaagttgcaaatgtaaatcatacaatttggagctataaaaatcgatgcatacatatgtttttaaagtgtttattcagcatacagaacatagaatttcaaaaaaggcacaaagctttccgtgagcttaaacgcgcggtgtcgctttgcaaaaagcacagcctcattgccaaatatgatggcgaaaaggacatccaaggaaagcacaggcctacacgtatgtatttgataacacgaaccgacttgaataatagggatgcgcaatgcaggtcaagccgagcgaaatgaactcacccgagaagctcccgcacaagcatctctataagcaattattcattagatagatatagatactgtgggtgctcgcacgcagttcgcagcagttcgaggctacgcgtgaacggaccaaaggaccaaaatacaaaatacaaatatacaaaaaaaaaaaaaaaatactgacagagacggaaaaacgagaacgaggtgcgagcgggagagggaagcgcagcgataaagtgataaagtttgcccatgcgtttgtcaaatcgcgttttattgctggctttgatattgatatggctaaaaagggcaagaggaacaggaactggtgccccaaatgcataagtagcttgaattgtttgcattcgattgtaacgtcgtgccccaaaatcaacataatgcttttgtctaccaaaatcggcatcttttttttttgtttgaatgtgcaagcttgcatagaaagcatcatttagtgtt

SEQ ID NO: 19010 - DNA, 1723 bp, DROSOPHILA
atttatggcgcacttttgtgcgtgtgaggatgttacatcctcagatcttctgtatattaagaccatgggaccctcggcgattttaacaaaaatgccgaacataaccaatgagtttagttcaagaattttcagttcttttcgcatattgccatcatcaaagccaaaaacaaatggatcgcttaagcgtagtcaaaacgccacgaacttgagttactcctcctctgagatttccaatcaaagacgagttcgacgaaaagcagcggccgacatgcttagccgtaatatctcaatgattttggaaaatctactcaaacgctacgagcaatcccaactacccacgcatggccagggagttccgacggtggtgcaaacgaatatcctaatccgtagcatgggtccagtttccgaattggacatggactactcgatggattgctatttccggcagtattggcgggacaaacggctgagcttcaagggacccatcaagagcttatctctgagcatcaaaatgctggacaagatctggaggccagatacatatttttacaatggcaagcactcgcaaattcacatgattaccgtgcccaataaattgcttcgattggatcagaatggagggattctgtattcaatgagactaacaattaaggctacttgtcccatggagctgcaaaactttccaatggatagacaatcatgccctctagtaattggaagttatggctatattaaccaacagttgatctatgaatggaaaaatcaggacgatgcggtgtcctttgttccaggaatgactctaaatcaattcgatctcattagcatgatgcatcgcaattttacaaccgtatatgtaccctgtattctgatcgtggtactgtcatgggtctccttctggatacatcgcgaagccaccagcgacagagtgagtctttgcgttacctcagtgctgaccctgtccaccattagtctggactcacgaaccgatttgccaaaagtcaaatatgccacagctttggattggtttctattgatgagctttctgtactgcattgccaccctgttggagtttgccggtgtccactactttacaaaactgggaagcggagagagtccgcaactggaggatcagtgggaggacatctgtatagccaactcattatcggatcatgccggcgaggtggatggcgatggtgaagctgacgccgacccatttgcggatgaggactccagtaatggcagcgaaaatgatgacaacgaggctggagcaagtgaatccgttgagtccaagagcggtgtctgtgtatgcaacaaaaacgatgctctcggtctggaatatgaggtttcgctacagaattcactagctggtgctggttttctcaaaagaaatgctattttttgtcccacatataacgatccatcgtacattttgccaaacaccatggagagaaccacccaaacggagcctccggccgtttcgcgattgcatcagatgtggatgtgcctgaagagcgacaacagtttccggaaacaacgagaacgcaacgctgcggcccaaaagagcgaacaaggtggcgccaactgctatgtcaatagtgtatccctaatcgatagggtggcgcgtattgccttccccatgtcctttgcatttctgaacctactgtactggtgggcctacggaatgtacaagaaggagttctcatggtccaatatgaagtcatag

SEQ ID NO: 19011 - protein, 484 aa, DROSOPHILA
MLSRNISMILENLLKRYEQSQLPTHGQGVPTVVQTNILIRSMGPVSELDMDYSMDCYFRQYWRDKRLSFKGPIKSLSLSIKMLDKIWRPDTYFYNGKHSQIHMITVPNKLLRLDQNGGILYSMRLTIKATCPMELQNFPMDRQSCPLVIGSYGYINQQLIYEWKNQDDAVSFVPGMTLNQFDLISMMHRNFTTVYVPCILIVVLSWVSFWIHREATSDRVSLCVTSVLTLSTISLDSRTDLPKVKYATALDWFLLMSFLYCIATLLEFAGVHYFTKLGSGESPQLEDQWEDICIANSLSDHAGEVDGDGEADADPFADEDSSNGSENDDNEAGASESVESKSGVCVCNKNDALGLEYEVSLQNSLAGAGFLKRNAIFCPTYNDPSYILPNTMERTTQTEPPAVSRLHQMWMCLKSDNSFRKQRERNAAAQKSEQGGANCYVNSVSLIDRVARIAFPMSFAFLNLLYWWAYGMYKKEFSWSNMKS

SEQ ID NO: 19012 - DNA, 3814 bp, DROSOPHILA
acgcacacgacaatttcaactttatcagttctctctagcagctttcccgacttttaccgacttgtgttcaaacaaaatctgtacaactgatttttccaactttaaatgcaatagatatagccacaactttacaacttttaaagactatacccacgcacacaacaatgtcttttttctttaaacaactgcaccttcatataaccgatttaggactggacgagcccccatgtaagattgtttattattattgtttattattaatttaattattagtttaattctaaatgcggtaattatataaagtattcttagtttgtgaccgaacgactgctgctgagaactcgactgactgcaacgctgacttccactcgactccactgctgccttgcgatcgttccttcgatgactgattgtcgataacttcgatttccgacaatcatgttgctgctcaacagcgctgccaaccgggttgttgccagccttcagccttactccatgttacatttatcattttttttttacatttacttatattttttttgatttgtacatagatcttgtttgtttgttttgtaaagctttaaagcggacgccattatgtgtgtgcaaacgtgaggatttgcaagaagcgaaaagttaaacttaaagccaacccatttaatacgtataactaacatgtaagattaagggaagtactttttttttggtttcaacgattatcgaggttagacaagaagttttgtgcagccgacctcggcccaggtctctaaaaaagacaagcagcttaacttagttatacgaatctatacgattaagccgaactagtgggtaagcgtacatgtatagcgaatatatacgatacttttctttatacttgtgtacttcctaagtaatttgtgcgatgccgaataccgagttgcgaattaaacgttaaaaattttcataaacaaccaattttcattgacaaccacccgacgagtaaggatttggtttcacagcatcacaaccgttttactactttgttagaccttttaattttggtctctccttcggcgggcggtggagtaaatgagcaaatacctgaagatgcagtagtggacttggacttctttttcttcgataatctgcccttgcgtcgaacggggacttgctccttgggcttacatggcgaaatgggcatcagaacggtaaagttttttaacaactctggattgggcgttttatcccagtgctcactaaggattcgcattgagaatcaatcaaatcaatcgtgatcacttatacagacttactttggcatacaattcggcggaaccaccacatccagaacgttgtctattagccgcgatttgagcatgcggtcgttcgtggtggtcgagtgcatggacggcgatgtattgatctcgatcagccagggcttcaggttattatcaatgattatgtcatagccatagacctcgaaacaatgacgatcgttggccatcaccggagccactgcgtccaaggagtgcctgatggtggcggtgatgcggctccacagcatatccgaaacgccctcgcctcgcaggctgtccaagtacagccacagattctggagtggccatttgccaccatggatggaattgtactcttgctagatattagagtaaaacatttataaagcaaatgttaagtgggcgcaaaacgcttttttttttatcaaacacacttatttgcaatgttgacttaggacttatgtactcttacgtacacggacttggctacttacattcgttttctggatgctgacgttcgtcaagtgcataaacacgttatcaatctcagtttcgtcgtacttctcggtgcaaaaacggcagaaaccctccttatagagataagccttgagcggattgaatgtggtcacaaggacgaagagtcgcaggtcgaatttcttgccgccgatcagcagtggattgtcgatgtacttggaaatgacgcaggtgtcccggttgatttgcggatagaaggtgcgcgcatcgtatgcgaattttttcagtttggacaacttgttgaccagatagatacctacaccctgggacttgctgcatggcttcactatccacgtgctggccggattgcgatggaagacctcgacgaacatttggtaatcggaggggaggacaaaggtcatgggtatgatgtccaggtgcttgtaacgggtaccgcctatgcccagtttcgtatccggtggatggctttgagccaacggatcgccacgtcgctccagatctttgcgatagcgcttgatgttcttgattagcaaatccttgcgcgacagctcaatggagttcgggaagtggttaatgactctgcggtgagatcttagatggttagacaaaaagttgctaaccactacttactgatctgatcgcatgcgatatggatgatcgatgccgaagatgtagcgacaattctgggtgcacgcccaatagaagttccattcgccattaaaggagggcacctgtagccaacctcttttctggaaattgctgaccagcgcagacttgtcccaatctgtgctgtagtaaatgccgtttcgggatttcggtggtctcagtcgattccggatgtaatgcagaccattgatgggctgggtgattaacttgacctcaggcaggtcatcgtcactagtgcaactgccgccgcatttctggcgaagattcctcagaggactggtctgtcttcgcgtgctcatttgggtggttgtattttagatactgcccctctttatgctgataactgagaattttgcctaattttgaagcgatcgtacttcagttgctgacaatttaattatggcctggctgatgcccccgcgttggcatctagtaagcccataacctttcaagaataggaccttgggttccagagagcatacttatttcccagctgtatggtcaatggtttacaatattaattcacttgttcccacaactgatgaaaaaaatctgactgttttccggcaacagatccgcttgcataatccccgggaagaaaacgaaagtgctaattcccttgaagctgcaatgtttgcccaaaaattgcgttatattcttggattctagctaaaagcaaaccttctgcgaaaccacaagatcgcaaagagtgaaaaatctgactttgacacaaatatttgtgacactagttcacctgccatcggaacagggggccctccaaaacccattgagtaatttcacacattgcgggttttggtacagaacaatcgcgcactattgtcgagcaattcgacttggctgggtataaagtcgatggtatggtcaccagagttcatcagtcgacgcggcaaagtcaagagtggattttgtggattagcaggaacaccgaatcgaagatatacacattacatcaccatgaagttctacctgggattggcggcagtagtagttgcgatggtttccctagcgaagccgggagaagccacctttggcaagcttaatcttcttctgggcggagccactacgtctggctatggatctggatatggcggcggctatggttctggctacggctatggatctggctatggatcaggatatggcgccggctatggatacgctcccgagaacgtggtgaaggtgatcaaggtatcggtggtgccaggaggtggaatcggaggaggatatggcggaagctatggtggaggatatggcggcggttacactggcggctatggcggtggctattccagcggctttgtgggcgctgcgcctgccatatccacctccgccgtggttacaccggtggtcacatcggt

SEQ ID NO: 19013 - DNA, 1571 bp, DROSOPHILA
aagtacgatcgcttcaaaattaggcaaaattctcagttatcagcataaagaggggcagtatctaaaatacaaccacccaaatgagcacgcgaagacagaccagtcctctgaggaatcttcgccagaaatgcggcggcagttgcactagtgacgatgacctgcctgaggtcaagttaatcacccagcccatcaatggtctgcattacatccggaatcgactgagaccaccgaaatcccgaaacggcatttactacagcacagattgggacaagtctgcgctggtcagcaatttccagaaaagaggttggctacaggtgccctcctttaatggcgaatggaacttctattgggcgtgcacccagaattgtcgctacatcttcggcatcgatcatccatatcgcatgcgatcagatcaagtcattaaccacttcccgaactccattgagctgtcgcgcaaggatttgctaatcaagaacatcaagcgctatcgcaaagatctggagcgacgtggcgatccgttggctcaaagccatccaccggatacgaaactgggcataggcggtacccgttacaagcacctggacatcatacccatgacctttgtcctcccctccgattaccaaatgttcgtcgaggtcttccatcgcaatccggccagcacgtggatagtgaagccatgcagcaagtcccagggtgtaggtatctatctggtcaacaagttgtccaaactgaaaaaattcgcatacgatgcgcgcaccttctatccgcaaatcaaccgggacacctgcgtcatttccaagtacatcgacaatccactgctgatcggcggcaagaaattcgacctgcgactcttcgtccttgtgaccacattcaatccgctcaaggcttatctctataaggagggtttctgccgtttttgcaccgagaagtacgacgaaactgagattgataacgtgtttatgcacttgacgaacgtcagcatccagaaaacgaatcaagagtacaattccatccatggtggcaaatggccactccagaatctgtggctgtacttggacagcctgcgaggcgagggcgtttcggatatgctgtggagccgcatcaccgccaccatcaggcactccttggacgcagtggctccggtgatggccaacgatcgtcattgtttcgaggtctatggctatgacataatcattgataataacctgaagccctggctgatcgagatcaatacatcgccgtccatgcactcgaccaccacgaacgaccgcatgctcaaatcgcggctaatagacaacgttctggatgtggtggttccgccgaattgtatgccaaatgagcactgggataaaacgcccaatccagagttgttaaaaaactttaccgttctgatgcccatttcgccatgtaagcccaaggagcaagtccccgttcgacgcaagggcagattatcgaagaaaaagaagtccaagtccactactgcatcttcaggtatttgctcatttactccaccgcccgccgaaggagagaccaaaattaaaaggtctaacaaagtagtaaaacggttgtga

SEQ ID NO: 19014 - protein, 496 aa, DROSOPHILA
MSTRRQTSPLRNLRQKCGGSCTSDDDLPEVKLITQPINGLHYIRNRLRPPKSRNGIYYSTDWDKSALVSNFQKRGWLQVPSFNGEWNFYWACTQNCRYIFGIDHPYRMRSDQVINHFPNSIELSRKDLLIKNIKRYRKDLERRGDPLAQSHPPDTKLGIGGTRYKHLDIIPMTFVLPSDYQMFVEVFHRNPASTWIVKPCSKSQGVGIYLVNKLSKLKKFAYDARTFYPQINRDTCVISKYIDNPLLIGGKKFDLRLFVLVTTFNPLKAYLYKEGFCRFCTEKYDETEIDNVFMHLTNVSIQKTNQEYNSIHGGKWPLQNLWLYLDSLRGEGVSDMLWSRITATIRHSLDAVAPVMANDRHCFEVYGYDIIIDNNLKPWLIEINTSPSMHSTTTNDRMLKSRLIDNVLDVVVPPNCMPNEHWDKTPNPELLKNFTVLMPISPCKPKEQVPVRRKGRLSKKKKSKSTTASSGICSFTPPPAEGETKIKRSNKVVKRL

SEQ ID NO: 19015 - DNA, 9101 bp, DROSOPHILA
aaatgaaaaacacggcgttgcgttcacttcaatttttctcgacggccatgttggtagtatcgatatgccggggcacaatcgatggcttggcttcaatagtctaaggactgttcagagtctgatgaactcgagtcagtttatatattttaataataaatattgtgttatttcaagaggcgctcgtagttgaaaacactattcgttttgggaatgttttatatattagactatttaaatcatatcatattgttttgacattattttaagtatgcattaacgattctgctaattattgcaaaaataaaagttattagttctatttaaattaaaacagaaacaaataataacgatcaattattagttattggtgagcattaattcattttttattgttcagtttccttaattgaccatatgattttaattttaggatctgaatgtagtgtggacgccagtttgctgctatcgcaaacgttatcgatagtacggtgttgcagtattttattacacccgactaacaaatgataataagcagatccacggtcacactttccactttgtgtccatccgactgaagttaaaaataatagtttaattgggagtttccaaaatgcagcgcgacgaaaagctttttgagctgacgctggatacggtccttcagcgtctgaacgacctgaagctggcggttctctcgatgatccaaaaacttgagctagagtacgagaccatcaactggccgactttcctggacaactttgccattatctcaagtcacttgacgggattgacgaaaatcttggcaaaggagcagtgtccgccgctaagaaatcgaacggtcctgccccttctggtctccatggaccgggatgacaccctcatcaacatcacagagggtcgggtgccagtcttttcacacgacattgttccagactatttgagaactcggccggatccgattacggaacagaaaatgctgcagaacgaacagaaggcggcgaacctcaccaacgacgctgccatgaaacaggtcactcaatacaacaaggtcgtctcccacgtcctggatatggtcagcaaagcgcgcgaggagtgggaaatcgagagctcttcgcgcaccggcatccagcagacgagtagcatggccgacacacagctcctggtggccgccgtgggtatgggaaaaggactcaagctgaccaactatggacccggacctggcatgatggtaccgccttcaattcgagcaccctcgccaatgggtggacccgctatgagtcccggcaacgtgcagcagcagctgggaaaggcgccatcggctgtgaaaacaaacatcaagtccgcaaatcaagtgcatccgttctctcgataaaaaacatcagtttattagctattatcggttccatctggcggaatgtttcgtcgtaataagttatatgtatattcctaattctaaaactaggattacgcaaacataaacatgaacaaatttaaatggatcgtctcctccgactcagacttcttatgttgctggctgtgcgtgcttctcattgatgagaatctcgtgcagcttaatatctttcggcgtggaggtgtccaccagctccaggcacagcgctcgtccgccatccttttgtttagtcattcgccgcacaatgccaataaacttctgacccagcgacagttcccggaatcggacgcagttctccttgctccatactacatcagtcagttgtatgcctgaaagaagatcgtttttagttctaacgccaaactgctgaagttctcttgaacttgccataaagttgtgctggcaatgccatcttgggcagctttcttaactccggatttagagttttcagttgatcacaggcaattactccatcgtcgcccacgtcgacgaaacgcacgtgtataatctcatcgtaaatcttgtgaatacttacgctgcaagattaacagatttagtctgcgtttttattgcaagacctgaataagttcttaccgatgatatacgccttcggagtcaggggcagcgtaggcctctccaatggccagttgtgaaggctgcactcccttggctgccgtcttttggcaatgctcttgtaaattcttcatcaaagtctgcagctggttatagtatttgtacggttgcacctgcggaagaatcgcacatcataatcggagtcattaatttgctgatgattgacttaccgcaaagtgaccgggattgacggagagggcaacgcgcacctcgaaataggcacccactgccggaatagcctcgtaatccttgagcatgagagacgaaaaggtgctgccggtcgatcttgcggatggtttcttctctggcgtcaccgggggagtggtagcgacaaggtcgctgctgctgctctgattcgagaacacggagctgaagctaccgcgtctgggcagctggacattggagctcaggagcgtatgatcatacttctccggatgaatggagctgtgtgggtggggaatcaagggtggggcgggaacaagccagattgggggattgggaggcaattgttggtttcaaggtttaaaaaatctgattgctttcgggcttattgggtagtaaagtacatatgtgtggcagcttaagagtatatttttcagattatatacaaagatgtgcatgattttagggtaagcttacaaaacgtagatcgaatttgtgttagcaataacatatcaagtcagttccggtttattgaagcacttatagagatagcattaagcaaaggatcaattatattgttaatataaacttatagggcaccagtcacaattcagatgtcgttgtttagggagcttgatgacgatgtgattagatgacattgaccataatgatatagaatgaatagacattgtacaaaagcttcaataaaggcacttacctagccatctcgagctccaggcgaaggccaatgttcacgcacatatacatggactccggatcctcgcggatgaatacgtttaccagaggcttaccaccatccatggccacaaccttcagctgcgggagaaaatggtgttacggattcgacaagctttcaaaacatccctttcatataaaacacttacgagagcttcggtgcgccaaggtatcagaccacgcaggcgatgaagcatatgacctccgatctctggaacgtcgtgcaggcgaacgggtatcgcctgtggcgggaacgtagccagagctctgttgtttgcctccaggcggtagatattagagatgtgcgccttacgctgccgtccatcgtccacgtagtagacatcgaaggactcttcgtccggattcagtggtctggtgaccagtcgcccgcggaaccactgcttgacgccatcgacagtctcgtcgcacacgaatatatggcggtcgtggagcagatccgaatagctcactcggtcctgctcgcccaaatcagccacagtttgcgcaatactgcgctccacaaacttaaggtcatcattgcgtagcagcaccattagatcaccatcatcgttgatgtgagacacaagaatgggcgtggtcttgccgatcttcttttcatcactcagcgatggtgccggcgtgcacttcgttattcttttcgcaaccagatcgttcagatgaatgtcctcagccgttgaggtgtcgtacagcgtggccaccaagcacgcccgacgcttaccgttctccaccacaccctgggcagatccacccagttccaggaactgcttctccgtggtgagcacatgggccacaaccgtctggccgtccagctcctttgttaaaacctgcagagcgtgcggatgatcctcgaacttatccaacgcatacatgctgaggcacacggcctgggccgggagcgccaagaactgcggtggacagtggaagagatcttctgaatgaaacattgccacatcgccaaagtcgataaagtgataacggcccgagcgggtctcctcatccacagaaattgcacgaacacgattccagccatcgggcatctccactaaatagacttcctgagcgtaaggtttagagaccttttgtcggaaatgcggagactccatttggcgtccaatatgcttcgtcagttcctcaaagtttgcgatctgatcgatcatccgagcccacactatcttggtggagtcgcagaagctgatgaacatgttccagtcgtgcgatcctccttcgcttgactgccacggcagcaccatctgtggcagggtggttatgctggtgcggtccggctccgatgaaccaggatcgttggcaaacaatatgatccttggatcaatgccgtgctcaacacgaattttatttgacttcacgatcaaatcgtaccaatgactgggcagatgttgccggaaggtgctgccgtaccaatcctccagcttgtgacccaatatgccatgtgggtgctttaacagctccttgtacaatccatcgataaactccacatcgctaaatgtgcaagcagaaagcttttggtgtgactgggcatgcatgatgcgctggatggcgatctgtgctgtgcgttggtatgctgtctccttatcggtgaactcctgcggatagctactgtaaacatcgccagcgatttgcactgaacaatgtaggttccgtagcttgttgaatatgttgtatgcaggtttctcaaagtcatttgccgcgcaatagaagttgagcgtggagacgggatcaagtgagggatcgaatttaagtggcaccttaacttttggatttgtaacgacattgcctgtttcaccttgacctccgtggatatcttctttgtacgtcgctttagcggcggttgtcgtttgagcgtattccggcgaagctggcggcgtgatgggcgctaccgctggcgtgggtgcatccgattgcggcgttactttcaatctgtgattcacagagacgcccgtggtgcgctggtgaccagggtacattactcgcggatgacgtggccgcttgaatgaggattcagggctgtgatagacggtgcttgtatcttgctggcgctgcgaagcactgttgcccagtatggcacgcagcggaggtttgccgtcattgtgtttgtcttgtccgttagccactttaacgtgccttggtccatgtccattcatgactggtgcctttttgttctcaattgttacgaagatcgtttccgtcacagcccgatcgcgggtttctttttccttctgtttttccctagcgacttccttcgttatttgaccacgatctagatcgtcttctttcttaagctctttctttcgccttgtgatatattctggatttttgttgaaaacctgcaggttttccgaaaacggaccttgaatattattgaaactttcaaacagctcttgggttatgatgcccgttagatcttgtttatgctcggctatagcctgattctcacacttagctgctcttcctatttcttgatccggctgatgattcggctgcttattccgttgctggtagtggtacttattgccgtgagtgtgcttctgggcaattggcttgggcttctgggcaattggagtgggcttcgataagcttgtggacttgctggtcttctgctgacgtaccatacgcacaatatgttctgtgttagcgttatacttcgctgtgatgaacacctgttgcgggatagatgtgaaggtaattaattttgaaactcgcattatgctgcatattatgctacttgtattaaatgcttatctgtttccctaatatctgtatgtatataatatatattaggtatattaggagaacttaagatgtaaatccttttgacaatctttctaatgcataagttccggttattgtatacgacgacccttaaccaggaaaccctacactgtatacatgagctaccacttctagaaaggggaaagtggctctgctcgaacaactcttgagtttggaaatccaatatgctccatttaactgaagagtcagctattttacagccaagcccagtgagtccacttaattgtttggaaatccgagtggattgaagaagttgagtttttgtttatgattcacattgagtcgagctgtttcgctgctgcaatcatctttatagggtcacagcgatctggatatgggcagggggttttcaagccccaaacgtgataatggtgcagagcgagagctcggaatgctagatacagaatacataattacaattaaatgaataacactcgttcgtttggctcgtctgattattgatttggcaagcaatgcaaaagcgttggccggaagagcccgcccatccaaacgcccactttcgcccacaggtgtggaggcagacggctaaacaagaataatgcacacagttcaagtgcaatacggccagatggggactggcatttatagagaaaaaatcaaaacatacgactgacgaacgttcgttcactttcaccatgcaaacatgcaatcgcatacgaacgaacacacaggcaatttgaaattgctggccttttcgattttcgcgttatacacttttgttttcgactgtcgttgcacttattaaagcaaagcgcttaatcagcacgcatttgtttaatatgtacaagtgtaccaggcgaaatcgaaactagactaagtaagatccattgtttacacttttcacggcgcagatgaaaagaagaagacgccgttgacacgttgccccttcagcggcgggcggccccttttcgacggagagagcgggcgggaacggtccgtcgagcggtcggtcacacagagtgaagcggtaaggtagcagcgcagcagcagcggctcaccgcacgcgttcagccagagaatcgaactgaaagcggtgggcgccgctcgcgaaaagctcgatagtcagcggcgatgaccacctgtctaagttaacgtcagatctagcggtttttatggccatattagtaattacaaactctcattaaaggtgaaatcaaaacggaactagctaaccatctccttttcctaaattcagtaacactgatttctttaattccagtattctaattaattaaaatacattgaaaagaaagtaaaaaatatctagctagttttagctaacagctatggtgacaccagcagagagcaactcgaaagctgcgcacgtgagagaggcacccagagagcaagctcaggcgaagtgggcaaaagaaagcggttaaagtgggtggaagagagccgctcactccctgacatttgcgatatgcaataattcgcaaagaatcttgccaacaatttaggcaacaggcgtaacaattggaaggacggagatggcacttacctgattaccgctttggtgaaagttgaattgattcgaatccttaagcagctcttggtcattcgagtagcccagcctgcgaaagggtatcggctcaccctcaatctccatgtaatctgcgacgatggaccgcagcgtaaccggcggcttagctgacgtgattagggccctgaccaccttggccacgtattccaggacctcctgcttttccattatgatcgttccacgattctgtcgaagagagcgagaggcggagagaggttaacccattgagcatgattcaagtggcgtggaatgcgtgcgcccaccgccacccccactcccaaatcagcaacaattaagcatgcacagaaaaaaacaacgcggcaaaaagaaatttctaatatactatttctaaactatagggtctaaagggttgaaagggtctaaattattctgcaaacattgagttgcgcctgttccgcgttattctttcagtgtgcacaataaaattggcaaacacagggctagaaaaataagacggacaaggggcaaaaaataaagagaatagagacgagaaagagatggacgaaagcggcggcgcagacgcagaattaaattattttgatctatattttagaatttgatttcgtttgtgcaaatacaaagaatgtgtcgtaatgcgatattgtgagttttctgtccttaccaaactattaaacaattaataaaaatcgagtctcagcaagatatgcactgcaaactgcataaatgagactattggggttttcctgagaaatgaatattccgatgatcccgaacgaagttccttttaacacaacaatacgggagttcattctcgcttgacgtttctaaaattttcggcgccttctagtgagaccgtgggctggatgtcaaaaaatacgtcaagtggcatataaatacgaaaagctataagcaagcactgtcttagggttaacgtattggcgccaaaattcaaacttcttatttttaaaatatatttaagtgttgaataaatgtttcaataaaactctgttaatatttatacaaatgacttaataaaaaactcctgcaatgggtagctttttagtctgtgtctgcttttccatagcgtacaacttgtgttttttcttctttcttggtctcaattcaaatgtattgcctggatgcagttcatcatcgcttgtgccctccaattgaacagcattcatttgtgctcgcggcgacgagctaagagaatcctttctgggaaaggaggacattggcttgactaccacgctcaaggcttccagattgatacgtctgttgtcgtcggaggtttctggttccaaaggagtaaaaggctccatggaatttatggacttcagtggctttcgaggctcctgaaaaggttccaggcgtgcagcagccgccggagcaacctcaaacctctttggcttcattggcctccttagcttcatctgctgctggtgctcctcccacacccgatcctgcagtttcaactcctcctccttggccactgccaagtcgtacaagctctctttttggctcgctggtcgaattccaaaggaaaataccctggatggtggccttggctcgggtttttcgatacgttcagacgtctttgttgttggttctttctctttaacgtggttctccgatacatcgtcgtccgttgagtgacttagcagttccaattccaggtagttgagattcttgagcaccgatagggcatgctgcttggtggccaaaatgatttccagcagcaccttggcacctcctagcttttgagat

SEQ ID NO: 19016 - DNA, 4321 bp, DROSOPHILA
atcatcggaatattcatttctcaggaaaaccccaatagtctcatttatgcagtttgcagtgcatatcttgctgagactcgatttttattaattgtttaatagtttgaatcgtggaacgatcataatggaaaagcaggaggtcctggaatacgtggccaaggtggtcagggccctaatcacgtcagctaagccgccggttacgctgcggtccatcgtcgcagattacatggagattgagggtgagccgataccctttcgcaggctgggctactcgaatgaccaagagctgcttaaggattcgaatcaattcaactttcaccaaagcggtaatcaggtgttcatcacagcgaagtataacgctaacacagaacatattgtgcgtatggtacgtcagcagaagaccagcaagtccacaagcttatcgaagcccactccaattgcccagaagcccaagccaattgcccagaagcacactcacggcaataagtaccactaccagcaacggaataagcagccgaatcatcagccggatcaagaaataggaagagcagctaagtgtgagaatcaggctatagccgagcataaacaagatctaacgggcatcataacccaagagctgtttgaaagtttcaataatattcaaggtccgttttcggaaaacctgcaggttttcaacaaaaatccagaatatatcacaaggcgaaagaaagagcttaagaaagaagacgatctagatcgtggtcaaataacgaaggaagtcgctagggaaaaacagaaggaaaaagaaacccgcgatcgggctgtgacggaaacgatcttcgtaacaattgagaacaaaaaggcaccagtcatgaatggacatggaccaaggcacgttaaagtggctaacggacaagacaaacacaatgacggcaaacctccgctgcgtgccatactgggcaacagtgcttcgcagcgccagcaagatacaagcaccgtctatcacagccctgaatcctcattcaagcggccacgtcatccgcgagtaatgtaccctggtcaccagcgcaccacgggcgtctctgtgaatcacagattgaaagtaacgccgcaatcggatgcacccacgccagcggtagcgcccatcacgccgccagcttcgccggaatacgctcaaacgacaaccgccgctaaagcgacgtacaaagaagatatccacggaggtcaaggtgaaacaggcaatgtcgttacaaatccaaaagttaaggtgccacttaaattcgatccctcacttgatcccgtctccacgctcaacttctattgcgcggcaaatgactttgagaaacctgcatacaacatattcaacaagctacggaacctacattgttcagtgcaaatcgctggcgatgtttacagtagctatccgcaggagttcaccgataaggagacagcataccaacgcacagcacagatcgccatccagcgcatcatgcatgcccagtcacaccaaaagctttctgcttgcacatttagcgatgtggagtttatcgatggattgtacaaggagctgttaaagcacccacatggcatattgggtcacaagctggaggattggtacggcagcaccttccggcaacatctgcccagtcattggtacgatttgatcgtgaagtcaaataaaattcgtgttgagcacggcattgatccaaggatcatattgtttgccaacgatcctggttcatcggagccggaccgcaccagcataaccaccctgccacagatggtgctgccgtggcagtcaagcgaaggaggatcgcacgactggaacatgttcatcagcttctgcgactccaccaagatagtgtgggctcggatgatcgatcagatcgcaaactttgaggaactgacgaagcatattggacgccaaatggagtctccgcatttccgacaaaaggtctctaaaccttacgctcaggaagtctatttagtggagatgcccgatggctggaatcgtgttcgtgcaatttctgtggatgaggagacccgctcgggccgttatcactttatcgactttggcgatgtggcaatgtttcattcagaagatctcttccactgtccaccgcagttcttggcgctcccggcccaggccgtgtgcctcagcatgtatgcgttggataagttcgaggatcatccgcacgctctgcaggttttaacaaaggagctggacggccagacggttgtggcccatgtgctcaccacggagaagcagttcctggaactgggtggatctgcccagggtgtggtggagaacggtaagcgtcgggcgtgcttggtggccacgctgtacgacacctcaacggctgaggacattcatctgaacgatctggttgcgaaaagaataacgaagtgcacgccggcaccatcgctgagtgatgaaaagaagatcggcaagaccacgcccattcttgtgtctcacatcaacgatgatggtgatctaatggtgctgctacgcaatgatgaccttaagtttgtggagcgcagtattgcgcaaactgtggctgatttgggcgagcaggaccgagtgagctattcggatctgctccacgaccgccatatattcgtgtgcgacgagactgtcgatggcgtcaagcagtggttccgcgggcgactggtcaccagaccactgaatccggacgaagagtccttcgatgtctactacgtggacgatggacggcagcgtaaggcgcacatctctaatatctaccgcctggaggcaaacaacagagctctggctacgttcccgccacaggcgatacccgttcgcctgcacgacgttccagagatcggaggtcatatgcttcatcgcctgcgtggtctgataccttggcgcaccgaagctctcctgaaggttgtggccatggatggtggtaagcctctggtaaacgtattcatccgcgaggatccggagtccatgtatatgtgcgtgaacattggccttcgcctggagctcgagatggctagctccattcatccggagaagtatgatcatacgctcctgagctccaatgtccagctgcccagacgcggtagcttcagctccgtgttctcgaatcagagcagcagcagcgaccttgtcgctaccactcccccggtgacgccagagaagaaaccatccgcaagatcgaccggcagcaccttttcgtctctcatgctcaaggattacgaggctattccggcagtgggtgcctatttcgaggtgcgcgttgccctctccgtcaatcccggtcactttgcggtgcaaccgtacaaatactataaccagctgcagactttgatgaagaatttacaagagcattgccaaaagacggcagccaagggagtgcagccttcacaactggccattggagaggcctacgctgcccctgactccgaaggcgtatatcatcgcgtaagtattcacaagatttacgatgagattatacacgtgcgtttcgtcgacgtgggcgacgatggagtaattgcctgtgatcaactgaaaactctaaatccggagttaagaaagctgcccaagatggcattgccagcacaactttatggcaagttcaagagaacttcagcagtttggctatggagcaaggagaactgcgtccgattccgggaactgtcgctgggtcagaagtttattggcattgtgcggcgaatgactaaacaaaaggatggcggacgagcgctgtgcctggagctggtggacacctccacgccgaaagatattaagctgcacgagattctcatcaatgagaagcacgcacagccagcaacataagaagtctgagtcggaggagacgatccatttaaatttgttcatgtttatgtttgcgtaatcctagttttagaattaggaatatacatataacttattacgacgaaacattccgccagatggaaccgataatagctaataaactgatgttttttatcgagagaacggatgcacttgatttgcggacttgatgtttgttttcacagccgatggcgcctttcccagctgctgctgcacgttgccgggactcatagcgggtccacccattggcgagggtgctcgaattgaaggcggtaccatcatgccaggtccgggtccatagttggtcagcttgagtccttttcccatacccacggcggccaccaggagctgtgtgtcggccatgctactcgtctgctggatgccggtgcgcgaagagctctcgatttcccactcctcgcgcgctttgctgaccatatccaggacgtgggagacgaccttgttgtattgagtgacctgtttcatggcagcgtcgttggtgag

SEQ ID NO: 19017 - protein, 1139 aa, DROSOPHILA
MVRQQKTSKSTSLSKPTPIAQKPKPIAQKHTHGNKYHYQQRNKQPNHQPDQEIGRAAKCENQAIAEHKQDLTGIITQELFESFNNIQGPFSENLQVFNKNPEYITRRKKELKKEDDLDRGQITKEVAREKQKEKETRDRAVTETIFVTIENKKAPVMNGHGPRHVKVANGQDKHNDGKPPLRAILGNSASQRQQDTSTVYHSPESSFKRPRHPRVMYPGHQRTTGVSVNHRLKVTPQSDAPTPAVAPITPPASPEYAQTTTAAKATYKEDIHGGQGETGNVVTNPKVKVPLKFDPSLDPVSTLNFYCAANDFEKPAYNIFNKLRNLHCSVQIAGDVYSSYPQEFTDKETAYQRTAQIAIQRIMHAQSHQKLSACTFSDVEFIDGLYKELLKHPHGILGHKLEDWYGSTFRQHLPSHWYDLIVKSNKIRVEHGIDPRIILFANDPGSSEPDRTSITTLPQMVLPWQSSEGGSHDWNMFISFCDSTKIVWARMIDQIANFEELTKHIGRQMESPHFRQKVSKPYAQEVYLVEMPDGWNRVRAISVDEETRSGRYHFIDFGDVAMFHSEDLFHCPPQFLALPAQAVCLSMYALDKFEDHPHALQVLTKELDGQTVVAHVLTTEKQFLELGGSAQGVVENGKRRACLVATLYDTSTAEDIHLNDLVAKRITKCTPAPSLSDEKKIGKTTPILVSHINDDGDLMVLLRNDDLKFVERSIAQTVADLGEQDRVSYSDLLHDRHIFVCDETVDGVKQWFRGRLVTRPLNPDEESFDVYYVDDGRQRKAHISNIYRLEANNRALATFPPQAIPVRLHDVPEIGGHMLHRLRGLIPWRTEALLKVVAMDGGKPLVNVFIREDPESMYMCVNIGLRLELEMASSIHPEKYDHTLLSSNVQLPRRGSFSSVFSNQSSSSDLVATTPPVTPEKKPSARSTGSTFSSLMLKDYEAIPAVGAYFEVRVALSVNPGHFAVQPYKYYNQLQTLMKNLQEHCQKTAAKGVQPSQLAIGEAYAAPDSEGVYHRVSIHKIYDEIIHVRFVDVGDDGVIACDQLKTLNPELRKLPKMALPAQLYGKFKRTSAVWLWSKENCVRFRELSLGQKFIGIVRRMTKQKDGGRALCLELVDTSTPKDIKLHEILINEKHAQPAT

SEQ ID NO: 19018 - DNA, 9487 bp, DROSOPHILA
aaatttgcattctattgtgaaatgtggctgcatgcggttgccaaaaataattttggtgacattgcacttctataaataggaaaatcgattcatttccctatacatttgtatgggaaccccttttcgcctttttcattgtcacgtgtctttcatttcagcttttcttgtgttttgattgcaatgcgctttgttttgttgaaattaggtggtaaacaaatgggaaatatgataaacatgtttacctacttgctgtttagttataaatgaagggttatatagcatatatattctattatatgctatacacatacagatgtacatattcatggttaaacgagcgattagtcatagatcttattaatggtcttatgaaatatttgccgtggaaacgtaattttgaaaagttaagaactgtttaaaaggttccctaaattaccacccaaaaaaatattatgaactaatccctgcgttcgagacattcatgtttccgtttttattcaataatttttacatagagtcatcactgttcataattttgcagcgtattgatttttaggattaacaatttttttgtaatggggcaatacgtatgtaacaactacaaatttttcgactctagtaacactgatgtctcctattatcgaaaaacagtgtctatatatatatatatataaaaaaagaaacaaagagttataaagaaccatcaaaatgccaaatggatgaaagctatcgttttcgtagcttttttgaagatttttggaattttcgattctggtcgttttcaaatggtacgattttaggggattagagttttccgaattcaaaaaaaagtctccggggaggagcatcgatccaccaggtgtgtatgtgtgtatatataatgttgcatatttgtagtgttcactgctcaatttggaattccgcttcaaatgtggatttgccttcgattgtctgggttttatgggtaaaaacggatgatataaggggtcatcatctatcttcagagctttccggtctttgtggtctgcgggccaagactttcccgggactttttcttgtgcagcacgctgggcacctgaacctttggactgaccaccggttgcttgggtggcttcaccttcttggatgatcccgccgccgcggcggagctgcgcttggccaggaagtaaccgtccgtcttgtccttggtgatgcacttcttgccgggatatgctctcctgcgatagggggtgatcgcgtcgtacattttgcttctgaccacatacgcctgcttccagcttgaggccacctccttctctttgatgcgtggcttgtcgagatccttgaagggatcggccgccttgctaatgtccgctttgctggtcacatgaggcagtttctggctcgccactctgtggtagtcagtggccgatgatggggacttcggttcggatctgggcttggcttgggccttgacgatggcctccagggtggaggtattcctcaccaggcgccgctggtaggcgtgctctttggaaggcatacccaccaaatttgactttttggcaggcactttccgtccattgtggtcccaggtggcggcactctgacggatcacagtgattagcgatggcttgaccacatcctccacaagacgcggtcgcttggcgccatccctacgatgcagcgttgtcaccggctggcggggcgactcctttacctccagattgaccgcaaggatgagggaatttggcctgacgggatgcaggtggatgaactgctcgcgacgcagcgatacatagcactttccctgctcgaggagctgtcgtgtgggtgcattgggttgatagccaatccgaaaggagtcctctggctttgacacggccagaagatcggccagatgctgtttgagcaatgcccgctctggagctcttttggacatcttttggccgcctccgtggtgacgatggtgggtatcctggtcctccgtctcctctgcttgcactgcgttcactgtccgcctgggtctgtagaccagcttcttggtgatcagcctatggtgcttgttccgcgcctcctgggccatcataaccgccgacttggccgccctgatcctaggcattcgtaccttattgctgttggtcacctcggtgcgatgccaccgggtgatctcttcttttgctcccaaaccatctgaaaggataccagatatggaatatacaatacacactaaccatcctaaatatatatatatatatataatcctaaaatatttatatagcggaaaggttacccaaatctgcactttcggaatccgaatgtgagatgtgatatacctaataaatgtttttggataatgcatgaactgctacctggcatctctcctggccatccggcatgctcctggcgctggccttgtgactggcgtgacgcaggtgctcctgctcgccgggttggccctggaagacgggcactggctggtgattggacgatctccgccagccttcgagctcggaaacgacgtgatacctcttggcgccggaacgacggctgcgatatcttctgtgattcccgctgaaccaggtttgtgtcgtcatccgaacggatggctgcgtcttcatctgctgctcgagattcagcagttggcgatcccggtcggtgacactggtggtttgccacttggtggccagttcgggtgtcatcagttcgctgggtacgtaggcctgtcgatgtcccctattctcctcctcccgctcggagtagtcctgctctcccatcggcagataaaactccgagcactcgttgcgtagacgactgccatcctttcgcctctggagctgatgctcctcttcctcgctctgctctttggtaatcctcagctgggggactgcccggcgttccacctcctcgtcctcctcggcaggacgcagtcgaggtacatagtgacgcttgctgagcacaccggtccacaaattcgacgagggcaggagcagcggtcgcatcgaggactgacgccaaatgagcaattcgcgtccatgcagcgttttgggcgcataacgcgtcttcaccgacaggacgcagctggtcaatcccgcatgctcacccttcttcgccaggcagcgacttaggaagctgatgctttggacgggcagtttgcgggcgtggcgggtgctgtggttaacatgtggccgccactggtgacgggtgctcgcatccttgcgatcgatcagcgacgttaggttcggcgtccactggtacttcacctgatcggcctccaccatctgcgccaccagcctacaaaccgcactgctcttcccctggtaatcacttcgggcagcctttagcgccgataccaagctggacacttgaacgtatttaggattattagttaatctttattaagttggaaaattgtttaagataaaataattggctgagtgagctaacaaggcttatatgcatatatatatatatagctaataatatggttattataataaaaaaaaaataattttaaaaagttagctgtgggctttgaaggtaaagttaatatagaacctaataagctaaaaagtatcttaatccttatcgttcctaaaatgacctcctactgcaattacgtgctccaatggcagaacacagccacatttacctatctgccactggccagatcctctccagacttacgcactcacccttaagaggccgcagttggcattctgtctgagccactaagctcttcatgttccaggcaaatccttttgtgtggttttgaatgtagaaaaaaaccttaaaacaaaataaaaaaaaaaacggaaacacaaatattttggataaatggatgctatcgcctcggagctgtttagttgactgaagggtgacaagtgctgtcagttcggagttcagggcccactcagtgctaacgatactctacacacaggatgctatcggattatggtccagaaaatatatatatattgcagagctcgcagaattacttttttagcttaagctaccacacacatggccttgtgttcgattgtctcgctctttttggcgttcgccacattgttgcacttaagattactcgactttgatctaaaataacctaatctagatgcagtttaagatctagcgttgtctcatgttacaattgacaatataatgcttaaccacatatattaaaactacacttaacatttatatgatacaaataagagaataactacagcagaacgtgactacttggatttggaccgcttgcgcttgtgcttactggcatgtttgtggtccgatgcgtctctcctcttcctcgacttatgtgacctgttgagctcgcgcagggtgtgacgctcatcctgacgctggtgaaacctcttcagaacagcctcagccttgctcgtaatctcgtcgaaatccagttgttgcacctccgcttgtgatgatggctgcttctccagcatctgggcattctcttcggcgggaacgggctcgtaaatctgaggctcacgaaactcatagtaccatgcgctcaggaagcgtctcttcagcgttttcgtattgtacacaattccttggggcggattcctctcttgccgcagtatgtattgcattcgttcgccagcgagatattccacaaagttcaagtagtcatccgtgtcgtattgcagaattttaatggcctggagggcgatctgttccacgcagtcttcctgctgacttatctgcgcgtagtccaacacccactggcattgggcttcggccagggatgaagacctcggcagtaccggcatctttggaagtttacagcgctccaaaagctggacaatacgctgacgtcgctcgggcaagtgccaaccgggttcaaagtgctccaagcgattggtgtttagtgatgattcgatgggcagtggctgcacaaagacacgcagctcctcgggaaactggggccagtcgcttaaatcctcgccggctaccaattgcaggcggtgcactgcctcgttaaaaaggtccacacaacgctgtggattcagctgagtgtcgcttctaatggccgtatcgtgctcagcggcgtattttaggcggcgaaatagttccgatcccagattaacgagcaaatactcgcgggtctccacttggtgaagatgtccaacacgtttcctttccgtggctttggccaaaaactttacagccgattccagtgcaatcattaagcgctggcggttgtttccagattttcgcaaacgaaagatgttaaatgagcgcagacatagttcctggagaggaatatcaggttgaacaaaggcggtattagctggatgctgaacaattacagccacatcatgacagcggcttgcttgcagcaatggtttcaagcgatccggcagtaaacgaatgtcatccagcccgattaagcaaataataccattggcttcggccaggtcggtggctttccagtcgtggtcatcatctcggatcttcatcacactcaagccaataccctgagagaagcctctgatgtagcctccatccacaaaacgagcatccggcgactgtggctgctgcagtagtcccctatccaaatcgcagttcaactggagaccctcctggccgccggacaggcttatcaatagcttgtagaagcgtctagctcctggttgcgctaccggcagacacttgtccaaaacgtgccacagatccagtttcagccaactatgctcctccaggccagccagaagtttgccataatcgcagggctcgccaagtcgatagcgtctgcttagacgcagtgaatcttccatgcttcgtttgttcaccactccttcggggttttcggctccaaaacttaaaggcagttggttaaatagcgtgtccttctcctgttgcgttcgccgatatttccgccatcgtctgatgcacaccctcatgacgcctagttcgtagatggattgctccatctgccgctcgacgagatcgcgtgttattgagtccagcatggattcgtaggaacggcaagcccgactatgcgacataaactcgctttggcaaatctccgcgagggtgtcctggaatatttcctgatacaactccaaagtcctggtctgtttgtgggcctccctttcctgctgctgcacaaaaaacaactgttccagtttcagttgcctctctttttccagctgaagtttctcctgctcccgctggcgttgttcctccagttcctgctgctggcgacgctgctgctcctggcgttccctgagtttctgctgacgcactcgctcagcctcggccactttggcctcgtgaatagccattagctcagcttcccgcttctttgcagcggcaatggctacttggagggcctgatgcttggcctcttcttgtgcccgtcgctgctgtgtagccggagcttgttcctggaactcctgagcacgtgatttgggaagaacaaaactgaatccatcgatggaggaggctggcggaacagcagccgcagcaaatactccaaaccctgctgccgttccgtcgggttgcatgggcaccttaaacaaagtatcgctatgttttgagactgctggtggctgcgaaggcatttgtggctgcatctcctcttgctgcatgccagccagctgatccttggccgtccatgcaatgctcttaagcattccataatcgtcgaagctattgtgcggtcggtgattgaggtagaggtctcgtggtggtaaaggttccccactgacgacttcgcccacgctcttcacgcgtttcacttccaccaactggaagtggataataaaaatcaaattaataaaacaaaaaaaagaaaaccatttacttacctcatactgtcgcggcagcttgtactccgtctccaccgtgtgcattctgcttagcacaactctgcccgcctcgttgatctgcaggccatagtgttggacaaaatccgccgcctcctgttcgctggcaaagctcagcagctcggcgatgtagctgagaggcagcgaagacacctcatccttccgcggagacctatacgcctggatcagacgatgcaaccccagcacgcgcagtcgcgtaaagtaattgactaggatgcaggcactcaggtagctggtatccttgtcagccagcagctgaaagaaccgcacaaaattcgtgtcctgcagggccaagtagaactgaatggcttgacgcacttcgggacaactctgcagttccgcgggcagctgaccgatgtcccagagaaagttggcatcggccagattgagcaacacaatgtagccccggaattccgcctctttgggacatggaacgcccttaatccgcaggtcatggtacatgtacttcagagtctgcaggcatttggttagattctcggcgttgatcttgctgtcaaagacgctgggatcggcgtcaaccagacgggcggcgcaatgaatgtgaaaccgggcgcactgctccaccagcttcacagcgcccagagagcatagctcctgctgggtgatctcctttcggatggacctcgtgcgatcccaaacgaagtggaaccaatcgcccatatggctttgcggatcctggcgctcgctaatgtccatgatctcatgcattagatagctcatggtcatgtgcagggcagtctcattgcgcagttcatgcggcagtggcgtctcctggtcggcactgctgcgcgagtactgcttcagggctctttcgtgacagattagctcatcggagcccggttgtagttcatagtaggctacctggcgctggaattctctcagcacgcgctccttttccggacacatatcggcgcagtgaccctgggtggcaccggacagcttgtgttgcgttcggttcaaccggagcagcttatcgcgggcatccagcacgctgaacttctcctcgcttgtatgggcgggtctgcgcatcatgttctcaagatccctgagctgggcaggcgtacgatctctgctcaccggcgccgttgcgggcccaactggtatggcaggcagcattgaactgccaccgctaccactgctgccattttgtggtttttttatcggcttgcccgacccatactcattgcgccagcccgactgcagtgcactcaactccgcctgaatgtcaggatccacccactcctccgttttctgtgccggcgccgtctcgttatcagcataggatatatcaaacaggtgaccctgaaagctggcgccatcgagaagcgcccgcgccgcctcgtcctcgctggcatagcttacggtgcaggtcattcgccgcggacgcaggacgaagtttacgagggttccaaaacgtccaaagtgcgaacgcgccacatatttgtccaaaaatagctccggaatgtttctgcatctggggattcgtatggaactatagttgacatcgctctgcctttgatgaacgaacttttactcacaataatgtcttgtagttgtagccgccgggacggggttctgccatcgatcgaatatagtttaaggtttttagtttcttttttagctgaatgagagcgaatgtgtgctttgttgttacaatattgccgtcaagcgattgccggtaatcgataacgcaaatctgaaaatggcgcgaaaaaaataccgcaatggctatcccacccacacaatatcgttcaggtttaattgaaaattttaatgttttacattcgagatgaatgtatttgcctaataaataaaatgttaacaggagttggtaaacatatattcttaggaaattaggaaatgcttggggcgttccttaaactgttgaatgaaatcgaacatcttcttatattatcttatatatatatgaatatatatataggtgtagcaatctttttaagttctttttattctcttttaagctctcgattcaaactcctcgatcttgataacactatctgtcgttcttaggactatacaattaatcctatcgaaattggttgttcctagtattttatatttatacatagcttacataagaaatattttcatctttacactttaatattttaagacgattaattacctcttaatcaatatctctatttaataggctgacttatataaagcaatgcaaattcaataaaacttattgcagaattagatggcatttagcccaatccctgattttaaaataagcgggagataacgagcagtagtgtgaccgcccagtaaagtataaccaaataccgcgaagaagccaagctgctgttccgatagtatcgatgagcctgccatccccagaattttggtcatttgttgttgctcgccagggcgaattcgaactcgaagcgcagtaatcaacgcgctgctcgtggattttttttgcatttttttgagttcaaatagttcgttaataagagtggcggtcaacgatactattccacttgcaatcgaaatatgaatagttgaaagtgataaacaacaagaaagaagcgacgccaacgggcgaaaaaggagataaccgaaaacgaaaaacacgacaaaagcaa

SEQ ID NO: 19019 - DNA, 6399 bp, DROSOPHILA
aaactaaaaaccttaaactatattcgatcgatggcagaaccccgtcccggcggctacaactacaagacattattatgcagaaacattccggagctatttttggacaaatatgtggcgcgttcgcactttggacgttttggaaccctcgtaaacttcgtcctgcgtccgcggcgaatgacctgcaccgtaagctatgccagcgaggacgaggcggcgcgggcgcttctcgatggcgccagctttcagggtcacctgtttgatatatcctatgctgataacgagacggcgccggcacagaaaacggaggagtgggtggatcctgacattcaggcggagttgagtgcactgcagtcgggctggcgcaatgagtatgggtcgggcaagccgataaaaaaaccacaaaatggcagcagtggtagcggtggcagttcaatgctgcctgccataccagttgggcccgcaacggcgccggtgagcagagatcgtacgcctgcccagctcagggatcttgagaacatgatgcgcagacccgcccatacaagcgaggagaagttcagcgtgctggatgcccgcgataagctgctccggttgaaccgaacgcaacacaagctgtccggtgccacccagggtcactgcgccgatatgtgtccggaaaaggagcgcgtgctgagagaattccagcgccaggtagcctactatgaactacaaccgggctccgatgagctaatctgtcacgaaagagccctgaagcagtactcgcgcagcagtgccgaccaggagacgccactgccgcatgaactgcgcaatgagactgccctgcacatgaccatgagctatctaatgcatgagatcatggacattagcgagcgccaggatccgcaaagccatatgggcgattggttccacttcgtttgggatcgcacgaggtccatccgaaaggagatcacccagcaggagctatgctctctgggcgctgtgaagctggtggagcagtgcgcccggtttcacattcattgcgccgcccgtctggttgacgccgatcccagcgtctttgacagcaagatcaacgccgagaatctaaccaaatgcctgcagactctgaagtacatgtaccatgacctgcggattaagggcgttccatgtcccaaagaggcggaattccggggctacattgtgttgctcaatctggccgatgccaactttctctgggacatcggtcagctgcccgcggaactgcagagttgtcccgaagtgcgtcaagccattcagttctacttggccctgcaggacacgaattttgtgcggttctttcagctgctggctgacaaggataccagctacctgagtgcctgcatcctagtcaattactttacgcgactgcgcgtgctggggttgcatcgtctgatccaggcgtataggtctccgcggaaggatgaggtgtcttcgctgcctctcagctacatcgccgagctgctgagctttgccagcgaacaggaggcggcggattttgtccaacactatggcctgcagatcaacgaggcgggcagagttgtgctaagcagaatgcacacggtggagacggagtacaagctgccgcgacagtatgagttggtggaagtgaaacgcgtgaagagcgtgggcgaagtcgtcagtggggaacctttaccaccacgagacctctacctcaatcaccgaccgcacaatagcttcgacgattatggaatgcttaagagcattgcatggacggccaaggatcagctggctggcatgcagcaagaggagatgcagccacaaatgccttcgcagccaccagcagtctcaaaacatagcgatactttgtttaaggtgcccatgcaacccgacggaacggcagcagggtttggagtatttgctgcggctgctgttccgccagcctcctccatcgatggattcagttttgttcttcccaaatcacgtgctcaggagttccaggaacaagctccggctacacagcagcgacgggcacaagaagaggccaagcatcaggccctccaagtagccattgccgctgcaaagaagcgggaagctgagctaatggctattcacgaggccaaagtggccgaggctgagcgagtgcgtcagcagaaactcagggaacgccaggagcagcagcgtcgccagcagcaggaactggaggaacaacgccagcgggagcaggagaaacttcagctggaaaaagagaggcaactgaaactggaacagttgttttttgtgcagcagcaggaaagggaggcccacaaacagaccaggactttggagttgtatcaggaaatattccaggacaccctcgcggagatttgccaaagcgagtttatgtcgcatagtcgggcttgccgttcctacgaatccatgctggactcaataacacgcgatctcgtcgagcggcagatggagcaatccatctacgaactaggcgtcatgagggtgtgcatcagacgatggcggaaatatcggcgaacgcaacaggagaaggacacgctatttaaccaactgcctttaagttttggagccgaaaaccccgaaggagtggtgaacaaacgaagcatggaagattcactgcgtctaagcagacgctatcgacttggcgagccctgcgattatggcaaacttctggctggcctggaggagcatagttggctgaaactggatctgtggcacgttttggacaagtgtctgccggtagcgcaaccaggagctagacgcttctacaagctattgataagcctgtccggcggccaggagggtctccagttgaactgcgatttggataggggactactgcagcagccacagtcgccggatgctcgttttgtggatggaggctacatcagaggcttctctcagggtattggcttgagtgtgatgaagatccgagatgatgaccacgactggaaagccaccgacctggccgaagccaatggtattatttgcttaatcgggctggatgacattcgtttactgccggatcgcttgaaaccattgctgcaagcaagccgctgtcatgatgtggctgtaattgttcagcatccagctaataccgcctttgttcaacctgatattcctctccaggaactatgtctgcgctcatttaacatctttcgtttgcgaaaatctggaaacaaccgccagcgcttaatgattgcactggaatcggctgtaaagtttttggccaaagccacggaaaggaaacgtgttggacatcttcaccaagtggagacccgcgagtatttgctcgttaatctgggatcggaactatttcgccgcctaaaatacgccgctgagcacgatacggccattagaagcgacactcagctgaatccacagcgttgtgtggacctttttaacgaggcagtgcaccgcctgcaattggtagccggcgaggatttaagcgactggccccagtttcccgaggagctgcgtgtctttgtgcagccactgcccatcgaatcatcactaaacaccaatcgcttggagcactttgaacccggttggcacttgcccgagcgacgtcagcgtattgtccagcttttggagcgctgtaaacttccaaagatgccggtactgccgaggtcttcatccctggccgaagcccaatgccagtgggtgttggactacgcgcagataagtcagcaggaagactgcgtggaacagatcgccctccaggccattaaaattctgcaatacgacacggatgactacttgaactttgtggaatatctcgctggcgaacgaatgcaatacatactgcggcaagagaggaatccgccccaaggaattgtgtacaatacgaaaacgctgaagagacgcttcctgagcgcatggtactatgagtttcgtgagcctcagatttacgagcccgttcccgccgaagagaatgcccagatgctggagaagcagccatcatcacaagcggaggtgcaacaactggatttcgacgagattacgagcaaggctgaggctgttctgaagaggtttcaccagcgtcaggatgagcgtcacaccctgcgcgagctcaacaggtcacataagtcgaggaagaggagagacgcatcggaccacaaacatgccacacttgtcacccttcagtcaactaaacagctccgaggcgatagcatccatttatccaaaatatttgtgtttccgtttttttttttattttgttttaaggtttttttctacattcaaaaccacacaaaaggatttgcctggaacatgaagagcttagtggctcagacagaatgccaactgcggcctcttaaggtgtccagcttggtatcggcgctaaaggctgcccgaagtgattaccaggggaagagcagtgcggtttgtaggctggtggcgcagatggtggaggccgatcaggtgaagtaccagtggacgccgaacctaacgtcgctgatcgatcgcaaggatgcgagcacccgtcaccagtggcggccacatgttaaccacagcacccgccacgcccgcaaactgcccgtccaaagcatcagcttcctaagtcgctgcctggcgaagaagggtgagcatgcgggattgaccagctgcgtcctgtcggtgaagacgcgttatgcgcccaaaacgctgcatggacgcgaattgctcatttggcgtcagtcctcgatgcgaccgctgctcctgccctcgtcgaatttgtggaccggtgtgctcagcaagcgtcactatgtacctcgactgcgtcctgccgaggaggacgaggaggtggaacgccgggcagtcccccagctgaggattaccaaagagcagagcgaggaagaggagcatcagctccagaggcgaaaggatggcagtcgtctacgcaacgagtgctcggagttttatctgccgatgggagagcaggactactccgagcgggaggaggagaataggggacatcgacaggcctacgtacccagcgaactgatgacacccgaactggccaccaagtggcaaaccaccagtgtcaccgaccgggatcgccaactgctgaatctcgagcagcagatgaagacgcagccatccgttcggatgacgacacaaacctggttcagcgggaatcacagaagatatcgcagccgtcgttccggcgccaagaggtatcacgtcgtttccgagctcgaaggctggcggagatcgtccaatcaccagccagtgcccgtcttccagggccaacccggcgagcaggagcacctgcgtcacgccagtcacaaggccagcgccaggagcatgccggatggccaggagagatgccaggtacgaatgcctaggatcagggcggccaagtcggcggttatgatggcccaggaggcgcggaacaagcaccataggctgatcaccaagaagctggtctacagacccaggcggacagtgaacgcagtgcaagcagaggagacggaggaccaggatacccaccatcgtcaccacggaggcggccaaaagatgtccaaaagagctccagagcgggcattgctcaaacagcatctggccgatcttctggccgtgtcaaagccagaggactcctttcggattggctatcaacccaatgcacccacacgacagctcctcgagcagggaaagtgctatgtatcgctgcgtcgcgagcagttcatccacctgcatcccgtcaggccaaattccctcatccttgcggtcaatctggaggtaaaggagtcgccccgccagccggtgacaacgctgcatcgtagggatggcgccaagcgaccgcgtcttgtggaggatgtggtcaagccatcgctaatcactgtgatccgtcagagtgccgccacctgggaccacaatggacggaaagtgcctgccaaaaagtcaaatttggtgggtatgccttccaaagagcacgcctaccagcggcgcctggtgaggaatacctccaccctggaggccatcgtcaaggcccaagccaagcccagatccgaaccgaagtccccatcatcggccactgactaccacagagtggcgagccagaaactgcctcatgtgaccagcaaagcggacattagcaaggcggccgatcccttcaaggatctcgacaagccacgcatcaaagagaaggaggtggcctcaagctggaagcaggcgtatgtggtcagaagcaaaatgtacgacgcgatcaccccctatcgcaggagagcatatcccggcaagaagtgcatcaccaaggacaagacggacggttacttcctggccaagcgcagctccgccgcggcggcgggatcatccaagaaggtgaagccacccaagcaaccggtggtcagtccaaaggttcaggtgcccagcgtgctgcacaagaaaaagtcccgggaaagtcttggcccgcagaccacaaagaccggaaagctctga

SEQ ID NO: 19020 - protein, 2122 aa, DROSOPHILA
MAEPRPGGYNYKTLLCRNIPELFLDKYVARSHFGRFGTLVNFVLRPRRMTCTVSYASEDEAARALLDGASFQGHLFDISYADNETAPAQKTEEWVDPDIQAELSALQSGWRNEYGSGKPIKKPQNGSSGSGGSSMLPAIPVGPATAPVSRDRTPAQLRDLENMMRRPAHTSEEKFSVLDARDKLLRLNRTQHKLSGATQGHCADMCPEKERVLREFQRQVAYYELQPGSDELICHERALKQYSRSSADQETPLPHELRNETALHMTMSYLMHEIMDISERQDPQSHMGDWFHFVWDRTRSIRKEITQQELCSLGAVKLVEQCARFHIHCAARLVDADPSVFDSKINAENLTKCLQTLKYMYHDLRIKGVPCPKEAEFRGYIVLLNLADANFLWDIGQLPAELQSCPEVRQAIQFYLALQDTNFVRFFQLLADKDTSYLSACILVNYFTRLRVLGLHRLIQAYRSPRKDEVSSLPLSYIAELLSFASEQEAADFVQHYGLQINEAGRVVLSRMHTVETEYKLPRQYELVEVKRVKSVGEVVSGEPLPPRDLYLNHRPHNSFDDYGMLKSIAWTAKDQLAGMQQEEMQPQMPSQPPAVSKHSDTLFKVPMQPDGTAAGFGVFAAAAVPPASSIDGFSFVLPKSRAQEFQEQAPATQQRRAQEEAKHQALQVAIAAAKKREAELMAIHEAKVAEAERVRQQKLRERQEQQRRQQQELEEQRQREQEKLQLEKERQLKLEQLFFVQQQEREAHKQTRTLELYQEIFQDTLAEICQSEFMSHSRACRSYESMLDSITRDLVERQMEQSIYELGVMRVCIRRWRKYRRTQQEKDTLFNQLPLSFGAENPEGVVNKRSMEDSLRLSRRYRLGEPCDYGKLLAGLEEHSWLKLDLWHVLDKCLPVAQPGARRFYKLLISLSGGQEGLQLNCDLDRGLLQQPQSPDARFVDGGYIRGFSQGIGLSVMKIRDDDHDWKATDLAEANGIICLIGLDDIRLLPDRLKPLLQASRCHDVAVIVQHPANTAFVQPDIPLQELCLRSFNIFRLRKSGNNRQRLMIALESAVKFLAKATERKRVGHLHQVETREYLLVNLGSELFRRLKYAAEHDTAIRSDTQLNPQRCVDLFNEAVHRLQLVAGEDLSDWPQFPEELRVFVQPLPIESSLNTNRLEHFEPGWHLPERRQRIVQLLERCKLPKMPVLPRSSSLAEAQCQWVLDYAQISQQEDCVEQIALQAIKILQYDTDDYLNFVEYLAGERMQYILRQERNPPQGIVYNTKTLKRRFLSAWYYEFREPQIYEPVPAEENAQMLEKQPSSQAEVQQLDFDEITSKAEAVLKRFHQRQDERHTLRELNRSHKSRKRRDASDHKHATLVTLQSTKQLRGDSIHLSKIFVFPFFFLFCFKVFFYIQNHTKGFAWNMKSLVAQTECQLRPLKVSSLVSALKAARSDYQGKSSAVCRLVAQMVEADQVKYQWTPNLTSLIDRKDASTRHQWRPHVNHSTRHARKLPVQSISFLSRCLAKKGEHAGLTSCVLSVKTRYAPKTLHGRELLIWRQSSMRPLLLPSSNLWTGVLSKRHYVPRLRPAEEDEEVERRAVPQLRITKEQSEEEEHQLQRRKDGSRLRNECSEFYLPMGEQDYSEREEENRGHRQAYVPSELMTPELATKWQTTSVTDRDRQLLNLEQQMKTQPSVRMTTQTWFSGNHRRYRSRRSGAKRYHVVSELEGWRRSSNHQPVPVFQGQPGEQEHLRHASHKASARSMPDGQERCQVRMPRIRAAKSAVMMAQEARNKHHRLITKKLVYRPRRTVNAVQAEETEDQDTHHRHHGGGQKMSKRAPERALLKQHLADLLAVSKPEDSFRIGYQPNAPTRQLLEQGKCYVSLRREQFIHLHPVRPNSLILAVNLEVKESPRQPVTTLHRRDGAKRPRLVEDVVKPSLITVIRQSAATWDHNGRKVPAKKSNLVGMPSKEHAYQRRLVRNTSTLEAIVKAQAKPRSEPKSPSSATDYHRVASQKLPHVTSKADISKAADPFKDLDKPRIKEKEVASSWKQAYVVRSKMYDAITPYRRRAYPGKKCITKDKTDGYFLAKRSSAAAAGSSKKVKPPKQPVVSPKVQVPSVLHKKKSRESLGPQTTKTGKL

SEQ ID NO: 19021 - DNA, 6656 bp, DROSOPHILA
aggtcctctggccgccgggagctcatatagttcgccacaaagcggccagaggagacctggaccagcttgagcagctgcgtctgccggcaaaagtgctcaaccaacttctgatcgtggaatctgtattgtatattagcatttcgtgttttatgtctttaggagcctgcgaaaataaatgcgccctgttttttaaccaggattaccgtgcacttactggctttttaatggagtctcgtttacaactgatgatccttcgcttgcatccactgtgaacattatacactaatccagaaatgtgaacttatttcaatccgacctactaccaaagaattttaaaatgaagtgtttgactaaggaaaaattggaattaaaaccgattgcgatatgaagtgtacctatcgagccctgatttaaatcgatactgaagtttttcgatcgggtaatgtgtgacttagattttaaatgtcgttaaatgactaatgactagcctcctacaataaatggatcttttgttgctttggcatagagttcttcaaaagcgaagaatagaatatataaatgtagaatttaagggcttaaaacaatcggagtattgtaaactgttgccagctttccaatacatttattttagaaaagtgatgccagatcgatggagtatcgcaactatctatagattttatacactaaaaaaaccgtattttagtgatctatcgtgagtagttagagaaatatctatgaaagaaattgtatcaatatcgataaaaaaaactttttaaagtttcaatttgtttaaaccatgtaatttactttaattttttagctaaatttcatttcaatatttttagctattccaagcaagacaatttcacgttttactcacgcttaacctcacatatttctgacaccagcagcccgatagaaaatagctaaaatatccgttcttctctgacaaccaagtttattataaactaaaaactataaaaaaagaatggtctgaagtgaatttttcatcttgttgtttattttagttttagtgtatcatttctcagtgtacacacgttatttgtataaaaaaaaacagacagaagtttgtttttgctggtgatgatgtctccttaacggttggacttggcgacacgctccaactcatccttcttcttgatggcgtacgagttggaagatccctggaaatacatttaaacacaagttattagtattggctatcaatgtttttctagatcttttatatgttaattgcgctgttatgttactgttactgcattgtatggattcatcgcttctaaataaataaatataaaaaaacaagtccctaacttatttaaagctagtgttcctttacgtttctcatgtgcattgaactaagcaatattacaagcacaaggataataaaggatggaaattaatctggtccaaaagcgagactacataattaaaccaccatgcagaattagattggacctattattaagctctatataccaactcttaaatagtttgctaatgttcttttacgtttctcgtgtgcattagactgatattgtcacaagcacaaggataataaaggatggtgattgttctggtccaaaagcgagactacataattaaaccactatgcagaattagattggacccccgctatcctaatcgaatcagttcctaaatgctaattcataaaagtgttcttttacgtttctcgtgtgcataggacagttaagtggtcactagcacaaggataataagagatttggagtttgatctggtccaaaagcgagactacataaataaaccatgatgcagaattagattggactagttgaaatgactagctgtgtcactagaaggaagaaaagagctatttcgaagctcaattcttgggttaatccgagtgccgaacgtggttctcgatctggtctacaagcgaggccaggcattttggtagtacaatgccaagcattagagtagaccaccccattcccactttgatctcgccacaagcccaatttacccaccttagcagcgttgatcagctcatcagccaggcactcggcgatggtcttgatgttcctgaaggcagcctcacgagctccagtgcacagcagccagatagcctaaaggaaatatacggaaaaaaattaattaagtaactttatgaacgcaatcacagcagcgtaagaatttggggttcttatcgttagtaaaatgaaagtgtgttatgcaattgataatgtctcttcgtttcatacgccaaatgtcggctatactacacattatgacgctacggatattagatagattttcgttctggccaagtgttataagcaagcagtctctaaacgaaccacaagccattgctaccggccaccgtgagcacatgcatctggaaggcaaatcttcagaagaaacccacctggttgacgcgacgcaggggcgacacatcgacggcctggcgacggacggtaccggcacgtccaatacgggtggagtcctcacggggtcccgagttgatgatggcgctgaccaggatctgcaaagaggtcacaaaaaaaaatcgaaatgagtaagctatcacttgatccactcgaagcaccaaagtagaatttttgctgttgatttattgctttattaaggttgcatttttgaggccatgcccttaagaggaatagctaatcatggggtttattgtggtccaattgaataccacaacgctgtagggatcaacgctgcagttttagttttggacggataatgatacccttggtgaataatgcttaactttagtgttgttttaatttccaggagagcaggaagtggcttatatcttcaggcacaaggatagttaaaacaatttcaattgatattagtccatttttggttatgctcagtatggcatcgtatttttaagccatctggcattgaggtggactgacacgcggtttctgagaataggtttttgttgatttatgctttattaaggttgcatttttgaggccatgcccttaagaggaatagctaatcatggggtttattatggtccagttgaataccacaaccctgtaaggatcaacgctgcagttttagttttggacggataatgatacccttggtgaataatgcttaactttagtgttgttttaatttccaggagagcaggaagtggcttatatcttcaagcacaaggatagttaaaacaatttcaattgatattagtccatttttggttatgctcagtatggcatcgtatttttaagccatctggcattgaggtggactgacacgcggtttctgagaataggattttgttgatttatgctttattaagattgcatttttgaggccatgcccttaagaggaatagctaaccatgggatttcctgtggtccaattgaatgccacaacgctgcagagatcaacgctgcagttttagttttggacggacactgatctctgtaatgaatgctttctttctaatgtagtcttaaattccaggagagcgggaagtggcttaatcttcaagcactaggataattaacacttattcctctgagtctatttaatatatgccttagctgggatggaatttccttcaactagcattgaggtagactcattgtgaaagatccactaatatgctattgtcttaaatgtcgaattaagttccaggagagcgggaagtggttttatcttcaagcacaaggatagttaataccttttcctatgagtccattaagagttatgctcagttcggctgaaaattaccatcaactggcattgaggaggactcctctataatactattgtagctttaagttccaggagaaccagaatttgctttctattctagcactaggataattaaatctttggttcactattagtccctttgagagttatgcttcggaaagtatgtagaacatagccagcattgaggaggactagaaatcagtgaagattccctttaaatcagtttaaaccaaggtaccgcatatgctttataatggttttgtaatgtggttttaagttcccggagaacaagaagaggctttgatatcttcaagcactaggacattaaaaccttgtgttcgctctgcgtgcccattctacccatgaccgagtggcaacgttctctggccacagtttagcatgggacgcggtggaattgggaacatttggacgggatgggcatgtttacctgcagagggttctccccggtgagcagatgaatgatctcgaacgagtgcttgacgatgcggcaggccatcagcttcttgccgttgttgcgacccttcatcatcagggagcaggtcaaacgctccacaatggggcactgggccttgcggaaacgcttggcggcataacgtccggcggaatggggaagatagcgggcaaacttctccttcaccgagatgtaatcctgcagagagatgtcgttaacggtgacatcgtcgcaagaccagcggccgaacagcttgatctccggcagctcagtggtggacaccacatttgtctccaggatcgtctcggccacctcggcttccataggtgccgctggctcctcgaaggtctccaccacgttttcagcaacttcggccatgctgcaatagtttttggaaggcaaataagttagtcacgtgtctgcaaatcggtattggtaattctactgtgggatgggatacttgagggctttgcgatctattactatcacagacattcattaatggttggttaatggtatttgttcgttgattttaataagctaacttctattattgaacatcattgtatggcttgaacatcacctagaagttttacagaaacgtgtttttcagtatttgtttatggaaacatcgtcccttttgtacaaattttatacacatacaaattgtttataactttaactagatttcgtttgaaaaattcttttacaaatacaaaacccaagaaaaggctgtgataaactgatacgaataatttttagagccttaacattcgtttttaaatcttaaaaacgtcttaaaacaaaaataaactacaaaaaaagttccaaggtttatgaaagacggaagtttcagtgaagattacgtttaagtatacaaaaagggtcacaataacttttaaatacatatttaagtagttttcctgcgttaacacgttttttttaaactgtagatgggcgctatacgcacacacacacacgcataagcaccgtaaaaaacacacgcgcgttgttgttgttgaattgcgagtttttaagggtttatactttcttgaaggttatccttttggataattggctcaatatacgtggatgtatattgtattaaacatattcttgcgctgcaagcagataaaaaaaatatacaaaaaaaaaggggaaacaaacacgtgtgacgcacacacacagttgcactcgcgcgcacacacacaaacaaaaagccgcccgtttttaacctcatttcggtggaaatggcaatattccgcagtttgccgcagtaaattcacaaaacccttagtatccacactagttgccagcgtttagccgtcttttggccatcctctggccacaatccacacaattaaacgttgaaaatcccttactttgtcacagaagaaatcgagatacgatgtcagcgcaaaggcaaacgcctgaaaaagaacatgttacggcagtgtgcagcaacgccagagagtccgcttccgccgacacgcacacggttgcattccggctgccagggctgcgcaacaagtgaactatcgaacggagataggcggccatgagtggggattattcctcgacttaatcactttttcgaacgcgtttgctacttgagttgcacatttatatgtacttcatagaaatataccctgctttcaggcatactattagttttaagccacttttttaatgacaaatttcgaactttctatcgatatgcggcatttcgcggttttgccagtcacaacgggtggcgatagttgaaattcgcatgccaaattttctttattacggtcaccttatagaaattttgatatgcttgagtattaaatgttattatttcactgactgtaaaataaaaagttatttaaatcgtaatgcatatatatttataacatatagttctttatttgattttgtaagtggaaaaaaatatgtggtatgtaaagattatatatatgggatatataaaatacacaaaaattttactatattacatagtaaatttaagggtggtaaaacgtttttacacgaatacaatatccaaatactttagtaaaatatatttttaatcataagaatttacccatattattaacttttctggcacattctatatccgatagtttacaccttatgccttagtatttttcggtattttctccggccacactggcagcaggccgaagtttctcgtccaattgggattatttcggaatttcagttactagctcgtcatcaaaacagcaacaactgttgagaataaaattcttgcgtgaaaccgaatcaatagaaaaacaaataaaacaaacaaaatggttcgccgtggacgttcagccagtcccccgccctccactcgtcggtaagacagtcgcgaaaaacaaagaaaattcgggggaaattggataaagcgccggcagga

SEQ ID NO: 19022 - DNA, 843 bp, DROSOPHILA
ctttgcgctgacatcgtatctcgatttcttctgtgacaaacatggccgaagttgctgaaaacgtggtggagaccttcgaggagccagcggcacctatggaagccgaggtggccgagacgatcctggagacaaatgtggtgtccaccactgagctgccggagatcaagctgttcggccgctggtcttgcgacgatgtcaccgttaacgacatctctctgcaggattacatctcggtgaaggagaagtttgcccgctatcttccccattccgccggacgttatgccgccaagcgtttccgcaaggcccagtgccccattgtggagcgtttgacctgctccctgatgatgaagggtcgcaacaacggcaagaagctgatggcctgccgcatcgtcaagcactcgttcgagatcattcatctgctcaccggggagaaccctctgcagatcctggtcagcgccatcatcaactcgggaccccgtgaggactccacccgtattggacgtgccggtaccgtccgtcgccaggccgtcgatgtgtcgcccctgcgtcgcgtcaaccaggctatctggctgctgtgcactggagctcgtgaggctgccttcaggaacatcaagaccatcgccgagtgcctggctgatgagctgatcaacgctgctaagggatcttccaactcgtacgccatcaagaagaaggatgagttggagcgtgtcgccaagtccaaccgttaaggagacatcatcaccagcaaaaacaaacttctgtctgtttttttttatacaaataacgtgtgtacactgagaaatgatacactaaaactaaaataaacaacaagatgaaaaattc

SEQ ID NO: 19023 - protein, 228 aa, DROSOPHILA
MAEVAENVVETFEEPAAPMEAEVAETILETNVVSTTELPEIKLFGRWSCDDVTVNDISLQDYISVKEKFARYLPHSAGRYAAKRFRKAQCPIVERLTCSLMMKGRNNGKKLMACRIVKHSFEIIHLLTGENPLQILVSAIINSGPREDSTRIGRAGTVRRQAVDVSPLRRVNQAIWLLCTGAREAAFRNIKTIAECLADELINAAKGSSNSYAIKKKDELERVAKSNR

SEQ ID NO: 19024 - DNA, 5440 bp, DROSOPHILA
gccgcaataattgctcacgttctcacgcgctctcaacgcctcaccccctgtggcttttaaaaccaatttggtaaaaccgtccgaccaacggcagccagccaagtaagtcaaccaggtcaaaaagctgcttcaagatgtgtgtaattagacgtgacttttcctcgagttctactgaagggttttctggtggccgggggccaaatcgggccttaaagccatcttaacgctgttgttatttagagcttaattgtgcccggacacggaggaggagcagtgcccagggtcgtggttcaggcgattgggccgaagtgatgggttgaaggggaaccgcccttagagttcaagatggattaaagtccgcttcaatggctactccgtggagcctttgtcccccccatcccaaacgatgccccactcaaccgcaattagcttggcagaagctcgatatcgacacattagcatcccctgtgcaccgggcataatctgattatcagccgccaacccccggaaaaagcaagtgaaaaagtgctaatttgtgcacggaaatcacgcccaggaactgggatggatatcagggattttcccgatgccctccatgtgcgtgtcacctccagctgactgtttcccttatcgcctttgtgcaaattgaaaatatgccaaataattacacatttttatgtgaatttttcaatttatatgccgtcaaataaacgctgcgtgcacatcacagtattgacattcagttgggaggcacttgcgcccactttttcctcatttccgacgatattcgcaatgtcgtcagacatcttctggcagcttatttattcaaaaatgtatttgaccttgaaaagctctaggcaactttcggaaaatgtccacagatggcgtttcatcgctttctacttacgagcgtaagttacatttgtaaaatcccgtcaaatgtatgtaatgtcgtggaaatagagatgtcaaatcaaaccaggcccagtaaaagacaaaatttatgtaccgactgttgtttaatgcgtttacaagtatatgggtgtgttgtactgaacaacatgcactcgaaaaaaaacttacaaagttcagtgttaatgaaagccccactacaccaacaacaggatgtcagaggccaagagccaaacatctccgggtgcttggcttttaattatattgattatcaaaatataagttgacaagtgcagtttcatacattttaaatgtacaaacgggggaagttgggatgaggaaatgattaagatacaacgagaaggaaggaaatagtaggtcaagtaaatgagctgaattggaagttgggaattaaaagaattaatgaaatgattcaaatgataggggcactcaattcaagcgctgagttaccggcagctttttgcgccgtcttcgcaattgctgactgcgatcccagtactcatagtagcgttcctgtttcaaccattcctgatatttataccaccactcctcccacttgatatagtcctaaaagatatagataaatgttaccatttgtactggactgcggataaaatcgtcacttaccttcaggtccaagtctcttaggtaaccacgactcttgtagtactcgtaacggacgcgcacatcgtcccacgacagcattcccgacggtgctgtggtggctaactcctccggaaagtgcccggccggtgccggcgaatacgaatagcgacgcggcggcgactccaggccctcctcaatcattactttgagggccccaccggcggagtctttggtgatgcgcatgttctccatgttgctgcgatcgatgctccactgcgccattttgccgaatcgatccgagagcgtcagccgcgtagtagccgagaatgtgggcaacgtgccgacctcgtcgctgtccgagccgttcgaatcgtccgagtccgaggaggagtttgccgcgttagctccggtgccactggacgtcccgctcggatgttttttgcgtttctcaccttcaattttaatgcgtggcctcacctgatggaaaataatatatatggattgttatatttggtttcaaatttattttgactcttagcttcggacaatgcttacctccttttccttcttcttcttttttgcctgtgttgtaggtgctgcagctggcgctgacgccggctctggtggctctggcgggcggtgcttaagacgcggatcttccggcggaggcgaatggcgcgaggaccgcgcgatcttcatgtgggtgtccgacgaggcgacacgttcatgcccgatgtgacgcatcttcgcctggcgatacttctccatggcggaaaccgaactgcctccacctccgcgcacgggcggtggagtggtggggcgaccatggatacggccatgtgattccgacggagggggcggaggcgcccccgaacgataatggccacgtggcttgggtggcggcgagcgcggaccgcgggatctttaagatggaaaaaaaaaagtttaataggaacaaagaaaacacatttcatatatcaatacttaccgagatctgtgacgatgactgggtgagcagagggagcaggaatcatcggagctggtgctcatagagctgtttgatcgcgaacgcatcgagtgctgcaaagggacacggatatatgtataaatggtatggttctcactgacagaataatatgtatcactatctggttgaaaactcaccctcggtggtggcgatggcggtcgcttggagcgcggcaggatatgggcgactggacctcgcttctccattgccgacgacgagggcggaggaagcggtggagaccggcgacgtccgagcggagaacgcgacgcgtttggcttgcgtcgcaacgacgaggacgacgagccaccactgggttccggcggtgatcggggccttccgccgtggccgtttccgggtcgacgcatgagggcatcgtggctattgttgggcgatcgtggcattggcggcgagcgaggtccaccacggcgatccatgccactgtgcatagccatgggcggtgaacgacgacgcggaggtggtgaaagcggtggcgatttgcgcaaacgcgaccgactgcgtgagtgcggcgaacgagagcgtccgtaacgctgcgacggaggcggtggacctggcggcggtccacctgtgggcggataacgaccgtagggcggtgctccaccctcacgaccttcgcgaccgtcgcgttcgctctctccagagctgctctccccctggatgtacatcttcttgtagcccgtgtggcgccatcggtttggatccttctcctctgcctcgatcagcttcttgtcccaataatcgttggtggtgttggcgcgcgccttcttcatcacgttgtcgatctcgcgtcgctttccagcgggtaatgagggatctgcaaggttgagaggtaaaaggtaagcttcgattggcagggtggtgggcggtgctttgttccgggaagcccctaagacgggctgatgggtttatgggcccttagacatcgctaatcccggcgaggtaattgggttttcccacttctatgcagttgcttgctggtagttggtagaagtttcagttcaggtacctgttatgcgggcagctgtcggctgcctgtccatgtgcagttttggattcagttcggcgcgcctgcgcgacgccatcgcgagatttcggatttctatcgctttggcaactatgtatatgtatatatatcgcgcgacagatatatgtatgtatgtactcgggtttcaatgtttattacccccaatcggttagggtttggtttactgtttcggattcggtttggcgaacgcgacaacacactttaccatttcaaaaacatacacaacaagctgcaaatatattacaattgaatatagaaacatgtaaagagagcattagaaatggctaacacaaagcaacaacaatatcaggagcggagttatacagaatgggaatagagcggagagacctgaaaacgcagagagaatcgcggacgcgctccggctgtcatttaacccatatcacgccgcgggggtcggggacctgtggtcccaatcaaaatcgtgcgagagagccgatttttaatcggcttgcgcgtatatcttttcacatatgcattttgaatttcttccatttttcacacatacactcacaccagcaccaatatatttgccttgtcagcacgagaggaatgcagagcgagacagagagagagtgtgaggcaaaagttggcgatactcccgacggcagcaactaaatttcgaatttcagctctggcaattatgtaaacgatgtaaaacaggcactaaaataatttgcttacatttggcgacgtttgcgggcacgctttacgatatttcgtgagctgttaacgttttattggcaaatgaaaaacacggcgttgcgttcacttcaatttttctcgacggccatgttggtagtatcgatatgccggggcacaatcgatggcttggcttcaatagtctaaggactgttcagagtctgatgaactcgagtcagtttatatattttaataataaatattgtgttatttcaagaggcgctcgtagttgaaaacactattcgttttgggaatgttttatatattagactatttaaatcatatcatattgttttgacattattttaagtatgcattaacgattctgctaattattgcaaaaataaaagttattagttctatttaaattaaaacagaaacaaataataacgatcaattattagttattggtgagcattaattcattttttattgttcagtttccttaattgaccatatgattttaattttaggatctgaatgtagtgtggacgccagtttgctgctatcgcaaacgttatcgatagtacggtgttgcagtattttattacacccgactaacaaatgataataagcagatccacggtcacactttccactttgtgtccatccgactgaagttaaaaataatagtttaattgggagtttccaaaatgcagcgcgacgaaaagctttttgagctgacgctggatacggtccttcagcgtctgaacgacctgaagctggcggttctctcgatgatccaaaaacttgagctagagtacgagaccatcaactggccgactttcctggacaactttgccattatctcaagtcacttgacgggattgacgaaaatcttggcaaaggagcagtgtccgccgctaagaaatcgaacggtcctgccccttctggtctccatggaccgggatgacaccctcatcaacatcacagagggtcgggtgccagtcttttcacacgacattgttccagactatttgagaactcggccggatccgattacggaacagaaaatgctgcagaacgaacagaaggcggcgaacctcaccaacgacgctgccatgaaacaggtcactcaatacaacaaggtc

SEQ ID NO: 19025 - DNA, 2487 bp, DROSOPHILA
tggccgtcgagaaaaattgaagtgaacgcaacgccgtgtttttcatttgccaataaaacgttaacagctcacgaaatatcgtaaagcgtgcccgcaaacgtcgccaaatcttgttgtgtatgtttttgaaatggtaaagtgtgttgtcgcgttcgccaaaccgaatccgaaacagtaaaccaaaccctaaccgattgggggtaataaacattgaaacccgagtacatacatacatatatctgtcgcgcgatatatatacatatacatagttgccaaagcgatagaaatccgaaatctcgcgatggcgtcgcgcaggcgcgccgaactgaatccaaaactgcacatggacaggcagccgacagctgcccgcataacagatccctcattacccgctggaaagcgacgcgagatcgacaacgtgatgaagaaggcgcgcgccaacaccaccaacgattattgggacaagaagctgatcgaggcagaggagaaggatccaaaccgatggcgccacacgggctacaagaagatgtacatccagggggagagcagctctggagagagcgaacgcgacggtcgcgaaggtcgtgagggtggagcaccgccctacggtcgttatccgcccacaggtggaccgccgccaggtccaccgcctccgtcgcagcgttacggacgctctcgttcgccgcactcacgcagtcggtcgcgtttgcgcaaatcgccaccgctttcaccacctccgcgtcgtcgttcaccgcccatggctatgcacagtggcatggatcgccgtggtggacctcgctcgccgccaatgccacgatcgcccaacaatagccacgatgccctcatgcgtcgacccggaaacggccacggcggaaggccccgatcaccgccggaacccagtggtggctcgtcgtcctcgtcgttgcgacgcaagccaaacgcgtcgcgttctccgctcggacgtcgccggtctccaccgcttcctccgccctcgtcgtcggcaatggagaagcgaggtccagtcgcccatatcctgccgcgctccaagcgaccgccatcgccaccaccgaggcactcgatgcgttcgcgatcaaacagctctatgagcaccagctccgatgattcctgctccctctgctcacccagtcatcgtcacagatctcgatcccgcggtccgcgctcgccgccacccaagccacgtggccattatcgttcgggggcgcctccgccccctccgtcggaatcacatggccgtatccatggtcgccccaccactccaccgcccgtgcgcggaggtggaggcagttcggtttccgccatggagaagtatcgccaggcgaagatgcgtcacatcgggcatgaacgtgtcgcctcgtcggacacccacatgaagatcgcgcggtcctcgcgccattcgcctccgccggaagatccgcgtcttaagcaccgcccgccagagccaccagagccggcgtcagcgccagctgcagcacctacaacacaggcaaaaaagaagaagaaggaaaaggaggtgaggccacgcattaaaattgaaggtgagaaacgcaaaaaacatccgagcgggacgtccagtggcaccggagctaacgcggcaaactcctcctcggactcggacgattcgaacggctcggacagcgacgaggtcggcacgttgcccacattctcggctactacgcggctgacgctctcggatcgattcggcaaaatggcgcagtggagcatcgatcgcagcaacatggagaacatgcgcatcaccaaagactccgccggtggggccctcaaagtaatgattgaggagggcctggagtcgccgccgcgtcgctattcgtattcgccggcaccggccgggcactttccggaggagttagccaccacagcaccgtcgggaatgctgtcgtgggacgatgtgcgcgtccgttacgagtactacaagagtcgtggttacctaagagacttggacctgaaggactatatcaagtgggaggagtggtggtataaatatcaggaatggttgaaacaggaacgctactatgagtactgggatcgcagtcagcaattgcgaagacggcgcaaaaagctgccggtaactcagcgcttgaattgagtgcccctatcatttgaatcatttcattaattcttttaattcccaacttccaattcagctcatttacttgacctactatttccttccttctcgttgtatcttaatcatttcctcatcccaacttcccccgtttgtacatttaaaatgtatgaaactgcacttgtcaacttatattttgataatcaatataattaaaagccaagcacccggagatgtttggctcttggcctctgacatcctgttgttggtgtagtggggctttcattaacactgaactttgtaagttttttttcgagtgcatgttgttcagtacaacacacccatatacttgtaaacgcattaaacaacagtcggtacataaa

SEQ ID NO: 19026 - protein, 567 aa, DROSOPHILA
MKKARANTTNDYWDKKLIEAEEKDPNRWRHTGYKKMYIQGESSSGESERDGREGREGGAPPYGRYPPTGGPPPGPPPPSQRYGRSRSPHSRSRSRLRKSPPLSPPPRRRSPPMAMHSGMDRRGGPRSPPMPRSPNNSHDALMRRPGNGHGGRPRSPPEPSGGSSSSSLRRKPNASRSPLGRRRSPPLPPPSSSAMEKRGPVAHILPRSKRPPSPPPRHSMRSRSNSSMSTSSDDSCSLCSPSHRHRSRSRGPRSPPPKPRGHYRSGAPPPPPSESHGRIHGRPTTPPPVRGGGGSSVSAMEKYRQAKMRHIGHERVASSDTHMKIARSSRHSPPPEDPRLKHRPPEPPEPASAPAAAPTTQAKKKKKEKEVRPRIKIEGEKRKKHPSGTSSGTGANAANSSSDSDDSNGSDSDEVGTLPTFSATTRLTLSDRFGKMAQWSIDRSNMENMRITKDSAGGALKVMIEEGLESPPRRYSYSPAPAGHFPEELATTAPSGMLSWDDVRVRYEYYKSRGYLRDLDLKDYIKWEEWWYKYQEWLKQERYYEYWDRSQQLRRRRKKLPVTQRLN

SEQ ID NO: 19027 - DNA, 6036 bp, DROSOPHILA
aagtaattgagcgttctgcatttaaaaacaattaaatttgtttgacattcttttatttatttacttactaactttcttggtgtccatttcttaattattgttaagttacatttattcacagcctgtttcaggttttctgtggaaatattgtcttttatcataaaatccaaaaaaaaaaactatttgactattcttggcatttaggtttaattcttattaacaaaaaaattaaagtactactttttttataagtagatagttttccttggacttgaagttgagaaaaaaaatccaaaattctccaaaaagtaaacacttcttaccatatatttttaaaaatatctatggcatccttattttatgtactataacttttgtaaagtattcctgatgtccccgacgtaatgtaactattttatgtattgttaacaattcatttcaggtgtaagcatattctgtggaaatatggtttttataaaaaacaaaactatatagattcttggccacacatttaattttaatacttgtcccaaaaacaattttacaagtacatagcttccaaaaaattagcaaaaacatcgttgattagcgattaacaacggtacaagattattccaaaattttcctgattttcgcgaattaaatttttaaaactatccgcgattagcttgcgatatacacaaaacatatatcgaatgaatcaaaagatactgaatgtggaggagatgggggatgtatgtatgtgtcggctatgtgtgaatgcttacaaatatagtcttcgtttttgaacgcttcaggtgttgtttgtgtagtagagaatggctagggtgtagtatctagtggctatagtgccgattttgtttacaaacacatgtgctgtaaatttatctgtataaaactacaaaaggtattcaaaattggtccagtgtgcgatggttataaatctacgagtaatgccaaatcaatgccaagttggtctatagggatctatgccaggcgtttagggcatgtcccagctatctgtgcgccgcctcttatccgcgtgcatccccagctcctcgtcctcgtagctattcagatactgaagtaaccagcgtgtaaacttgttcatgtacggatcgatgcaggagatcacattgaaattgaagaccgccggcggtgcctggttttctttggccccgaaaatgccctgcacgaaatgctcgcagtgaaagatggccacacaaacgtccgattcaaggacctccagccgcagcgccagcttggcaaagcactcagctaattgcttcagcactatataggtcttgctagagaagacatctggaaatgagcgggatggaaaacgttagttgccatcgattagaggagcacaaaatagtaacaaaagttgtaaatagtatttcaagtttcgaaaataattaacaatttgactctgttaattgttctcgaaacatgctaaatgcgaaacattactaaagtcagtttggatgagatctgtttgaattgtgattgttgttgtgtttgttgatctgtgtttcataaagccgtactgacacgacccttcgctttgaagctaggaagacgatttgctgcttaatggaattagacttactcggtcgctctttcctggagatcacataatacttttgcagcatatgctgagcgccatcggttaaggtggtcttgcgctgatgcaacagatgtataagcatgcgcatatcgtcctcgggaatgctcaagccatcgttgactacaatttgaccctcagcgttgtgcttctgaattatagagttccagagactattgctggcctgagcacccatataaattggcagcccgaagattctgcaaattaggttaacttaatatacaagcgtaatttctagttttgtccaccttacgggcacagtttggcgagggccagtgtttgattggtggagttgttcggctgccagtaagtccaaacggctgcctttaagggctgatcgatgtgcaactgcggaactgggaccgctccattttcgatgcacttttccagctggcatccctgatccttggacagacgattccaatcgccggcgtagtaaactccctgttgtgccaatagtaaaggactggccactatccaattaaagcgcgtgggcagggcattgaaagtgggctgcagtccgtattcgtggggtcccaggaaacgtggtgccagttggcccactttgttaagtagacggttggccatcaggctgtcggtggcgattatgcatagcgaaattggagcccgcacctcatcagattcgattgaaacgatactggccagcagtatcatcttcaggtacacaaagcaatccataggcacacagtcctgactgatctgagcacttagggcgtagacaaaggagtagtcagaatactgcgatgagatcaagtgatgtagtttcttgatgctggacggcacgcagtttagatccggcttgggatattcttggccgtgctgtgatggggctcgaaatatcatatgacgctcgagtggtggtcctgcgtccttagcgaggtacgcgttttcctcgccgtgttcgtcggcgacgacctggttctccgactggaaactcgggggctctatctccgactcccactgccattcctggtcctgttgctccggctgggtttcctcctgatccatatccaacagaggcctgctgtacattaggtcctcgtcctggtggatgcatgattcccacaagtgttgctggtgctggttctccaccggcggcgaactgagagtatgcgataactgggtgggcccggaaatgctggatgggaggcggctggagctcatatgctggatggggggtggcgaactggtaaatatatccatattggtggtgccaacccctgtacacgggagactggctagccgaaaaaccgactggctgacactgttgctttggatttcaaccggaatttgtggtgacgagttgctccatataattcccgactgctgatcaaaatagaacacgggcggcagattgccggtggcactcacctcgatcattgccggtggtacaatggcttcgatcggtgtgtcgactgtctgtcgtggtggacatggctgatcatctatctcagaggtgtattcgagtattggttctggggcgctgtcaggatttggtagttgctcgcgtgggttattttttttcgcgtgcaaagagcgcgtaaaacgctgtcgacagcgtctttgctgtaattgtccaatatagaaagggttatctaatgaggattaaacttacggtgcagtaacttacgctcaatctagacactttgtgggttagatgggattctccggtagggtggaactccttagcatttgagttcaaaacgctgcccatagccaattttcgcatgtggctgctcgcatggatttctggtgagcttttcacctggcgcggtttctcctgttgctggtacggcaccacctctttttccggcgttttccctgaagatccctcaagcaaggactctgtaaactctcgacttaccgcctgcagactgcgcaccatccgggggttgtgattgcgacgtgggaatctcctctgccttctctcactttgattaggcgtcggcggcataacatcctcgtcctcattgtggacaacactgggacccgaagattgagtggtctgctgtctgggcgcaatgcggattggtgccgaagaattgtttgtaactgaagctctcttcgcagggctccttgagtgcaagtaaatgagctcggtaggtctctctgattgcgactgagtatgattaacagggttcatctgctgctgaacagaagttttcggacaattctgaagaatctttggcttctgctgctgttgttgtttccaagagtgctgaatgccaggagacttctgattgttttggctcctttcattattggcaggactcttctgttgctgctgttggaatttgctgggagaattttcagaactcttctgctgtaaagaactggcagaactcttctgatgatgcgaggaattgacccaactcctttgcttctgtatgaaattgaccgaactcctctgctgctgtgaagaattgacccaactcttccgcttctgtaaggaatggaccgaactattctgctgctgtaaggaactggcagaactgttttgctgctgtaaagaattggcggaagccatctgctgcatgttagtaaaaccgacagaactcttctgctgctcctttggagagttaggtgttttctgctgatgctcgacagaattagccggacttgtctcctcctgttgggatttagctggagtattctgctcctgttggatattcttctcacccggagaggactgggcagaactttttggcgtcagcggctgtactgaatctttactcagcagtgttatattggtcgaagaagagcaacgtgcctggtcgcttaaagacttttggctgtcgctaggacgtactgacgacagccaagtggtcaccgattgatgattgctgttgctcgatttcggaagcatgaaatccggcaaaaagttacccagcacaggcggatcttttacgcgactaaaacgactggcaaggcacgaaacagtgccgccgtcatcttgattacgcacccgcggcgttcgttgtttgaatctcttcgggcgctggcccaaatcaggatactcttcggcactcacaacaaagctacgatcaggcttagtgacttctttagataagcgccagacgttaacatttggtttgtagacaccggccttcggtgtgggagtcataataggcgtcacatcgctttcgaccaggccattcgatggtatggtgctgggcattgggggatacattaatatatttgcttattataatggtgtaaatagaatattctaccctatggagcttgtgttggcattttgagtaacttcacgaacttcaccatcgtcatcgttgcgcaagaaaacattaagctggaggggaatgtgcctacgagggtcctttttctctagtttattcgtagatgacatgcttccagttgatatgtgctggctgagctcgcaaagtatccagtgattaggtagctagcacccaactttaattcgcagtcgtgggcgtgggctaagaaatgttgttaatattatgattattcatgatagtgacatccaaatgagtatgtcctagtttaccaggcatatttaatttcacgtgtttatgatgtcctgaataccagattcacttacctctaaggcgaactaattttgggcgatgaaggcaattggtgacacgaggtgtctgaactgccgaaataggcaagacagccaagatacgataggtttccgtgacgcgcagcttttggtattcactcatgggccgcgagcagctcgaacaaaagggtgctgaaagatatcaagaagatggattagcaatggagctggcacaggatctcgtgaacaaggaatgctgggttagataacattttgttagacagggttccgagggttgtgagtatggctagaggttagaggttgttagttagaggttgttggctgtgccacaatttggataaagtgcacgttgtttctttatgttcctagcctatgggacctaccatctgttgagctggtctgtatggcatttcgcatacagccactgccgcagtaccagatcgattgtaggctacaatggaatatcaggatataaattacacatattatcaaagattggtacaccctagcagagcagctgtgtgttttataattaatatgtttagaaacagatattgcctaaagcataagaaaataatacatgcaatagacaaataataaataccattaacccacttaaataaaaaataacgataatacgatccatgcttttttaactttaacaacaatgaacattcatagaaagttaatgggatatagatatacttcttttgtaggttggtatttacacttaagagactaagcttaaaaccctcttgaactaaaccaaaaagggtaaaccagcttggctagcttggttagt

SEQ ID NO: 19028 - DNA, 3561 bp, DROSOPHILA
atgtcatctacgaataaactagagaaaaaggaccctcgtaggcacattcccctccagcttaatgttttcttgcgcaacgatgacgatggtgaagttcgtgaagttactcaaaatgccaacacaagctccataggcaccataccatcgaatggcctggtcgaaagcgatgtgacgcctattatgactcccacaccgaaggccggtgtctacaaaccaaatgttaacgtctggcgcttatctaaagaagtcactaagcctgatcgtagctttgttgtgagtgccgaagagtatcctgatttgggccagcgcccgaagagattcaaacaacgaacgccgcgggtgcgtaatcaagatgacggcggcactgtttcgtgccttgccagtcgttttagtcgcgtaaaagatccgcctgtgctgggtaactttttgccggatttcatgcttccgaaatcgagcaacagcaatcatcaatcggtgaccacttggctgtcgtcagtacgtcctagcgacagccaaaagtctttaagcgaccaggcacgttgctcttcttcgaccaatataacactgctgagtaaagattcagtacagccgctgacgccaaaaagttctgcccagtcctctccgggtgagaagaatatccaacaggagcagaatactccagctaaatcccaacaggaggagacaagtccggctaattctgtcgagcatcagcagaaaacacctaactctccaaaggagcagcagaagagttctgtcggttttactaacatgcagcagatggcttccgccaattctttacagcagcaaaacagttctgccagttccttacagcagcagaatagttcggtccattccttacagaagcggaagagttgggtcaattcttcacagcagcagaggagttcggtcaatttcatacagaagcaaaggagttgggtcaattcctcgcatcatcagaagagttctgccagttctttacagcagaagagttctgaaaattctcccagcaaattccaacagcagcaacagaagagtcctgccaataatgaaaggagccaaaacaatcagaagtctcctggcattcagcactcttggaaacaacaacagcagcagaagccaaagattcttcagaattgtccgaaaacttctgttcagcagcagatgaaccctgttaatcatactcagtcgcaatcagagagacctaccgagctcatttacttgcactcaaggagccctgcgaagagagcttcagttacaaacaattcttcggcaccaatccgcattgcgcccagacagcagaccactcaatcttcgggtcccagtgttgtccacaatgaggacgaggatgttatgccgccgacgcctaatcaaagtgagagaaggcagaggagattcccacgtcgcaatcacaacccccggatggtgcgcagtctgcaggcggtaagtcgagagtttacagagtccttgcttgagggatcttcagggaaaacgccggaaaaagaggtggtgccgtaccagcaacaggagaaaccgcgccaggtgaaaagctcaccagaaatccatgcgagcagccacatgcgaaaattggctatgggcagcgttttgaactcaaatgctaaggagttccaccctaccggagaatcccatctaacccacaaagtgtctagattgagccaaagacgctgtcgacagcgttttacgcgctctttgcacgcgaaaaaaaataacccacgcgagcaactaccaaatcctgacagcgccccagaaccaatactcgaatacacctctgagatagatgatcagccatgtccaccacgacagacagtcgacacaccgatcgaagccattgtaccaccggcaatgatcgaggtgagtgccaccggcaatctgccgcccgtgttctattttgatcagcagtcgggaattatatggagcaactcgtcaccacaaattccggttgaaatccaaagcaacagtgtcagccagtcggtttttcggctagccagtctcccgtgtacaggggttggcaccaccaatatggatatatttaccagttcgccaccccccatccagcatatgagctccagccgcctcccatccagcatttccgggcccacccagttatcgcatactctcagttcgccgccggtggagaaccagcaccagcaacacttgtgggaatcatgcatccaccaggacgaggacctaatgtacagcaggcctctgttggatatggatcaggaggaaacccagccggagcaacaggaccaggaatggcagtgggagtcggagatagagcccccgagtttccagtcggagaaccaggtcgtcgccgacgaacacggcgaggaaaacgcgtacctcgctaaggacgcaggaccaccactcgagcgtcatatgatatttcgagccccatcacagcacggccaagaatatcccaagccggatctaaactgcgtgccgtccagcatcaagaaactacatcacttgatctcatcgcagtattctgactactcctttgtctacgccctaagtgctcagatcagtcaggactgtgtgcctatggattgctttgtgtacctgaagatgatactgctggccagtatcgtttcaatcgaatctgatgaggtgcgggctccaatttcgctatgcataatcgccaccgacagcctgatggccaaccgtctacttaacaaagtgggccaactggcaccacgtttcctgggaccccacgaatacggactgcagcccactttcaatgccctgcccacgcgctttaattggatagtggccagtcctttactattggcacaacagggagtttactacgccggcgattggaatcgtctgtccaaggatcagggatgccagctggaaaagtgcatcgaaaatggagcggtcccagttccgcagttgcacatcgatcagcccttaaaggcagccgtttggacttactggcagccgaacaactccaccaatcaaacactggccctcgccaaactgtgcccaatcttcgggctgccaatttatatgggtgctcaggccagcaatagtctctggaactctataattcagaagcacaacgctgagggtcaaattgtagtcaacgatggcttgagcattcccgaggacgatatgcgcatgcttatacatctgttgcatcagcgcaagaccaccttaaccgatggcgctcagcatatgctgcaaaagtattatgtgatctccaggaaagagcgaccgaatgtcttctctagcaagacctatatagtgctgaagcaattagctgagtgctttgccaagctggcgctgcggctggaggtccttgaatcggacgtttgtgtggccatctttcactgcgagcatttcgtgcagggcattttcggggccaaagaaaaccaggcaccgccggcggtcttcaatttcaatgtgatctcctgcatcgatccgtacatgaacaagtttacacgctggttacttcagtatctgaatagctacgaggacgaggagctggggatgcacgcggataagaggcggcgcacagatagctgggacatgccctaa

SEQ ID NO: 19029 - protein, 1186 aa, DROSOPHILA
MSSTNKLEKKDPRRHIPLQLNVFLRNDDDGEVREVTQNANTSSIGTIPSNGLVESDVTPIMTPTPKAGVYKPNVNVWRLSKEVTKPDRSFVVSAEEYPDLGQRPKRFKQRTPRVRNQDDGGTVSCLASRFSRVKDPPVLGNFLPDFMLPKSSNSNHQSVTTWLSSVRPSDSQKSLSDQARCSSSTNITLLSKDSVQPLTPKSSAQSSPGEKNIQQEQNTPAKSQQEETSPANSVEHQQKTPNSPKEQQKSSVGFTNMQQMASANSLQQQNSSASSLQQQNSSVHSLQKRKSWVNSSQQQRSSVNFIQKQRSWVNSSHHQKSSASSLQQKSSENSPSKFQQQQQKSPANNERSQNNQKSPGIQHSWKQQQQQKPKILQNCPKTSVQQQMNPVNHTQSQSERPTELIYLHSRSPAKRASVTNNSSAPIRIAPRQQTTQSSGPSVVHNEDEDVMPPTPNQSERRQRRFPRRNHNPRMVRSLQAVSREFTESLLEGSSGKTPEKEVVPYQQQEKPRQVKSSPEIHASSHMRKLAMGSVLNSNAKEFHPTGESHLTHKVSRLSQRRCRQRFTRSLHAKKNNPREQLPNPDSAPEPILEYTSEIDDQPCPPRQTVDTPIEAIVPPAMIEVSATGNLPPVFYFDQQSGIIWSNSSPQIPVEIQSNSVSQSVFRLASLPCTGVGTTNMDIFTSSPPPIQHMSSSRLPSSISGPTQLSHTLSSPPVENQHQQHLWESCIHQDEDLMYSRPLLDMDQEETQPEQQDQEWQWESEIEPPSFQSENQVVADEHGEENAYLAKDAGPPLERHMIFRAPSQHGQEYPKPDLNCVPSSIKKLHHLISSQYSDYSFVYALSAQISQDCVPMDCFVYLKMILLASIVSIESDEVRAPISLCIIATDSLMANRLLNKVGQLAPRFLGPHEYGLQPTFNALPTRFNWIVASPLLLAQQGVYYAGDWNRLSKDQGCQLEKCIENGAVPVPQLHIDQPLKAAVWTYWQPNNSTNQTLALAKLCPIFGLPIYMGAQASNSLWNSIIQKHNAEGQIVVNDGLSIPEDDMRMLIHLLHQRKTTLTDGAQHMLQKYYVISRKERPNVFSSKTYIVLKQLAECFAKLALRLEVLESDVCVAIFHCEHFVQGIFGAKENQAPPAVFNFNVISCIDPYMNKFTRWLLQYLNSYEDEELGMHADKRRRTDSWDMP

SEQ ID NO: 19030 - DNA, 5252 bp, DROSOPHILA
cagcagtaaatggattcaaaatcatatgcaaaccttactgtgtaactgttttcttcatttttttacaatattttttaatattagacattgatactatatacgaatgtagatatgtaagttgtggaaggcatcagcatttgtttacttctaaaaacgcagaaaactgggaatttcaacaatgtctggttggatccggctgcgttatgactgcacaatttacaatgtcaaagccaagcacttaataaccacacatatgcggatgcccaatggtaaacttccataagttttttttagacctcaaataaaaataaaagcactcaccctaaaattcccgagtcagtttgggttgaacggtgtgaccagtcgactgaaagcgaaaaatgtacacttcaaattttaagctgcaaacacttgtcatgtaagagctattgtatattttgccgaataggttaaagtttttgtatgcaacataatatattagcaaaaggacaatagaagaaatatatgcaacgtataatagtgatacatacattgtaaagtatccgttaatacactgtttccactttttagggcatttcgataattaccgataattcttcaaaaatatcctgtaacggccttacctcaaatattgatttgtattttctattctattatttaatatttatcctgttagcttatggttggctttttcacatttaaagatcgatatgcttgcgttcggcaattttcgcttagtggatataaaagcggaacgactggaattttttcgcatatgaaacctgttatcccaccgatccctatctatattttaatatttcaatataaatagttttgtttccgcgataattcagctaaaaaaaattttatcgattgcatgcattaagtaactgaaaaattaacaacaaactttaatataaaaaaagcccggtacatgagaatcatttactcagaaacgcgtttatgaaacgcttgcaattcccagcaattatgcctaacgcgtagtttaaataacaattgattgctacagaagcagacagcgcgaaagacaatattaagtttataatttaaatatagcttgaaggcagagttaaaaaaggcagatactcagcgcataacgtgcaaatcgatttggcactttaatttgccgtttatttgtttatagtctgtcaaaacaaacagttgtacataaaaaaaggaaatataatcgcgcgcatgcagcatttctggttaaaataaacattaataaagcaacgaattgaatgggactcacggacaacgatgagggattgtaaatagagacattggttaatgcctgaaatgtacatatttttttgtgttgtgcacgatttgatgcaagaatagtgtgtatttttaaacaagactccggcgctgatacattcatacatagctcacgcgcacaggacatacagtcctaacataaaattctcgttcgttttcacgccatcgcatctattgtgttacatagcgcccaaaaaacgagaagtaaagaactataatcagcgaagtttcggttccttggcaaacaaacaggtatgtattcagattcgcagggatgcgtacatgtatataacgcgtacattcaactgtttacatccttattactaaatatagaagtaattccaattgtgcaaatcgctagtggaggtgtacatatgtatttatgcaagcgtgcgtatgtatgtgggtacataaaacatggcaagtgaaaattcgcatggtcttctcctcagtttcacactgaggacattatttatttggacgattatcaaatgtaaataagcatatacctctgcacctgtatgtacgctcgtgtgtttgtatgtatgtatgtatatacagtggtcaactgctaaaaagaaagcaaataaaaacttaggaataacgtaactgtcatgcaaaaacaatacaaaaaagtggaaaagggacaatgctatttttaaactcatatatttggctaaaatattctttcttttaatccattattaaatgaaatgcaaatattaatgcaatgcaaaaaaaagaagtatctttttttttcatatatcaaaaatcaaacaaaaggagttcatataatatatatacttaatatgcaatacaatatttttaagggaaacctactagaattatgatgtcacgagaaagattcggtcaaattacttgatccttattcttagttcattcaagagagtcgaatttatgatatattcgaattattgtctattgacgatagttataatttatcctggaatttaccaacactctattgcaggatatacaaggatctttaaatgagcgatagcttcgtaaactcaggagcacagtaaaggcgcgaactatattttgagtacgatgagcggcgctacacaggaattttgtgtacgctggaacagccatttgggcagcattggagctgcttttccgcagctgctagcaggccagagattcgtggatgtaacactcgcatgcgaaggccaacaggtgcactgccatcgtctggtgttggccgcttgttccacctactttgaggcaatactagcggagcatccttgcaagcacccggtcatcatattgcccagggagatcaagctatgggagatccaggcgcttgtggacttcatgtacaagggagaggtcaatgtcacgcaagccggtcttggccagttgcttcgctgtgccgaacaactgcagattcgcggtctatacggctctgaggcaccgataaactacaagaaactccagcaggcgagtctcgaggctgctaaggatccagctgcaaccacagcgcgaagcttcaagcatgtggacagcgcggaaacggacgatgcagccactaattcaaccacctcaacaacaatgaccacctcctccgctccaccgctaccggttaaccatcagcaacccacagtattgaagcgccagaatcccgatgctcggcagcagcagcaacagcagcagcagcagcaggtgcagcagcgaccccagataaatggcagtaatgctcaacagccatctaaggccacctctacgaacgttttgggcagccactcgaatgcaccaaccgaggatgactccggcgacgaggtgccgaacaattggaatgcctacggggagcaattcgatgattgcaatatatctgcgcaagccgttgacaacaaaatgaatgtccacctatccctgcagcaggcgaggtttgtttttgcattaatatgacaagtatctctggataaatatatatatcttttcacaggatgcaaatgcagcttcagcagcagcaatacttggattcaaatgttgaggacgaccacaactatgtggccgctcatgatgaaaacaatgacagcagttttgcgacaggagtgccatgcggatccgggctatccctcagccttgacactgatctcgatacatcggccaatacttccggaggactgagccatagctcgatcgatggttatacttcatataagcgcgttcgacgttcagaagcatctctagcacaagcggccaaatgtgtttcgaagggcgagacattccaaactgtcagcaatatgttcaatattcctgtctcaaccattcgtttctatatggcgcgaaaaggaattcttccgaagcggaaacgtggacgtggtgcttcccatgccggaaacataataatcacaacaaactcaggaaaactctcaaccgtcccagcgagcataactcatcccccagcccatccgcatatccacaccaatccccttcctcacacgcagtctcagcaaatgtccatggacagcctacatctcaaggcgggcatcgcaaataccagtggcagcaatagtccggcaactgcaacggcaacgtctatgtcaccatcatttgatatggccacaacaggtgatattgtgccttttcacctccatagcgatgcggcggcattcaaactcaacgatcagaagctgcacatgatctaaccacgcaatttgccaagttgtgctgtactagtagggcgtgtattaatagagagggatttccaagcagtagctgctttctttcatttcggggtacgcatcggctcgtgtgggatctttagtcataacatagtcaacaaaatacaatttatacataggtttacttaattacgctttggagatgccacagttttatccttggttgaaaaactcttgccgttcaatcattattcattttactttggcaatcataagaaattacagtagatgtatgctatcaacaaggattatgactaaaaacttgcgtaaaaatttcaattatgtttcttgtcgccccagtactttaaggaattactgtattgttaataagataaataaaatcgacctggaaacttttactgggtattcgtgtgattgcaaagataagatgaaaatttataataaactcgaaggtcgtaaaagacataatcataatgctaacagcttaaactaaataataatgtaaagtaattattattggtcaaatacatccgatctattttaaaaccatgtacttttcctacaagaatacgcaaatcttcaatacttgcttacaattactcggtttgtttgtttgcttattttttttggtcattataacaattggccataaatgcaagaatcccaataataaattacgttgtgaaagtattattaaatacataagtactgtgtacgagatgattgggcaataaaagtttaaatgcattcaaagtaacaacaattttttttttgctaaatttattatttgaaatttgtactgttactgtcaatcattttttttttatatttgtacatatgtatgtagattagcacagtgcaggcgcagaatgttgaagtggaaacggcgctttttgaatacttctcatagaatctatttcttttcatgttcaatcaacggtcacactgtaagcctaagccagatataaacattcgcacgcgattttaattccatttaaagaacatggctcaagaaaatcaagctgtcgacaatggactgccctgcaacgcttacctggacacaagcctgcgagaggacgaaaacatgcaacacatcctgaaaaccttttacagcagcatcgaactcctggaagccgacacggagaaggcactggcgctacaggcagaacgcacattgaacacaaatgaacaaataaaattggatagctaccttgtgtacttgaacagcacactgtttttcatatacctgaaactgcagggtgaagatgcctcaaatgt

SEQ ID NO: 19031 - DNA, 2454 bp, DROSOPHILA
cgtagtttaaataacaattgattgctacagaagcagacagcgcgaaagacaatattaagtttataatttaaatatagcttgaaggcagagttaaaaaaggcagatactcagcgcataacgtgcaaatcgatttggcactttaatttgccgtttatttgtttatagtctgtcaaaacaaacagttgtacataaaaaaaggaaatataatcgcgcgcatgcagcatttctggttaaaataaacattaataaagcaacgaattgaatgggactcacggacaacgatgagggattgtaaatagagacattggttaatgcctgaaatgtacatatttttttgtgttgtgcacgatttgatgcaagaatagtgtgtatttttaaacaagactccggcgctgatacattcatacatagctcacgcgcacaggacatacagtcctaacataaaattctcgttcgttttcacgccatcgcatctattgtgttacatagcgcccaaaaaacgagaagtaaagaactataatcagcgaagtttcggttccttggcaaacaaacaggatatacaaggatctttaaatgagcgatagcttcgtaaactcaggagcacagtaaaggcgcgaactatattttgagtacgatgagcggcgctacacaggaattttgtgtacgctggaacagccatttgggcagcattggagctgcttttccgcagctgctagcaggccagagattcgtggatgtaacactcgcatgcgaaggccaacaggtgcactgccatcgtctggtgttggccgcttgttccacctactttgaggcaatactagcggagcatccttgcaagcacccggtcatcatattgcccagggagatcaagctatgggagatccaggcgcttgtggacttcatgtacaagggagaggtcaatgtcacgcaagccggtcttggccagttgcttcgctgtgccgaacaactgcagattcgcggtctatacggctctgaggcaccgataaactacaagaaactccagcaggcgagtctcgaggctgctaaggatccagctgcaaccacagcgcgaagcttcaagcatgtggacagcgcggaaacggacgatgcagccactaattcaaccacctcaacaacaatgaccacctcctccgctccaccgctaccggttaaccatcagcaacccacagtattgaagcgccagaatcccgatgctcggcagcagcagcaacagcagcagcagcagcaggtgcagcagcgaccccagataaatggcagtaatgctcaacagccatctaaggccacctctacgaacgttttgggcagccactcgaatgcaccaaccgaggatgactccggcgacgaggtgccgaacaattggaatgcctacggggagcaattcgatgattgcaatatatctgcgcaagccgttgacaacaaaatgaatgtccacctatccctgcagcaggcgaggatgcaaatgcagcttcagcagcagcaatacttggattcaaatgttgaggacgaccacaactatgtggccgctcatgatgaaaacaatgacagcagttttgcgacaggagtgccatgcggatccgggctatccctcagccttgacactgatctcgatacatcggccaatacttccggaggactgagccatagctcgatcgatggttatacttcatataagcgcgttcgacgttcagaagcatctctagcacaagcggccaaatgtgtttcgaagggcgagacattccaaactgtcagcaatatgttcaatattcctgtctcaaccattcgtttctatatggcgcgaaaaggaattcttccgaagcggaaacgtggacgtggtgcttcccatgccggaaacataataatcacaacaaactcaggaaaactctcaaccgtcccagcgagcataactcatcccccagcccatccgcatatccacaccaatccccttcctcacacgcagtctcagcaaatgtccatggacagcctacatctcaaggcgggcatcgcaaataccagtggcagcaatagtccggcaactgcaacggcaacgtctatgtcaccatcatttgatatggccacaacaggtgatattgtgccttttcacctccatagcgatgcggcggcattcaaactcaacgatcagaagctgcacatgatctaaccacgcaatttgccaagttgtgctgtactagtagggcgtgtattaatagagagggatttccaagcagtagctgctttctttcatttcggggtacgcatcggctcgtgtgggatctttagtcataacatagtcaacaaaatacaatttatacataggtttacttaattacgctttggagatgccacagttttatccttggttgaaaaactcttgccgttcaatcattattcattttactttggcaatcataagaaattacagtagatgtatgctat

SEQ ID NO: 19032 - protein, 514 aa, DROSOPHILA
MSGATQEFCVRWNSHLGSIGAAFPQLLAGQRFVDVTLACEGQQVHCHRLVLAACSTYFEAILAEHPCKHPVIILPREIKLWEIQALVDFMYKGEVNVTQAGLGQLLRCAEQLQIRGLYGSEAPINYKKLQQASLEAAKDPAATTARSFKHVDSAETDDAATNSTTSTTMTTSSAPPLPVNHQQPTVLKRQNPDARQQQQQQQQQQVQQRPQINGSNAQQPSKATSTNVLGSHSNAPTEDDSGDEVPNNWNAYGEQFDDCNISAQAVDNKMNVHLSLQQARMQMQLQQQQYLDSNVEDDHNYVAAHDENNDSSFATGVPCGSGLSLSLDTDLDTSANTSGGLSHSSIDGYTSYKRVRRSEASLAQAAKCVSKGETFQTVSNMFNIPVSTIRFYMARKGILPKRKRGRGASHAGNIIITTNSGKLSTVPASITHPPAHPHIHTNPLPHTQSQQMSMDSLHLKAGIANTSGSNSPATATATSMSPSFDMATTGDIVPFHLHSDAAAFKLNDQKLHMI

SEQ ID NO: 19033 - DNA, 7479 bp, DROSOPHILA
gtgctattcttaaaaaatcaaaacccgatataattgacatattaaaatcaaaaaaagtttattttggtgaagacgcgactatagttcaactgcgcaacgccgtaacttcttaaataaattagagtttgccattaacattactattcatagtagtattaaagaatcacatagtattcaattatttggtgttagccaaaaaggccatatagttgacgaattgccagaatatattgagcacacgtttaatttagagcaaacagacctagatactgttagtttaaatgctaatgttaatatccatcactcacaacataatattgagcaatataatgcgaagaaaaataaagcccttttggaatataaatttcgagattttgaagctctacgaaatattgatacaacacctggagttaataaaaaattcgaacctaaatatcgcggcccatgtacaaataaatatacaaggaaagtagagtgtttgaaagtgaccgttaaaaattaaattgatgtagatgattatcaactaacgcagttaccttttaagagtttattggaaccagcgagattgaaatattggaaaaacggtgtaaaccttaccatagcattgtagatagatagtaagatcgaggtcgttcataagccaggtagggcgaatgtaagctgtatgtaaatacaaaatactaggaacactaatatcgatagaactattagtatggtttgattgagatcgagattgagatcaaataaagtatattaaattcctatagcggcacagcagtagtattttcgctgaacaaattagtatatggtacatggtattattttatgccttgcgatatttataactcttaccgcgctggtcacactgtcctcttgagtagttgctgttgttgcgttgctgaattccgttcaaaagcgatgagagtttgtaaatagtcccttcgtcggcgtttcgtgcgtttatttacctttttcgccgtgttttgttttgtttttttttgcgttcactggctcgttcgctgccttccattcagcactgagagaaaatcgagcacccgacgatgcggtggaatttaattgctaatcgcattttatccttggctgcttgcggtttccttttcgcctttgttgttgttgttgctgttgtgtgcagcaaataaactcgtttcgcgcactagtgtgccctcgtgcgtgcgtgtgtgtgtttgtttgtttgcttgcgcggctttttgtttcttgtgatcattatttttgttattattgaatgcaaattcgacgagaactgtgacacttccaagcagtccaacaacaacaacaacaaacagcaacagttgacaacggaagttgtaaggtaagttatgctcttcatatatagtaaatgtaacaatattaaagtcgtcccaaaagtaactgttcatttccaaatagagaagaaaacgcccttgacagtcgaagtaaaatgcagtgcactgagaaaaataacttactaagaaaatgtacagtaaagcgaattggtatacaaaatgtatatatttttatatgatttcttctgattggaaatatttgcttcagaatcaacttggaaaatatgtcttgataacattagagttcccacctcggggcaaaaagctaataggatccctaggtgtacaagtaaataactttccagaatccacgagagagaacctattaactaagtaaaaaaaagcgtaatccccaatatcataattttcttttattattaaaattatctcaatagataatagaaagttccttgcacttgtaaccctaaattatttcacccttatttaaagattaagataaacaatattaaggcaatcttaaaatggagacaaaaaagataagattatttggccggcatttggtcactttaaacctggccatcagaattgtaacattttaggctgaaatatggaaatccaacaatatacgagattttttatcacaccttaaagacagccaacaaaaaaccagttgggctcaggaatggcaatatgttaatggatcagcaatgcatttttggtccgctaactggcgatatgtgggaaaaaatgtatgtattttttgccgtgcagagaaagaaggaagagaaaagcaaaggcacagaaatgatgacaagaagacgaggctctggctcttggcccgacttccaagtcaaatggaagttagccggtttccataaaaagcagctcagacaggcgaaaagagagggattctccattccccattctcgattctcgagtgagtgggtcacttgtggtgtctgcggctggcgagggttaaccgacgggtccgtggataggttaaagcgggcgaccagttgcgaaagttcggttgcgcgtttcttttgttgccttttcctttttttgggcgtggctgccacattgcgatgcaaccactgtgaactcccagctagtgggtaacctcgccacggatttgattgcacttcatcagcacggtttcttccgtttcagttccatactatatttaaatattgatttctttgttagtcagttaatatatatagtggagaagctggctatatgagcaacattaaatacttataaacctaatatgactttaaaattcaattataactttaataacgatttgctttaagttataatacttgtttgtaaaataaataaaacaaatcctgccgaaaagcctacagaccgtttgtgctacatagtatatctgtatattgctactaacaattgccaaccgagttaagctagagattaaaaagaaaatccgcggctcagcagtggaaagtagactgtaattacagtattgtaatgcctacgagtttccgccagatgttatgacgtctaaatgtggttactattactattcggccacaaagcccattcccagcgactggaattatgtaaattgctcaaattggcatcgctgggaatggcaaggccagtaaatgaatagaccggctaaatacacaaataaccagcgaatataaagagtcaagatacatatttaattatttacccgagaacttgttcggggcttatattaccttttttttatttctcctctatacggttttttatttgcctttttttcgtttcgttttttgggctgcaaaatttcaaacgcgagtggaacgtgtctgagctcaaaaaaaaaaaaaggcacgcgaaaaataaagcaaaacgatgtttaaggcaaaaatcaacgtttgactgggattatgaatacacattctcatttacacactaaattacgaaaggcaaataatgcaattgaaaccaaaaactgacttgaatttgttgattttccgttcctcgattgtcatggctttttattaatttgttgccttagctgggctcagcttataattgtggttattttctttgccggtttggtttttggttttcgtaggtttgagctgctgtttcttcttcaagaaatgagctcacttgaattcacatacttacttgcatacatacatacttgctcagcccacgttaaaatgtattttatttagtatggtatatagttaaacatattttcggcttgaaaaaatatattaatatgccttgtgatggtaaaatcacaaatgtattaaatataaaatattattacacactaaaatatttactttaaaaatgccattaacaaaagaaaatgtatttgatttaaatttcagttaatttttaggcccatgttaatttttttcgtttcaaaataattgcttaaatattacttctataaatccacctgattaaattaaatattgggtggctcaataagtctatttttaatggtacaactctcgtataggcttcataaaaaaaacataaaaatcaaagttctgtgtgtcatttttgcctcgtctgcagtcagctcgtttaaacatcaacacaacattggcaaagaataaaaagagatcataaaactctggtttggttcggattgcagttggccaaacagatgtggatggatactcacactgacttccaccagtttgccgaccaagcgaaatgaatgcgataggatttgatttttgccggcttggcttttttcccaacgcggttatttttttcgcatcctcggtgggtggcatttcagtttcgttccagagaagtatattttctcgcccaaatggcattaaatggccccgcatcaagtacaagctggatgacgatgttctggggaatcatcgtatttcatcaccccatcctccagagcccctctccttccgcctagaagttcatagctcggtgaaacacaatagtgctggttatgcaaagacactcaaaggaattccgcagaatcgccttttgaagatcgggttcccgaaagtctccgattgaattggcttttcaaatttttgcaagccgtgtagagagcaatgaatgcatttctctgaacgtgctccaactgggagtaggaaagttagtaattcgatgttaatttttttatattgaattatacaatactatgccatagatcgacaaaaaatgtttagatgtatatattatggtatataatatatttattagtttcccagaagattttgcgatttatttaaggcttcgaaaacatatttttgtgatatgtttttcctgacctcagtatttatttttacattttttttacagaaattttgtaatattggatcccgttctttagtctcttaatttttatttttccgctctggaagcagcaacctatattttgctatttaattgttggctcgttcccattgaattaagtttcatttgggaaaattttcaaatgggaaatttaacgagcttccgtcgcgttttaatatttttcgtactttaatgatttaacactatgtgacccactgtgccgcattttaccgacccgccgccagtcagccagccagcatatgttttgttcttttcccccgactttttccctgcttttttaatgtgtttttccatttcacactttatggtgttgcagctggttgggaaaagagtggaaatgggaagcagacgcattttacagcggtgcacatgtttcgatttcaatttccctccctgcgaaaagtgcattgccaatattgctattttttccgccagcaattcgatgactttcctctccatctatcgctggcttctccatctccttatccaactgctcttcctcctcctactcgttctctttatcccccgcactcgccgccttgcacatttgcatccaacactttttgaaaaccggatgcactttgtcaccgtcgctgatctttaatggtgcgtccatatccgtgtgtgtgtgtgatgaatatgctgcggtgcactggaaaagatatcggatatgaacgtaaccccatttcacctgtctaatattccagagcagcagtcacgcatttaacatttgagagggttaataaatcatgaaaaactagtgaaagcgtctcctcgcccatacaacacctaaaatatcaaattgtatatcgatcatatcgagagtgtgtcgataagctgtctaaattaatcgataaaatgagaaaataaaagagaaaactaacaatttcctatgcttttaaaactgactagaatggaaaacagatcgtttatggtatgtagcaatatatgtacagatgtatctaaaaatccctgctttttggggccattcgagaatagctctttaactagagcatactttgcatatctgttgtattaacctcgtttttcgcagtgtacgtgccatgtgcgacatgtggcaattgttggaggcgacacctttggcagcgacaacggtgctcccatttgcaatgtcaccatgtcgttccaactcgccgctcgtggttgtctagtcgcaagttccattctctataccctagatgtaaatatggcattccctatactcggagtccctagcccataaccataaacgcacattcataattctttcaatggacagcgcagcataaatgcagacaataataaacaataccaaaacaggcgcttccgttttccggtcgtaagcagtgcaaaaacaaaaggactgaataaaaatcgtagttttgtattttttgttgctgtcgctgtgagttcaacaaaccgccagcattaacccttgttcgcccctgggatacacgcactttgcgtgggacaaagatggccttcattttcaacttggggcttgagtttaattaaacgcaatgcgcaaagttgaatttaattgaatcaataagctaaataaattaaaaaaaaaaacacgcccaccttaaaaaagaaagctgaggtctgttaataaatagaatagaatactctttcaagtaaaaaatctcattaaaacaatgaatatgaaattttagatttgtaacatgaggttagatacgcgctcgaaatgcatacgattcttactgttacccataattaataattattattggtttgcgcaatagtttttaataacatttctttgctttttttcaatgagtatatgtgaggatgtaaaatcgctttgtctgctgcgtgttccgttaatgaagtcatccagtcaaatcaagttttcttgtttcactttgcctcactttactttgaattactttaccccccacacagccgcatattcacaaaaaaaaaatacagtaacctctacagagcgaaaagagaatataaattgctaagcaaataagaaataaattgagatattagaaagtacaatagtttggtaatacaatcaaatacaacagaatccttgttgccaccaaactaaatatatatttcattataaaaatatttaaaaaagatgtacatttataacttatgtgcatatgtgcatcatatgtacatatagatatatatatgtatatatgaatctgtaagctcaaggaacataaaaaaaaggtttaccacacacaaacgaccttatttctcatcttattgcgactctgccattttttcttccagtgcatgcatacaacttggcccgctgattgtggtgaacgctttgtcttcgttgttgtcgtgttaaatgcaattgctcgctgctgttgctgccgttttgctgctgcctttgtgatgacatcacgcatttgtttgcatttgcatttgcatttgcagtgcggcgcacgagttaagtccgtgatcgagggtggagccttttgtgaagatatgatgtgtaaatgtatgaaggtttttaagtttcagcagatagttgtagtgtgaagatttccaataaagaatacgactgactttcttgaagttcaaaatcagtatgaagtttattgtcagagagtggctactcgagtcctccgttttcgtcttatacataagtacataggttcttaattgtaagcataatgaacatgccgactcggcatgtggctggctagctggggacaatgttgcagtgcgacttttgtgtaatgtcagcattcggccggaatgtcagcattcggccggatgcggtgttccagttgccgtcttcccggttgagtgtccgatgatttgttta

SEQ ID NO: 19034 - DNA, 853 bp, DROSOPHILA
atgcgtgatgtcatcacaaaggcagcagcaaaacggcagcaacagcagcgagcaattgcatttaacacgacaacaacgaagacaaagcgttcaccacaatcagcgggccaagttgtatgcatgcactggaagaaaaaatggcagagtcgcaataagatgagaaataaggtcgtttgtgtgtgcttgtacttgatgcggggccatttaatgccatttgggcgagaaaatatacttctctggaacgaaactgaaatgccacccaccgaggatgcgaaaaaaataaccgcgttgggaaaaaagccaagccggcaaaaatcaaatcctatcgcattcatttcgcttggtcggcaaactggtggaagtcagttaagttatttttctcagtgcactgcattttacttcgactgtcaagggcgttttcttctctatttggaaatgaacagttacttttgggacgactttaatattgttacatttactatatatgaagagcataacttaccttacaacttccgttgtcaactgttgctgtttgttgttgttgttgttggactgcttggaagtgtcacagttctcgtcgaatttgcattcaataataacaaaaataatgatcacaagaaacaaaaagccgcgcaagcaaacaaacaaacacacacacgcacgcacgagggcacactagtgcgcgaaacgagtttatttgctgcacacaacagcaacaacaacaacaaaggcgaaaaggaaaccgcaagcagccaaggataaaatgcgattagcaattaaattccaccgcatcgtcgggtgctcgattttctctcagtgctgaatggaaggcagcgaacgagccagtgaacgc

SEQ ID NO: 19035 - protein, 253 aa, DROSOPHILA
MRDVITKAAAKRQQQQRAIAFNTTTTKTKRSPQSAGQVVCMHWKKKWQSRNKMRNKVVCVCLYLMRGHLMPFGRENILLWNETEMPPTEDAKKITALGKKPSRQKSNPIAFISLGRQTGGSQLSYFSQCTAFYFDCQGRFLLYLEMNSYFWDDFNIVTFTIYEEHNLPYNFRCQLLLFVVVVVGLLGSVTVLVEFAFNNNKNNDHKKQKAAQANKQTHTRTHEGTLVRETSLFAAHNSNNNNKGEKETASSQG

SEQ ID NO: 19036 - DNA, 2705 bp, DROSOPHILA
gcggcggcattcaaactcaacgatcagaagctgcacatgatctaaccacgcaatttgccaagttgtgctgtactagtagggcgtgtattaatagagagggatttccaagcagtagctgctttctttcatttcggggtacgcatcggctcgtgtgggatctttagtcataacatagtcaacaaaatacaatttatacataggtttacttaattacgctttggagatgccacagttttatccttggttgaaaaactcttgccgttcaatcattattcattttactttggcaatcataagaaattacagtagatgtatgctatcaacaaggattatgactaaaaacttgcgtaaaaatttcaattatgtttcttgtcgccccagtactttaaggaattactgtattgttaataagataaataaaatcgacctggaaacttttactgggtattcgtgtgattgcaaagataagatgaaaatttataataaactcgaaggtcgtaaaagacataatcataatgctaacagcttaaactaaataataatgtaaagtaattattattggtcaaatacatccgatctattttaaaaccatgtacttttcctacaagaatacgcaaatcttcaatacttgcttacaattactcggtttgtttgtttgcttattttttttggtcattataacaattggccataaatgcaagaatcccaataataaattacgttgtgaaagtattattaaatacataagtactgtgtacgagatgattgggcaataaaagtttaaatgcattcaaagtaacaacaattttttttttgctaaatttattatttgaaatttgtactgttactgtcaatcattttttttttatatttgtacatatgtatgtagattagcacagtgcaggcgcagaatgttgaagtggaaacggcgctttttgaatacttctcatagaatctatttcttttcatgttcaatcaacggtcacactgtaagcctaagccagatataaacattcgcacgcgattttaattccatttaaagaacatggctcaagaaaatcaagctgtcgacaatggactgccctgcaacgcttacctggacacaagcctgcgagaggacgaaaacatgcaacacatcctgaaaaccttttacagcagcatcgaactcctggaagccgacacggagaaggcactggcgctacaggcagaacgcacattgaacacaaatgaacaaataaaattggatagctaccttgtgtacttgaacagcacactgtttttcatatacctgaaactgcagggtgaagatgcctcaaatgtgagtgcaatatatacacaatacacaattcacatggcgacaattatcatttaatgattccatttcagcatgctgtgatgcacgatttgcgtcgtacaagggacctacttgcccgcgataagaaaataaacgatgctctagcggcgccaagactggatatgcccgctgccaagcgatttatcgcagctggaacccacacacgatttgtggacatgaacggagttatggtctccgaaaaacaatataataaaagcaagcaagaaactcccaaataattaaaatcacaaagtgttgattctatagtatagcagcctaaaaggatcatttgcctttgtttcgtcgttacgctagacaatgacagttgtattaaaaaatgtatagaaaacacgatattttcttactgaaccatccaaaacacaagcgtcacaagcaatcgactcatcaaagaagtcaagttagtacaccttaatgaaactgggtttacaaactgaaactgtttgttttttaaatgaatatcaacaacgttctgtatatgaataaactaatctaggtaaaaatgaaaacgaagaaaaatgaaatcagaattatttgtatgaatatggcagcattctgccatttattctgggcttcctagattccaagaccgcgtcgtaacaacgtcttcccccaatgtttatcgccaattttttgtgcatgcaggacaaaaatgattatatgtaccttttcgacgacaattccttcctgtggataaggccagttggagaggcacaactttccgaggtgctggacccttcgccctttcgaagactacagcaaatctgcgaggcgtcccacccgcaggattcctcgcctttattgtataaaaagctcctgcgtaccgttcgttcgtctagctccttgccccatcctttgtcatgcccttgatcagtcaagtcaagacggtatagattctatcgccaaaaggtgcttcaaaatctgatactgctgcttacctcatagattaagattttattgttgggactcggctttccaaatgatatatacaaaaacaaaaaaaaaaaaaaaaaatgtttggagcaaatcctaaaggtgtcgtttctggagcacattgagtgtaaatgtcaaaaatagtattgaagaagatcaaagttcaaatcattgactaattaaaaatagtattgcataggaacaatgttaaaatatcgcctacttattatccagcacttaaacaagatactatatacatatgtatatatatttttttaaatttctttaatgcctcttttaaattaggatatagttgattaataaatcaatattaacaagagagaatgctatagtcgagttccccgtctatcagataccctttactcagctagtgctctat

SEQ ID NO: 19037 - DNA, 637 bp, DROSOPHILA
ccagatataaacattcgcacgcgattttaattccatttaaagaacatggctcaagaaaatcaagctgtcgacaatggactgccctgcaacgcttacctggacacaagcctgcgagaggacgaaaacatgcaacacatcctgaaaaccttttacagcagcatcgaactcctggaagccgacacggagaaggcactggcgctacaggcagaacgcacattgaacacaaatgaacaaataaaattggatagctaccttgtgtacttgaacagcacactgtttttcatatacctgaaactgcagggtgaagatgcctcaaatcatgctgtgatgcacgatttgcgtcgtacaagggacctacttgcccgcgataagaaaataaacgatgctctagcggcgccaagactggatatgcccgctgccaagcgatttatcgcagctggaacccacacacgatttgtggacatgaacggagttatggtctccgaaaaacaatataataaaagcaagcaagaaactcccaaataattaaaatcacaaagtgttgattctatagtatagcagcctaaaaggatcatttgcctttgtttcgtcgttacgctagacaatgacagttgtattaaaaaatgtatagaaaaca

SEQ ID NO: 19038 - protein, 159 aa, DROSOPHILA
MAQENQAVDNGLPCNAYLDTSLREDENMQHILKTFYSSIELLEADTEKALALQAERTLNTNEQIKLDSYLVYLNSTLFFIYLKLQGEDASNHAVMHDLRRTRDLLARDKKINDALAAPRLDMPAAKRFIAAGTHTRFVDMNGVMVSEKQYNKSKQETPK

SEQ ID NO: 19039 - DNA, 12248 bp, DROSOPHILA
agcagtgcattaatgccgagtgcgttgcgccggagaagtgcgcctgcctacctcgttaccgatttttgcccgacagcagcaccgaatgcgaaccgatttgctcgaaaggatgcctttctgggcaggaatgcgtggcaccagacacctgtgcgggctttgaatccctaataagtccgaccactggcaaacacctggcattccattggtccatgtttgtcctggcaattttactctgcctggctctggtaatgattcccctgttggtgctccgggaaatgcagcgacgtcgtcgtaatggcgacaagcaaagttcccggctaatcgagaatccttcctatggagttgtgcaggcaaacagcgaagatacgaacagcgagttgggcattggattgggggattaaccaaatttattttagagacacccgataaccagatagatctattttttttaaaacccctaggtcaaataggaactttcgaatggttaaggcaggaaaatgtttgtctgtggaaatattttaatttcaatttttatggcttggtttcctttacaatcttctcgttcgattaagttttacactgaaggatgcttggcatcgaaaataatacacacgtatataaatatatatatatatatatatatagttaagctaaacatttatggtttaaagttaaaaacataatctaccgtaataaattaggtaatacttaatattcattgtcggcttcagtttctcaaaatgttgttcatataccagatctagttcacttaaagtatttatctaaacaatgatcaatacaatgttatgttgatgcacaacatctgagaaatgtaacaatcatttgagaaactggagttgtgactgatcctttcaacgttgttatccctttggtttgttttgttgatttaatgggatccggatcttcggttgttcttacttaacaaattggctacttaatgctacaaatacattatattttgtatatgcctaatgtgaattttattaatttgtgtcttacttagcctaagtgccaacccaatcgaacagccctcatcaactccccagcccaccccacaatacaatctatgaacacagtcagcttttgtcctgttccccattacttttatagaaaggtctcctggttggccccacccaatcttcgccagcgccagtcccaccatcatagtggtgcatcgttgggatcgggaggaggctttgccggctgcaggaccaccgggggtggggaggtggtggcagcggtggttggagctataaggaagccactggacgccccaggaagtggcatgcctagaaaactggctactcccgtgttggccgagtcgccatcttccatgacgacagaactgtcggcagccgagggtatggtgggtaggaagcgtactcccaggcgaggtggtgatgagtcctcttcctcctggactgcttcctggcggaccaatcgtggtttaactgcatccaactgggccttcccgttgtgggctgtacatagcaaaggtgtttctacttatatgttaatattttgggtctgccacttacctatgatcgagggcaggggtgtgctgctgccggcacttgaccgggataaccggaacgtggaggtgctggcggtggtggccgaggcggaggagtcattgcgcgagctggacaagttcgagtcctgcgacgttttccgcgtgatcagccaggcggagtgtcgtctgcgcccatgaccgtgcggatgagcatgtggctccagcatcttcagcggcatgctgcagttacccggtggcacgggtgctgaggatggtggaccatgtcgccagctggatgatcttgagctgcagaaattctcgctggaaatggaactggctcgattctggcgttgctgacgcagttcagcaaactgatactgatacggattggcggctgcggcagtataggctctctggcgtcgctgttgcggttgccgtcgctgtttgcgacgccttcggttctccccgcagcagaatgttctcaatctctgccacatgctcggtgtctgctccattttatgccagttgggcatttcgctgggcagcatccgtagacatcgacagcctggcggatgtgccaccgctgcagctggtaagagtggtggcgggagatcacccctcttggttcttgccactgcaccacgtccacccggaccaccgcctcccacgacgcgggattcttcgaaatgtttgcacaacgtcacacagtccttcttgaactgcttggtcattatggcgtagagaaagggattgcagcaactattcaagggcagcacaaataccgtaaagatcttggcctgctccagcgaaatcagttgcaggccaaagatggcagtgatcgagaagaaggcgataggtgaccagcagaggaagtcagtaaagaccaacagagccattcgcttggcaattcgcgaatcattcgtgttccatgcctggctgccccttatggcccagtacatcttcaggtagcaacccatcagagtgagaaatgcgcatccgttgatgaacatcagtgagattacataggtcaaactggccggtccagtggtggtctcgaatggcaaacacacggcaaacttcctgtagtccgaaacaccaaccaaaggcatcaaagccatgatcagggcaaaaacccatcctacactcattatatatcccgcctgcttcaaggagagcctcttgttcaggtgaatggcatgagtgatggcgtaattgcgctccaaagtgatcacagccaacgtgtaaacggataattctgagctgagtacggccagaaaaccggacaactggcagagcacggacatctgccaaggaatggcaaacatgcgaaattcgcccaacgtcgccgcatccacaatggccagaatacccaggtagatgcccatgaagaagtcggccgcggccagattacagactagaaatcggggcacatccatctttgatcgcgagcagagcagcacaaacaccaccgttccgttgcccaggagagacaacagaaaaaccacccacactccgcagcgcagagtccaccaatcgaagagatcggcgcagggtagaaaaggtcctggcattggcaggcactgcaccgaacccggttgaaagtcctctgtggacataccagagaatagtccagtaccaaagccgtatcccgtggcaggaccactcacatcgtgctcctcgaagtactcctccatgtagctggtggcgatttggcctcccgtttgtgtttgcagctgctcttcgttgaagttaatagccgtctcccaaggatcatgcatggaagcacccaactgcttgctgagattatctggggagttagaaaaattaatgtaatatcagcctagacattgaaggttcacttacgcatttgcggccaaatattcatcatgctattgttccacaaagtcatatcgaactcggcatcggagggaaagagtacagcctcctggacctgggaggttttcttctgggacgacatggcaaccagtggtagaaacgcgcagcagtggtaggcataagagagtataagagtttggattctgggaaaggtgtccggtggcgggaactccctaagttttggattgttgaaggtctttaggtgtagcaaagcgcgcagtcccgattcgggcaactctggaaaaatattgttgcccaaattgagatcctcgagggctgtgaaaccggaaaaggcttccttgtgtatgtacgagatctcgttgccctccaggtcactgtgaataatacgaataatactatacactctgcaaatatatttggtttgagttaacgcacagaagttggagcttcggaatgccctgaaaggcatcttgtggcagtgccttgattcgattgtaggagagcaacagatcgttcaattgcttcaatccattgaagggctttccctgaatcttttcaatttgattgctcgatagatctctgggtggaaaatatatgtattatatacttgaatctgtttcttaatgccgaacttacaacagccttaagtctctgcagctacttaaatttgggatgcgttttagggaattggtttttagttctctgcagttagaattattacaatgtgattaaaaactaatcatgatgtcataagttttaaaactcacaaactcttcagtcttggcgtttggcggcatagattcgctggcacctcctgaatgccggcacgatccagtttcagtatttccagcgcatggcaggcctcaagttcgggaaacgagcgcaaagttcgcacatccgataaaatcctgaaaaatcgagcgctttaacttagctgacactcccggatattgagatactcacagcttccgcaacttggacatgccccgaaacgcccctggcgaaattgtggacagtggattggccctcatgtccagcatttgcatgctcctgggcagttccgtgtcgtttatccagcgcagtcgattgctggtgatggaactgaagggtcgaggttgagagttcgagagatcgagaggaggggtggcagaagtttaataaaaacgtttatccaatgccaagaaaagtatctttcggaatacacactgctggcaagtggcactcggatgcagctgcatttaaaagtcaagttttgcaaacaagccaacaaagccaaaaataaactgtgacaagagcatacttttgggcgctcgtattgttaacgtctttttgtgtttcttggccaacatttagggggaaatgaaacttcagagtgttgaaagtggagttcacctataaaggcgtttattcaattccccgacacgaacactttaattttcaaagcacacaaattaagttgcatttagattgcatctcgtcagaatatctggcagcaggaaaaggatctatttgtttatctagtctactttgttgcagcgacttggcattctcattctttttcgcttggagtcaacagaacgcagaagcttttaatccttttaaatttaattttttgtttgtgccacattccttgcaaccgcacacacatgacggcaaagtggagagggacttggattttctgcttatacactcgtacaaatttatttagccgcttaattccccaatcatggatgcactggctctggagatgcagcacagcgtggcttttatcgcaacatttaacatgctcataattatcctgtttaccagaaattgaatttccttggggagttcttggtccatgccatcgcaaacgatgtcagtctggatgtggctgctttgctcctttcggagtttgaagtcaaggaatcggtcgtgtgacaaaaacaaacttcaacttgcagttcacgattcgtggttggcaggatatggaatagaatcgagccggctgcgactggatatggccataaattggacaagtaatgatgcgttatgattttcggtttccgcctgttcgccgccccacaaagtgggaaatgtcgtggcaagtcaataacaccagagtgtggcagttgcaagtgctcccagccctctacttttagcttatacggaccaaacacctgtgctttcttgttaatctgatatacttacagctcctgcagttgcgacaatttgctgagtccctcgggcaggctgcttattaaattatcgtccagctctctgcaaagggagaatatagtgtataatatggtagctgctttgaaatactattcttgatttcgattatagaaattgagttgcaaattttgctctcgcatttattttccaaagaaatcacaaccatttgcatgactttgtttgggggtcagttttgctacgtgacatcacgtagctccaagcggtgggttttccatttccgatggggtgactcctggtagcaaatgcaaatttatgcgtgagcataaagtttgcgagtatttttcaacaaaatgcattgatttcaattatttatcatattacttaagaacttcaaaaacgttgaatagcattgcttaatagacaaattggtctgattatgcttacgtaaaccagttatccttacagtcataagaaattattaatggttataaattattgaatggaattggcttaacaaaatcacttaataagctttaagtctttaaaaacaaattgaaataatgcagtaaatgtgtcgtcgattgaggccacaaaacagcgaacaaatacttaaatacaagtaaaatgttcattaatttccaactttttatctcttcaatgtaatggtgttatttcattgttatagttttttaattgccatgcaaaagtaaaaacaaaagcttaaatgagttatttttatcagttttaaataaactttacaacgcgacttttgacatatttttgacctattatactttaaccatatgccaaatgttgctgagaacaacagatgctttcgccaccaactttcaatctcattttcctacacattttcacccacagatgacctactctaacttcactttcggtgggcgtgactatgtttccataaatctagaaacaaacggcactatgcacacggaatattttcctcattctcggcgaatggttagatttacgcattgcacgtggagaagtttttcactttcacttgatgcattcctcgcaaggttggccacgcccccaccttagtcctcagcgacaaagagaatgcgactctgccagtcacaacataaatttgcatatttgtctgtggctgctgaaatacatgtgggtggctaaggagccgaaggaagcggttttttttatgcgcccacggaaaagcgtgcagcggaaaagccaaaaatttgcggtaaacagcagcgcagaacgtcaacgctggcgacgacaatttaagctgtcggaaccgaagcgaactgaactgagcgcttaggggggaaaaataaagaaaagccaaaagttttccacgctcttgctgtaaaattgaaatttattcgagccatggccgcaaaacggataaacaccatttccacttgccacttctgctcgcttgaggtatcatcgcgttttctgtacattctactggcagttttaatgggctaaataagtttggctgattcaaatatgataattataagtataccctaacttatgcattagactatggtctttataattgttatatcttataaaaaaaacccatgccttggcatttagcatgcttaaaaatgctgctcagatgccaaagtaaaagttacagggtattcattcgctcatctttaggcgagaagaaacccatttttctatttgatatcaattgcagttttgtgggtcgtcttggtgtcagtgtgtttatgtcatgtgccaaattgctcatgtgtgtgtttgcgtttcctgcataaagttcttaaagtcttcaaagttatttcggacggttcttgctacttacaaaacttttaaggctgttaaatttttaagagctcccgcagagattttcatgatttgatttcgcttcagcaaactgcaaaatgagaagaaataaatgctaaaacttatgcacatgaatgtggctaccaggagactccaattacttacagcacgatcaagtttggcattcgcggaaagtcctcgtcgtttattattgtcaacaaattgctgcccaaattgctgtcgatggttcaagtggaagcagaagacagaaattatgagcaatcgcatggttttatgatcccctaactttcgttttttttgtgactcgagtaagtttatagattaaaaatggtaatatacttgggttgagaatgattacggggtcaatgttcgatgaaaacatgcacataaaattattattattggctgcggtaaatttgataggggatttaggtgaagtattaagtcaattgtattttttattaaataatatgctttatctctgagtaattgtttggttgtaagccataaattagtaataatgtaaatatggagtttagacaaacccgatttcgttgccctgcacatgaattgtgtgacaaaataattagcctaattggattgcttacattaacacaaaaccttttaccagactacatgccaaaacatagaaccacatagtaatatacataatgcgctcgtagcaacagggattaaggaatcaaaagttaacacatttggccaattcacttggttactaattttcgtagcatgcaggacattaattagtttaaaaactctcaaatcgaggcaagtcaaggggctcacagtgcttctagggttctgagtccggccaaggcattcgtgggaatgcgatagaagagattgccctccaatcgcaaggtgcgcagtttctgcaggtggcccagacaatcgccatccagactgaccagggcgttgccattcagctgtctgtgtgggttgtttgttatttttttttttttttgtaaccattgcaaaaatatccaaataaaacgggggaaaacagcagagaaaagcggaaaatatgagaaaatagcgtgtaattgctgggcaagtgcatgtgcgtgtgtcagtgtgtttgccccgaaaaacaaacaaattcatccggctgggaagtcctcgctgtgctcctacatctcctctcggcgatattctcaacttaattgcagtgcttaaaagcaaacatcacacacacacacacacatagatcgcggtccgtttttattattttaaacatttttctttgcatacttacaggctggtcagctgagcaagtccttggaacgactgcggtggcaaggacttgaggccacagttctgcaggctcaatcgtttcaatttggccaggccatagaatgcattgggatccatattaatgatgctattgtcggacaaagttctgcaaataaaccatcccttggtcaacagataatacgtatataaacgcataaagtcaaactaaagtcgagtgtcgtcgactaaagtgcaggaaattgcaaggatagcaaagtcggtagtaattaatcgtgccaactcgctgaaatatacagcgtaatcaagtaatttatattaccaagggtcaggacccaaaaccaggagtggggcatctgcggtttggtcaggattgggtcgtacgctgaccgctgtgatatttttctcgttttttttttgtttggaatcgctgtgaaattgaataatgagttgccatgccccgagacggcaactttgactgttcaaaatgacgaaagtttttatattgttgtcatatttctacactttcgctgcagtctagcacagattaaaatggggaagttttgtggtttctaaaaattcaccaagggtgcttgttgtttttacaacagcttaatttgggatgggcaggataatctgggccatgaatgaaattggtgaatttatcattaattaaagggaccataaaactggggagctacatttttacatcaatcaggacttatactcacagctcctccagattgggtgccataaaaaatgagttcgcctccaatttggttaagttgttgttacccaaatctctgttggtgaaaatgaatgacagtaggaaaacaataaacaaattaataactgtatcgctgccaacatttcatctatcaataaggcaaagagaaaacatttgccattgtcatgcaatgaaaacgaggcttaaatgattgccgcgaagggggagaaacctctgtgggccatcaatcaaaatggaaatggcataaaaacatattgcactaacccaagatctctgcacagcggaaaatggcgtaaaaatgatgataaaccgccttcaggtattttgtttttttcttttttgggaaatgctctccccttgccaagcgaaacttttgccaaaaatgcaaagattcccccattcaaagtgagtgtaggatctgcgattcgagtgattttaatgacttatgactagtgtccctgagcgatgcgttaattaataaattatttatttatttatggaccgttcgacttggccattaatcagttgaaactttggctaagccaaaagcggttcccaactcctttgagagagcccgtcggcggcaagaaaacgtgactcacatacgtgagcaatggctgcgatgacgacgcgacggtgacgatgattgcgaaatgctgcacaacgtggcgtatgtgtaattagattaaaccgcatgccaaaatcgtccgaaaccgaatcggaccgaagactgcgaaattgacttgtaattatgcgatttgcggaattttagcagcgagaaatggtccaatacctcgtgcttaatcgcttaataaggcaaagttttcgatttattaatcgcgtaattaagcaaagaaatcaaacataagaggactagcaaaacaaagtgtgctcgacatattattgctaattttaatcaagtttaaatgtaaaattttctattgttactttacaagcgtagaacagctgcttaatatcttcagtttgaaacattatctttgaactccgaaatttgtatttagataggaaagtaaaatttgcatttatgaatatataacattgtcgaaatgcaaattctttaagcgcgtacatttgaaaatcccccttttttttctcaacatgaataatttcactgccttctgcaacattaatatcattattattattatctttaaaataatatttaactattatgttgcaatggatgaatgttatgtgtaatttgcatactctcttagaaacaattaaaatctgttgaaagtagtaaagtatactcacaggacgaccacctcgttgggaagattgacgggcacggccaggatacctatgccccgacaactgagccgcaggacctccaggctgccggtgcagtgacagtgcttctgcaaccaccgctcacaaatggagtgcagcgttcgcttgcctgcgatgacatcagtggcggttgaggcggtggagagctgactgccatggtattcctgcaaggacttctcgtacaggatctgggcctccttctcgggatcggccgatggcagcatcacgttctccctgatgcccgtaggagtgacactggctgatttcgaggttctattcacggtaatttggctaagttgttggacggtttgtggattttgctgctgctgctgctgcagatgttgcaggtggacatatggctcttgctcctggctattttgcatatccggagcgggattttctttggtttcatcatggcccattgccgatggcggcaacaggagcagttgcagaagcaattgcaacagcagagggcagagcgccaggcgccagctccaccggcaacgtgctgccatcgtcgatgtcgctgtcgtcgcttttgttgattgatgctgtcaagcatttgtcatttgatgacagttttgtgtgcgattcgtttctcgctcatgattctcggctgccgttgcggttccttaaactcagctcactcacttctctgccgcagttcgaatttatttcattcactttgcattcactttccgcctcagttgcactttattgttttttggttttttttttgcactcttacatatatattgcacgacggcaaatggcattcactgtgattgctagcgttttatacgctcaatgtggctcaaatgcagcgaattctcggtttatcggggtgattgatgctgtctaaggggatgcgataatgaggtgtcagtcagggttcgtaatttattataatttttgttatatgggctcttgatgatttgcggctaatgcatgccattatccccagtagcacattatgctattacaaatttaatgattattatctatttatggcaatataaatttaaattgtatgcaaaattttaaaaagtagctatattttgaagccaaaaggtggattctcttgtccagtgccacaaactttgtgtcacattaccctcatcatgccggtacaaaagaaagtttttcacccgcacttaacccgaattcataacgtacaaaattagccaacggcccatcaaacacttcatccaaaacaatggaccaaaatcactagaaggcccaaaccgttggacacaggaccgagtcttgttcctgtcagaaacaaaaggctaagggaagagcacacacacacacacacactggtacacacacaaacctgatgaatgacaaatttgacacagaatgtttccggccgaatcgtgggccacgacccatttttcaccactatgaccaagtcataattaatgagtctgttgacagttttagatttgcgatgggctgcaaagtgtcgacgaatcgttttttttttcgcatacactcgtatgtgcgcccaac

SEQ ID NO: 19040 - DNA, 3909 bp, DROSOPHILA
atggcagcacgttgccggtggagctggcgcctggcgctctgccctctgctgttgcaattgcttctgcaactgctcctgttgccgccatcggcaatgggccatgatgaaaccaaagaaaatcccgctccggatatgcaaaatagccaggagcaagagccatatgtccacctgcaacatctgcagcagcagcagcagcaaaatccacaaaccgtccaacaacttagccaaattaccgtgaatagaacctcgaaatcagccagtgtcactcctacgggcatcagggagaacgtgatgctgccatcggccgatcccgagaaggaggcccagatcctgtacgagaagtccttgcaggaataccatggcagtcagctctccaccgcctcaaccgccactgatgtcatcgcaggcaagcgaacgctgcactccatttgtgagcggtggttgcagaagcactgtcactgcaccggcagcctggaggtcctgcggctcagttgtcggggcataggtatcctggccgtgcccgtcaatcttcccaacgaggtggtcgtcctaactttgtccgacaatagcatcattaatatggatcccaatgcattctatggcctggccaaattgaaacgattgagcctgcagaactgtggcctcaagtccttgccaccgcagtcgttccaaggacttgctcagctgaccagcctacagctgaatggcaacgccctggtcagtctggatggcgattgtctgggccacctgcagaaactgcgcaccttgcgattggagggcaatctcttctatcgcattcccacgaatgccttggccggactcagaaccctagaagcacttttgctgaagcgaaatcaaatcatgaaaatctctgcgggagctcttaaaaatttaacagccttaaaagttttagagctggacgataatttaataagcagcctgcccgagggactcagcaaattgtcgcaactgcaggagctttccatcaccagcaatcgactgcgctggataaacgacacggaactgcccaggagcatgcaaatgctggacatgagggccaatccactgtccacaatttcgccaggggcgtttcggggcatgtccaagttgcggaagctgattttatcggatgtgcgaactttgcgctcgtttcccgaacttgaggcctgccatgcgctggaaatactgaaactggatcgtgccggcattcaggaggtgccagcgaatctatgccgccaaacgccaagactgaagagtttagatctatcgagcaatcaaattgaaaagattcagggaaagcccttcaatggattgaagcaattgaacgatctgttgctctcctacaatcgaatcaaggcactgccacaagatgcctttcagggcattccgaagctccaacttctagtgtatagtattattcgtattattcacagtgacctggagggcaacgagatctcgtacatacacaaggaagccttttccggtttcacagccctcgaggatctcaatttgggcaacaatatttttccagagttgcccgaatcgggactgcgcgctttgctacacctaaagaccttcaacaatccaaaacttagggagttcccgccaccggacacctttcccagaatccaaactcttatactctcttatgcctaccactgctgcgcgtttctaccactggttgccatgtcgtcccagaagaaaacctcccaggtccaggaggctgtactctttccctccgatgccgagttcgatatgactttgtggaacaatagcatgatgaatatttggccgcaaatgcataatctcagcaagcagttgggtgcttccatgcatgatccttgggagacggctattaacttcaacgaagagcagctgcaaacacaaacgggaggccaaatcgccaccagctacatggaggagtacttcgaggagcacgatgtgagtggtcctgccacgggatacggctttggtactggactattctctggtatgtccacagaggactttcaaccgggttcggtgcagtgcctgccaatgccaggaccttttctaccctgcgccgatctcttcgattggtggactctgcgctgcggagtgtgggtggtttttctgttgtctctcctgggcaacggaacggtggtgtttgtgctgctctgctcgcgatcaaagatggatgtgccccgatttctagtctgtaatctggccgcggccgacttcttcatgggcatctacctgggtattctggccattgtggatgcggcgacgttgggcgaatttcgcatgtttgccattccttggcagatgtccgtgctctgccagttgtccggttttctggccgtactcagctcagaattatccgtttacacgttggctgtgatcactttggagcgcaattacgccatcactcatgccattcacctgaacaagaggctctccttgaagcaggcgggatatataatgagtgtaggatgggtttttgccctgatcatggctttgatgcctttggttggtgtttcggactacaggaagtttgccgtgtgtttgccattcgagaccaccactggaccggccagtttgacctatgtaatctcactgatgttcatcaacggatgcgcatttctcactctgatgggttgctacctgaagatgtactgggccataaggggcagccaggcatggaacacgaatgattcgcgaattgccaagcgaatggctctgttggtctttactgacttcctctgctggtcacctatcgccttcttctcgatcactgccatctttggcctgcaactgatttcgctggagcaggccaagatctttacggtatttgtgctgcccttgaatagttgctgcaatccctttctctacgccataatgaccaagcagttcaagaaggactgtgtgacgttgtgcaaacatttcgaagaatcccgcgtcgtgggaggcggtggtccgggtggacgtggtgcagtggcaagaaccaagaggggtgatctcccgccaccactcttaccagctgcagcggtggcacatccgccaggctgtcgatgtctacggatgctgcccagcgaaatgcccaactggcataaaatggagcagacaccgagcatgtggcagagattgagaacattctgctgcggggagaaccgaaggcgtcgcaaacagcgacggcaaccgcaacagcgacgccagagagcctatactgccgcagccgccaatccgtatcagtatcagtttgctgaactgcgtcagcaacgccagaatcgagccagttccatttccagcgagaatttctgcagctcaagatcatccagctggcgacatggtccaccatcctcagcacccgtgccaccgggtaactgcagcatgccgctgaagatgctggagccacatgctcatccgcacggtcatgggcgcagacgacactccgcctggctgatcacgcggaaaacgtcgcaggactcgaacttgtccagctcgcgcaatgactcctccgcctcggccaccaccgccagcacctccacgttccggttatcccggtcaagtgccggcagcagcacacccctgccctcgatcatagcccacaacgggaaggcccagttggatgcagttaaaccacgattggtccgccaggaagcagtccaggaggaagaggactcatcaccacctcgcctgggagtacgcttcctacccaccataccctcggctgccgacagttctgtcgtcatggaagatggcgactcggccaacacgggagtagccagttttctaggcatgccacttcctggggcgtccagtggcttccttatagctccaaccaccgctgccaccacctccccacccccggtggtcctgcagccggcaaagcctcctcccgatcccaacgatgcaccactatgaaataaa

SEQ ID NO: 19041 - protein, 1300 aa, DROSOPHILA
MAARCRWSWRLALCPLLLQLLLQLLLLPPSAMGHDETKENPAPDMQNSQEQEPYVHLQHLQQQQQQNPQTVQQLSQITVNRTSKSASVTPTGIRENVMLPSADPEKEAQILYEKSLQEYHGSQLSTASTATDVIAGKRTLHSICERWLQKHCHCTGSLEVLRLSCRGIGILAVPVNLPNEVVVLTLSDNSIINMDPNAFYGLAKLKRLSLQNCGLKSLPPQSFQGLAQLTSLQLNGNALVSLDGDCLGHLQKLRTLRLEGNLFYRIPTNALAGLRTLEALLLKRNQIMKISAGALKNLTALKVLELDDNLISSLPEGLSKLSQLQELSITSNRLRWINDTELPRSMQMLDMRANPLSTISPGAFRGMSKLRKLILSDVRTLRSFPELEACHALEILKLDRAGIQEVPANLCRQTPRLKSLDLSSNQIEKIQGKPFNGLKQLNDLLLSYNRIKALPQDAFQGIPKLQLLVYSIIRIIHSDLEGNEISYIHKEAFSGFTALEDLNLGNNIFPELPESGLRALLHLKTFNNPKLREFPPPDTFPRIQTLILSYAYHCCAFLPLVAMSSQKKTSQVQEAVLFPSDAEFDMTLWNNSMMNIWPQMHNLSKQLGASMHDPWETAINFNEEQLQTQTGGQIATSYMEEYFEEHDVSGPATGYGFGTGLFSGMSTEDFQPGSVQCLPMPGPFLPCADLFDWWTLRCGVWVVFLLSLLGNGTVVFVLLCSRSKMDVPRFLVCNLAAADFFMGIYLGILAIVDAATLGEFRMFAIPWQMSVLCQLSGFLAVLSSELSVYTLAVITLERNYAITHAIHLNKRLSLKQAGYIMSVGWVFALIMALMPLVGVSDYRKFAVCLPFETTTGPASLTYVISLMFINGCAFLTLMGCYLKMYWAIRGSQAWNTNDSRIAKRMALLVFTDFLCWSPIAFFSITAIFGLQLISLEQAKIFTVFVLPLNSCCNPFLYAIMTKQFKKDCVTLCKHFEESRVVGGGGPGGRGAVARTKRGDLPPPLLPAAAVAHPPGCRCLRMLPSEMPNWHKMEQTPSMWQRLRTFCCGENRRRRKQRRQPQQRRQRAYTAAAANPYQYQFAELRQQRQNRASSISSENFCSSRSSSWRHGPPSSAPVPPGNCSMPLKMLEPHAHPHGHGRRRHSAWLITRKTSQDSNLSSSRNDSSASATTASTSTFRLSRSSAGSSTPLPSIIAHNGKAQLDAVKPRLVRQEAVQEEEDSSPPRLGVRFLPTIPSAADSSVVMEDGDSANTGVASFLGMPLPGASSGFLIAPTTAATTSPPPVVLQPAKPPPDPNDAPL

SEQ ID NO: 19042 - DNA, 3559 bp, DROSOPHILA
agcatgctccgaacgtgggttgctggccaattatctggttggcaacaggatattgcagcgagtttgcgtgtccgcgcagcccgacgactcccaggttccaggtccctgtcctttccaccacgaaagcagacgaacagagcctcaaaaggaaaataccatggttttaatactgtcgttatactatcgcaggaaaacacctgagaaataagggtgtggtgtgtccttatttcgggcaaattccacttatgctcgttttacatgaaaattgattccttcgtttagattcccttaccttttcgttagcgtttcaagggttttctttagaaaactatgttgttttatgcacaattaccaaaaatgatatttcaggatcctgattaacaagcttaatatgccctctttttaagcatatttaataaattaaggtattctattggttttaaagcgtttttaataaattaaggtattcaatttgctttgaagcatttttaataaattaaggtattcaattttcttttcaggagagctaaagtataaaaattcatggaattgactgtaatatttaaaaaaatgaacataaggtattgtacaaaatgggtggcatatgatttgattaggagtattataaaggtttcgtttaaaatacattgtagcgacattaaaaaggatttattactcaaacagctgttcttaatgagcggtattactcaagtattggggtttttaattctatgcgggtttaaaagagtttactaatttaatatagtttaattcccaatttcatactgcatgtttaatttttatgcacaatataaaaacaactgattcataaattcatatttttcaaacatatatccaaacatatagataatgcttaactaggagtgtgaaaataatgatttcacttattttgataagatgtgacgctgtggaaacgcaccgaaagctttaataccaaaccaaaattagtaagaccttttgtttcggtaattaccataggattgttccaattatacttcaaaacaattggatattatgtttaaaacaccacccagtcctgcctgaaaatagttaataatataaatatccaactagcaaagaagacgaaaagttatggcgggaatgaatgagtactctagcctaaagtatgtaaaatggtataatatataatcacgatgccatactaataaacatcatccatttatagatttcaagcggagtatgaaacgcacgatgatcacctgggcaaggagcatcggactggggaccgggatcaacatttacccgtgacctatggccctagcaaacacttgggaagcaggtacatccgaaatgaatccgaaatcaattcatttgttaaattatataaattcccattaatcagccttgaagagcgcgagaaggcgattgtggacgtcgtcggcgtacagtgggtctccctggtcaccgagaacctgcttagccatccgtttgtggtgctgcgccgccagtgccaggtgtacaatgcctcgagacgctatcatttgcatccctttcagcttctgcccagcatcgtccacctgcacagaaggcagggactgacgaccctgtggaagggcgtgggcagctgcctactggtgcgcggcatgacgctggccatcgacgactttatctcgaaggtgaccagctggcccaaggatgtgaatagtcgcaccacgctaaagcgtttcggacagcatctcctgctcaaatggtacccacttgacaccctaatctcgaccattctcttattccttttcaattcacagcataagtatcggcctggtggtgcccttctatgcagcttctctcgtcgaaacggtgcagagtgatattgccagcgagaaacccggtctattcgatgtattccgggagggaagtctgcgcttgttttattggagctctccgcaaaagggccgtatgctaccagcctgggctctaatcgggccaagtgtctcctttggcatcaccaagtatctgtttaatctcgtgatacggggcgtgtcctcacgcataatgcggcttcgtataaagaattcccaggacggccagggtggaaagtatcaggacaccacgctggaacaacagaatgcggacatctatgccagccttattgctatcataaccactgaggtcatgttcttcccgttcgaaacgattctacaccgtctgcaattgcagggaacacgaactataatcgacaacctcgacaatggctacgatgtcgtacccattctaacaaactatcaaggagtcgtcgattgctatcagacaacgattgtctccgagggagttagtggcctctacaagggctttggagccatgatcctgcagtttgcggcacacgtggccgtcatcaaattgaccaaatgggttgtgaatcaaatcgtagaggtcatctccaaccgaccaccacagcgaatagtgaattactataatctggatgagaatgcttgcaactccaggtccacgaccttgtcgccaagcctttccagtaccgaaatgggggagattagtcttgggcagaattcacaagactagttaatggctagtcaaattatattgcatatgtaaattatacaaatatttatttctttttgtatttttcgttgggtttattgggacgttagcatgaataattgtattttaagggtttgcttactctgcagttgcgttaaaaaaaaatctgccaattaaaaaatataactattttaaacactttaaactgagcttatattcttgcactttgtgtcccgaaaacgtcaggaccttgaaatgaatacagaaaaattaagtaaaaacagcagattgtcctgtggttggtgcgatcgtttctatgacaactaaatgatatggttgtgtatacaattcacgataaaaaaaagaggaaggagccgttaacttcacgctcattttgaagggaaacaaaacttttttcgaattcacgattttcattacgaccgttggcaaacacacgtacgattcaagctgacgtttggatacagaagcacagcttgaatgtttgtatttatatcgaaaggcatttatttgcaatatcctcgtgatccaacaaacaatgtatacaacaactgaacgttaacagaacgatatttaatatgatttctgttcgcaaaatcgtatgtcgtttgatgtttcacattttaaatataagttccgatcgttgccttacttcctataccacatctggagcgtcttcatccgcttaaccttcttctgcagctgcaaaacgccgtacatgagcgcctcggcggttggcggacaaccgggtacgtatatgtcgacggggattatcctatcgcagccacggacgacggagtacgagtaatggtagtagccgccgccgttggcacagctgcccatggagatgacccaacgtggctcgggcatttggtcgtagacctttcgcagggccggtgccattttgttggtcagcgtgccagcgacgatgatgacatcggcctgacgtggagatgcacggaacacaacaccatatcgatccatgtcgtaacgcggagcagcg

SEQ ID NO: 19043 - DNA, 1379 bp, DROSOPHILA
attgttccaattatacttcaaaacaattggatattatgtttaaaacaccacccagtcctgcctgaaaatagttaataatataaatatccaactagcaaagaagacgaaaagttatggcgggaatgaatgagtactctagcctaaaatttcaagcggagtatgaaacgcacgatgatcacctgggcaaggagcatcggactggggaccgggatcaacatttacccgtgacctatggccctagcaaacacttgggaagcagccttgaagagcgcgagaaggcgattgtggacgtcgtcggcgtacagtgggtctccctggtcaccgagaacctgcttagccatccgtttgtggtgctgcgccgccagtgccaggtgtacaatgcctcgagacgctatcatttgcatccctttcagcttctgcccagcatcgtccacctgcacagaaggcagggactgacgaccctgtggaagggcgtgggcagctgcctactggtgcgcggcatgacgctggccatcgacgactttatctcgaaggtgaccagctggcccaaggatgtgaatagtcgcaccacgctaaagcgtttcggacagcatctcctgctcaaatgcataagtatcggcctggtggtgcccttctatgcagcttctctcgtcgaaacggtgcagagtgatattgccagcgagaaacccggtctattcgatgtattccgggagggaagtctgcgcttgttttattggagctctccgcaaaagggccgtatgctaccagcctgggctctaatcgggccaagtgtctcctttggcatcaccaagtatctgtttaatctcgtgatacggggcgtgtcctcacgcataatgcggcttcgtataaagaattcccaggacggccagggtggaaagtatcaggacaccacgctggaacaacagaatgcggacatctatgccagccttattgctatcataaccactgaggtcatgttcttcccgttcgaaacgattctacaccgtctgcaattgcagggaacacgaactataatcgacaacctcgacaatggctacgatgtcgtacccattctaacaaactatcaaggagtcgtcgattgctatcagacaacgattgtctccgagggagttagtggcctctacaagggctttggagccatgatcctgcagtttgcggcacacgtggccgtcatcaaattgaccaaatgggttgtgaatcaaatcgtagaggtcatctccaaccgaccaccacagcgaatagtgaattactataatctggatgagaatgcttgcaactccaggtccacgaccttgtcgccaagcctttccagtaccgaaatgggggagattagtcttgggcagaattcacaagactag

SEQ ID NO: 19044 - protein, 421 aa, DROSOPHILA
MAGMNEYSSLKFQAEYETHDDHLGKEHRTGDRDQHLPVTYGPSKHLGSSLEEREKAIVDVVGVQWVSLVTENLLSHPFVVLRRQCQVYNASRRYHLHPFQLLPSIVHLHRRQGLTTLWKGVGSCLLVRGMTLAIDDFISKVTSWPKDVNSRTTLKRFGQHLLLKCISIGLVVPFYAASLVETVQSDIASEKPGLFDVFREGSLRLFYWSSPQKGRMLPAWALIGPSVSFGITKYLFNLVIRGVSSRIMRLRIKNSQDGQGGKYQDTTLEQQNADIYASLIAIITTEVMFFPFETILHRLQLQGTRTIIDNLDNGYDVVPILTNYQGVVDCYQTTIVSEGVSGLYKGFGAMILQFAAHVAVIKLTKWVVNQIVEVISNRPPQRIVNYYNLDENACNSRSTTLSPSLSSTEMGEISLGQNSQD

SEQ ID NO: 19045 - DNA, 3762 bp, DROSOPHILA
ctttaccattcatagcaaacaaacttttaagattcaatatggtgccataatgcccttaaccttcgccaatcgattacgttaaatttattttacaaaagttggcctaccttcgttataactttgaccaacgactaagtgaccataacttaattgaattaaaaaattttgttcaagtttgctttgcgggatggcaaagatgaaaaaaaaaaactttggcggggcgaaaatagatcttgatcaatcgactggcaattagctgaactttaagcttaagacataattagcgtgaactaattgttggtatttcacttttagcttcgtgtctggaatctcgcttctgggaacatcaacggaaatctatgtatatggcacgcagtacgccttcattctggtgaccctggccatttcgggagctatttcgtggtatatattcctgcctgtattctgcaatctccagctgacatccacctatgaggtaagccgaacgttgtccaatccaagtatattgtgtgtgtttacctattgaactgcatgttacgcattaattctattggtttgagtatacgaatttggaatcttttgatattcgacggcatgttaatgtgtaagtaaggccaaagcccaactgcgagcagggagtacatgttcggtacgaaaaaaaaaaacacgggacaaaatcggtatgcaaccagctgtaagaactctttgtatggctgtttatttgcatgcacgaggttgtggcgcacaaagacagctacaataagcccgaacaataccaattgtacgagctgacaaacggatagtcgtagtttataagttggtgttggctacatgtcgtatgagtaatagtcgattatgtatgcgccgcgttgccgcacacacacatttacgagaccactgcgtgtggcagtgggtgtgtgtgtatatttgagcaatccttactgtgtgttaaacgaaagacaacaaaccattgggaaaaaaatatttacagtatttcgagatgcgctttaacaaatctgttcgtctgctgggatccgccttcttcacgggtgcaaatgtaagtctaatccaattacaagtgaagagaaaatcgttacgttccttcagatcctgaaggaatacttttaaagcaattttgatgctaagtgttttttttttcttagcttatctggctgcccatcgtcatctatgtgccagcgctggcttttaatcaaggtaagattatcttagagcatcgaagtaaaaggggtacaagttttaaagggaccttaaagaacaaatatgaaatttaatggtctataatacgtacttattgtcaagaaccctacatagatattacaatgggataattgtaatcttattaatccgggctcttagttccacccagtaaaggttaaattatttttccagttactggaataaatatccacgtcatcactccaatcgtatgcctcgtctgtatattttatacaacggctggggggctgaaggccgttgtctggacagatgtgatccaaaccgtcattatgataggtgcggttatctttgtcatcataaagggcaccctggatgtgggcggactgggcgtggttattcagcggaatttcgacagcggccgaatcgagtggcctgagtgggtaaaaactaattaagggtctcgacatatattaaatgaaagtaattttaaaacagatttacactcgatcccaaagttcgcatgtccatgttggccttgatggtcggatgtgttggccacaattgctaccagtttggctgcaatcaaatgatgatccagcgatacatgtcccttcctggtgtaaaacagatggctcatacatcattcatttttattgtcggattggttctattgttttcactctgtttgtacaatggactccttctgttcgcaacgtactacgattgcgatccgctaacaacaaaggttgggaactattatccattaaatggaaaaacacgattttaaactccgcttatcgtttcaactatatatagaatataatttatagcgatttttgagtttaagctcgctagtattccggtcactatgggtatggtatgcttataacttagatttaaattccagttggcagtggccaaggatcaattggttcccttgctcgtggtgcaatccatgagctcatttcctggaattgccggcatgtttgtggccggagtgtttagtgccgccctcagttctttgtccacgggtatgaattccctatctgctgttttcctggaggattacattaagccccttgcgaagaaaccccttacggaacatcagaccggtgtcaccgtgcgactttgtacggtaataattggcattatcagtgtggccctggtctttgtggtcgagcggatgagctcccatgtgttgcaactcggcatcgccattggttcagtggtccaaggtccgcttcttggtctgttttcgatgggtctgctgtgcccaagcatcaactcaaaagtgagttttccctcctccttcaaagttgttaggatgaaagttaacaaataatcattttgtttaagagcgcaatcacgggatcaatttttggcttcttcttcatgggttggcttagtatttcggcccaaattgccattaactctggggaaattcatcccgaggaaaagccagtcagcgtggaaggctgcgattatgagttcgaccgttctctgctgacatctgcaaatgccactcttcatagtggagaatccgcgtaagtttgcgatatccttaatcgccaaaatcttttctattcggttctcatcatagaagcctaatcccacaggtcccttagtttcgccgagcagttataccacatatccttcatgttttatactgtaatggggggaatattgagtgtgattgtgggccatttagccggcttcatatttggtcgcaataagcccggcgacgtggaagacgatttgctatcaccctgcatacgcagattccacaagtcgaaatattccagcgtaaatttaaatgagaactccttaaggagttctgatgagaaaccatagagcattctttgactaacctatgtttaatttactaatccattcaattttcttatatttcgattccgtttcactctaaaaacttaagttttaaaaggtacttaaatggttaaaaagaaatacttaattgccacttaatttcttgacttacccataagattgatcaaatgtaaataccagacctttcgtttaggaaagttagccattcaattacgttcttaaaaataaagcttcaatgacttacactaccatagcctaagtattttggtttgaagttaattatttttgtctttgggttgctttaagttttatgggttcttgacaagtcatatatgtaaatgttaaaagttcgttgcaactgcattctttattgttttgaatatagtttaagcccactttatacccagaacatagaggctccgtcaaatcgagcgccacgtgctgacttttgtgcacttttccagtaactggaataaatatacatgtcatcacgccaatcgtgtgcctcgtctgcatattctacacagcagccggcggactgaaggccgttgtctggacagatgtgatccaaaccgtgattatggtgggagccattttcttcgtcatcatcaagggcaccgtcgatttgggcggattgggcgtggttattcagcggaatttcgacaccggacgcatggagtggcctgagtgggtgaaaactgtttactagggcaggta

SEQ ID NO: 19046 - DNA, 806 bp, DROSOPHILA
atgcgctttaacaaatctgttcgtctgctgggatccgccttcttcacgggtgcaaatcttatctggctgcccatcgtcatctatgtgccagcgctggcttttaatcaaggtgcggttatctttgtcatcataaagggcaccctggatgtgggcggactgggcgtggttattcagcggaatttcgacagcggccgaatcgagtggcctgagtggttggcagtggccaaggatcaattggttcccttgctcgtggtgcaatccatgagctcatttcctggaattgccggcatgtttgtggccggagtgtttagtgccgccctcagttctttgtccacgggtatgaattccctatctgctgttttcctggaggattacattaagccccttgcgaagaaaccccttacggaacatcagaccggtgtcaccgtgcgactttgtacggtaataattggcattatcagtgtggccctggtctttgtggtcgagcggatgagctcccatgtgttgcaactcggcatcgccattggttcagtggtccaaggtccgcttcttggtctgttttcgatgggtctgctgtgcccaagcatcaactcaaaaagcgcaatcacgggatcaatttttggcttcttcttcatgggttggcttagtatttcggcccaaattgccattaactctggggaaattcatcccgaggaaaagccagtcagcgtggaaggctgcgattatgagttcgaccgttctctgctgacatctgcaaatgccactcttcatagtggagaatccgcgtaagtttgcgatatccttaa

SEQ ID NO: 19047 - protein, 262 aa, DROSOPHILA
MRFNKSVRLLGSAFFTGANLIWLPIVIYVPALAFNQGAVIFVIIKGTLDVGGLGVVIQRNFDSGRIEWPEWLAVAKDQLVPLLVVQSMSSFPGIAGMFVAGVFSAALSSLSTGMNSLSAVFLEDYIKPLAKKPLTEHQTGVTVRLCTVIIGIISVALVFVVERMSSHVLQLGIAIGSVVQGPLLGLFSMGLLCPSINSKSAITGSIFGFFFMGWLSISAQIAINSGEIHPEEKPVSVEGCDYEFDRSLLTSANATLHSGESA

SEQ ID NO: 19048 - DNA, 3409 bp, DROSOPHILA
agctcccatgtgttgcaactcggcatcgccattggttcagtggtccaaggtccgcttcttggtctgttttcgatgggtctgctgtgcccaagcatcaactcaaaagtgagttttccctcctccttcaaagttgttaggatgaaagttaacaaataatcattttgtttaagagcgcaatcacgggatcaatttttggcttcttcttcatgggttggcttagtatttcggcccaaattgccattaactctggggaaattcatcccgaggaaaagccagtcagcgtggaaggctgcgattatgagttcgaccgttctctgctgacatctgcaaatgccactcttcatagtggagaatccgcgtaagtttgcgatatccttaatcgccaaaatcttttctattcggttctcatcatagaagcctaatcccacaggtcccttagtttcgccgagcagttataccacatatccttcatgttttatactgtaatggggggaatattgagtgtgattgtgggccatttagccggcttcatatttggtcgcaataagcccggcgacgtggaagacgatttgctatcaccctgcatacgcagattccacaagtcgaaatattccagcgtaaatttaaatgagaactccttaaggagttctgatgagaaaccatagagcattctttgactaacctatgtttaatttactaatccattcaattttcttatatttcgattccgtttcactctaaaaacttaagttttaaaaggtacttaaatggttaaaaagaaatacttaattgccacttaatttcttgacttacccataagattgatcaaatgtaaataccagacctttcgtttaggaaagttagccattcaattacgttcttaaaaataaagcttcaatgacttacactaccatagcctaagtattttggtttgaagttaattatttttgtctttgggttgctttaagttttatgggttcttgacaagtcatatatgtaaatgttaaaagttcgttgcaactgcattctttattgttttgaatatagtttaagcccactttatacccagaacatagaggctccgtcaaatcgagcgccacgtgctgacttttgtgcacttttccagtaactggaataaatatacatgtcatcacgccaatcgtgtgcctcgtctgcatattctacacagcagccggcggactgaaggccgttgtctggacagatgtgatccaaaccgtgattatggtgggagccattttcttcgtcatcatcaagggcaccgtcgatttgggcggattgggcgtggttattcagcggaatttcgacaccggacgcatggagtggcctgagtgggtgaaaactgtttactagggcaggtaccacacatggcatgtaatcctgccaggatgtgtggtgcatgggctccgctcgctggtctatatggtataatatggtacattttcgaaacagattgacgctggatcccaaggtgcgaatgtccatgttggcaatgatggtgggcaacgtggcacacaactcgtataacctcggatgcaatcagatcatcacccagcgatacctgtcactgcccggattaaagcagatggcccagtgctcgttcctcttcatttccggattggttcttctgatggccatctgcatgtacaacggcctcctgctatccgcaacctactacgactgtgatccattgaccacgaaggtgggtatttattagaaaaccatgcatattgttactaatcctgaaagttacttacagttggcggtggccaaggatcaattggttcccctgctcgtggtgcaatccatgagcgcatttcccggagttcccggcatgtttgtggccggagtgtttagtgccgccctcagttctctgtccacgggcatgaattccctagccgctgttttcctagaggattacatcaggcccttgacgaggaagccgcttacggaacaccaaactgctgttatcatgcgtgtttgtacggttttaattggagtcatgagtgtggccctggtttttgttgtggagcagatgggctcccatgtaatgcagctttccatgaccgttggatcggtggtacagggtcccttgctggctcttttcgttatgggccttctgtgcccaagcatcaactcaaaggtatcagttctagaatatctttatcttattagtttaaaatgtttaactaattttagagcgccatagtgggatccctttgctccttcttcttcatgggttggctgtgcctatctgcacaattggccattaattccggcgaaatgcaattcgaaagcaaaccagttagcgtagaaggctgtgattatgagtttgatcgcgacctggtgactcctgccaacgtgaccattcccttgactgaatctgggtaagtttttctaaatgcaagtttagtataaaggtgaactcctaatgttatttccacagatcgctcagtttcgcgcaggagctgtaccacgtctcctttatgttctatagcgttatgggagccgcggtgggcgtgattaccgcccacctggctggcttcgtctttggtcgcaatacggccgatgatgtggatattgagttgttgtcaccttgcattcgcagattccaaaagagcagctattccagcgttaagctggacgagaataccttgaagagtttcaatgcgaagacgtagaaagtagttccatgccatgtactttcaaataaaatacattaataagcagcacttcaagttttgtttagttaagttaggaatttcccttgcaaggcctgtaaataccagctaccactgctcattttagcatgaatacaaattctttgttaattttataattaatatgtaaattctaaccaactaactcattttgaacctttagtactttcaattgcgctatggcgctggcatacgcaatttgggctcggttctatttattgtgggcacggtgagtggaaaagcatttagcttaagtatattcacatttatttggtacatcccacagatgctctggcttcctgttgcgctttatgtaccggccatcacctacaatcaaggtgagtttgattttcgattaagcataataattttcattaactggttgcttatacatgcactaaggaaaatgggagtataccaatactatataacacgcattgaataactatcttcatttctctagtttaaattataacttaatctaagtttgttgaggtgtatatcttccaaatattaacatatttcagtgactggcactggcatccatgtaattacgcccattgtgtgcactatctgcactttctacacgtgtgtggtgaggcttaattaaatttggctaacattttgaggcctatctgaaagactttcttcatttcagggcggacttaagg

SEQ ID NO: 19049 - DNA, 1095 bp, DROSOPHILA
atgttaaaagttcgttgcaactgcattctttattgttttgaatatataactggaataaatatacatgtcatcacgccaatcgtgtgcctcgtctgcatattctacacagcagccggcggactgaaggccgttgtctggacagatgtgatccaaaccgtgattatggtgggagccattttcttcgtcatcatcaagggcaccgtcgatttgggcggattgggcgtggttattcagcggaatttcgacaccggacgcatggagtggcctgaattgacgctggatcccaaggtgcgaatgtccatgttggcaatgatggtgggcaacgtggcacacaactcgtataacctcggatgcaatcagatcatcacccagcgatacctgtcactgcccggattaaagcagatggcccagtgctcgttcctcttcatttccggattggttcttctgatggccatctgcatgtacaacggcctcctgctatccgcaacctactacgactgtgatccattgaccacgaagttggcggtggccaaggatcaattggttcccctgctcgtggtgcaatccatgagcgcatttcccggagttcccggcatgtttgtggccggagtgtttagtgccgccctcagttctctgtccacgggcatgaattccctagccgctgttttcctagaggattacatcaggcccttgacgaggaagccgcttacggaacaccaaactgctgttatcatgcgtgtttgtacggttttaattggagtcatgagtgtggccctggtttttgttgtggagcagatgggctcccatgtaatgcagctttccatgaccgttggatcggtggtacagggtcccttgctggctcttttcgttatgggccttctgtgcccaagcatcaactcaaagagcgccatagtgggatccctttgctccttcttcttcatgggttggctgtgcctatctgcacaattggccattaattccggcgaaatgcaattcgaaagcaaaccagttagcgtagaaggctgtgattatgagtttgatcgcgacctggtgactcctgccaacgtgaccattcccttgactgaatctgggtaa

SEQ ID NO: 19050 - protein, 364 aa, DROSOPHILA
MLKVRCNCILYCFEYITGINIHVITPIVCLVCIFYTAAGGLKAVVWTDVIQTVIMVGAIFFVIIKGTVDLGGLGVVIQRNFDTGRMEWPELTLDPKVRMSMLAMMVGNVAHNSYNLGCNQIITQRYLSLPGLKQMAQCSFLFISGLVLLMAICMYNGLLLSATYYDCDPLTTKLAVAKDQLVPLLVVQSMSAFPGVPGMFVAGVFSAALSSLSTGMNSLAAVFLEDYIRPLTRKPLTEHQTAVIMRVCTVLIGVMSVALVFVVEQMGSHVMQLSMTVGSVVQGPLLALFVMGLLCPSINSKSAIVGSLCSFFFMGWLCLSAQLAINSGEMQFESKPVSVEGCDYEFDRDLVTPANVTIPLTESG

SEQ ID NO: 19051 - DNA, 6021 bp, DROSOPHILA
atttcgaaggaaaaaggttaatttaacattcaagtatatatatattttacatatatatcttttcctattacttatgtattcagtacttttgtataatggccataaaaaacactgttgaagcgtgatttttgtgtaagcacgaagtaaagtagctttatgcagatatacactagacccaacgttacaaaaattgtggaaaactgaattatttagtatagatatatataaatgtacattttcatgcacgtatgcatttacatatggatgaaagccacgccatttaaacttttgaggttgtgttcgttttggtcacaatcacttttcaataccttttccacaagttttctataaagcgtttctgatcacaatgaaagtaaattaataattttactgaattaaccgtttaagaaaagattttctccgaagtccacgaacatacgactaaacgtcacagcacaatatgaccataacgactttagtgggctgcagcctatcactatcgattggccgaatatgatgtgaatgaattttagccttttcacactttcacttttatataatttatatggtatttattaaaatgaagatatgtaataatacgcttaaaaacgaaagaccatttttaaaaatgaagttgactaaaatagaaacaaatatatgtgttatataattaaacgtagttccaatcagccttttaaaatatatgttataagagtggatcatctgtatttcttctatattccaataccaatataccacattttttgtagaggatatcttatttattttattgaaaaaatgtttaaaatattatttcaagagccacattttaaatagtatcgatacccaactcgcagtgagtaagcactagaatgtaactacgggtaagatatcgattgtccacgttttcactagcaaatataaattgcattttatggaatacttatcgatattcttacagtactggaaaactttttcatatcgatttatttttctgcgtatacagaacgtactttcgtttcattgttgtccaaaaaagataataatattatatacttgcggttatttacaactgcaagtaatgtgtcactaatttttagtgaaaataacacaaaatacgacttgtacggcaaataagtatacgaggcaatcacgataaataaaaaaccgtgagtatggaatttcaagtggacgcttctcaatacttacatgcacatatatcgatgtgtggatatgtacatacaccttgttataaacagtttaaatcttttctgacgtaataaaatctcaagaatgtacatgtaaaaccaacaaaatgttttcaaactgcattcaaattaatgcttaaccataaccttgtgtgtatgtaaatataaacttggcaggttgatttttttttaccattctgctggcactaaacatacgtacaagtgtatgtatgtgatgcactcggcgtcatttatctgtacatgtgtaaaatgtaacgttacctgtggtacacagcaataaataaatagaaataagttcataaatagttcgggtaactgcccagcttcgtgctacgcatctgagatactttttcacccccaaaaagatatgccgcttcatgagattgcgacaggtggagattattgcatttccaataggataccaaaatgtcttttcacttttgctcaaatgtctgggggattattttgtggtggggtttgtgggtttaatggctttgttggtatctcttctatagatatgatgaattttgtagcaaaagatttaattggtgtatttgttttcagtttgttaagtatacattaactcaagtttttactacatttttaagggtttcaaacttatgtttttatataaaaaagaaatatttattaaataataaaacactaaaaaatcgaattggtagaaaaaatattgggttatttccttttttcttgcatgattttaatatttgatgtttaatattattacagaaacttggatttgtagcttgctttgtgttgcggcaccatggaggaccccaatcgcatgttggcccacaccggcggcatgatggctccgcaaggatacggcttgtctggccaggatgatggccagaatgccggcagcgagaacgaggtgcgcaagcagaaggacatcggcgagatattgcaacagataatgagtatctcggagcaatcacttgacgaggcccaggccagaaaacatacactaaactgtcaccgaatgaagccggcacttttctctgtactttgcgaaatcaaggagaagaccggtaagcttaaaaccctatatttatctctcattcaagaccatcaaataagttgaaatggtattatggattttgtgatttgcttgtgatacaattgatttactaaatcaaacacaattcttaacgtaatagtcttaaaacgttcagtatgaaattatttttatcattcgtcttcttcgttaaaactattacagtcctctcgattcgcaacacccaggaggaggagcccccagatccgcaactgatgcgcttggacaacatgctgattgccgagggcgtggccggacccgagaagggcggtggcggagcagcggctgcctctgcggctgcggccagccagggcggttccctgtccatcgatggtgctgacaatgccattgagcattccgactaccgtgccaagctggcacagatccgtcaaatatatcaccaggaattggagaagtacgagcaggcatgcaacgagttcaccacgcatgtcatgaatcttctacgcgaacagagtcgcacgaggttggtgtatatagataaatgcaaaatgatggccatcatttgggtaatataatcgtatttcagacccattacaccaaaggaaatcgagcgaatggtgcagatcatccacaaaaagtttagttccatacaaatgcagctgaagcagtcgacctgcgaggctgtaatgatacttcgttcgcgtttcctggacgcacgccgcaaacgccgcaatttcagcaagcaggcatccgagattctcaacgagtacttctacagtcacttgagcaacccatatccatccgaagaggccaaagaggagttggcacgaaagtgtggcatcacggtaagtagtgtagggcacattaatcaacaatgcaaatccgattgcagcatagtaaataaaacaaaacacactcatgcaggtctcgcaagtatcgaattggtttggcaacaagcgtattcgctataagaagaacattggtaaggcacaggaggaggccaatttgtatgcggccaagaaggcggctggtgcttcaccgtattccatggccggtccacccagcgggacaaccacacccatgatgtcacccgctccgccacaggattccatgggctatccaatgggctccggcggatacgaccagcagcaaccgtacgacaacagcatgggcggctacgacccaaatctccatcaggatctaagcccctgaggatcagggctgtgaaccactcccagtccggagaatccctcatacagttgcggtcaaaataactgcgctgaaaaatctaacatgcagttttttcataattatgcggcttatatttgcttcttcgccaagaacaacaattcttaagggatttttaaattcagctttctgtcctttggtttcgagtcagataagtttaaaattcccatcaatttagatatagttccgatagatatacataaatacgtgagtagaatataaatacgtaatagttagtttgtgcttgctacattttggttggcagaaaaaactttgcctgcttaaatcaaaaaagaaagtaaataagctgatatggttttttaattgacacagtctcctgctttttaacaatatatgcatgcaggatgtattaagaagtcgacaattgaataatggcctaattaagaatattttttgcccgaacataaaacgaaaagtttgctcgctttttttttttaattcacaatcaattgaaatggaaagcatgttgtttgtggcatgtcaactgtaaaatacataaatacgtaataattcgcttaagcgattataatttgatcaacgttctttaaaaagggttaataaccaatgcagtgactttttctgcatagccccatttagcttatatattaaccatcgaaaacatatgcaaagaaactcgattaaactggtagtatacgaatattttcacaacgagtggaggaggcacaagtttcagagctattattttgaccgcagctgtgtataaatatattttaatacatttacctacatttgcgggtatatacaaatattgcatgtaaatcatactatgacgattcttttttggctacagtacgtatacgacagcaaaatagtgtttactgaatttaaaactgtacgaaatttttaaaaacttgaacaatacgaaaatacgaaactaaaccatgtatacgatgtatatcaaataaataaataatacatgttgttgttatccgcacacacgtcaactaattacaaaaatattttgaatgtaaaaacggaaaagaaaagtcttggataaacaaaatgtcacatttctatcgaaggacgaattgtattatttaacagcttataacatttaatagatttattaacgtgtattttaaaagtctcaaaacaattgtttgtttcttacatcctaaaaagtattaaacattaaatcttaatggatttcttgctataaaaacgaacttcccaacttaattgcattataaaatcaagaacaaattcgtctttcgcttagtaagaagtgtacactactctttgcccccaattaaaacggatatgaaaacagattatttgaaagtatacaaaacgattataattttaaatgataaataacatatgtctttgacagactttcgctcacattacggtcaaatgaaaccattcaatgtatttcagtaagtaaggtactgcattaaacattttggataacaatagaaaaatatataaatacacaactttacacaaataacttaataaatcaaaacgaagtattaattaatggttttttgggagtattaaagaaaagggcgttatcctttgcagataatctatacacgtaatagaaagagatggagcatctgtagatacacttgctcttctttaattaaaactatctggctcacagatagaaatcattcttttatgtggggttggtcaataaaaacagaagaattttaattttttagatttttggcagctgtaaaacagacaaaaaattttaattttaggcgtattttatttttattatggttcattacggcttaatgtacttcaccccacatcttacagttattcccaaaagtgtgtagtaatttatataaatcactttgatcgaccaattttaaatttataaataataaagtagaaattttaaaaaaattcacccgctgccccaatgcattccacaatttaagaacacgttccacttatctagcactcaatcgccgctaccttgacgcgcatgctggcactgcccggaatactttgaattgtcaatacggccacactgttggcaacacgtgcacgaattcgacatttgatttgaattcgttttgatttttatcgtaattgtacgaaaagccagcagcaatgggcaagaagacgaaagttggaaagacgcgcaaggataagttctaccagttggccaaggagacgggcctgcgatcgcgtgccgccttcaaattgatccagctgaatcgcaaattcggtttcctccaacaatcgcaagtatgtttggatttgtgcgcagctcccggtggctggatgcaggtggccaagcagaatatgccggtgtccagcattgtgatcggcgtggatctctttcccatccgtcccattgccggctgcattggtctcgtcgaggacatcaccaccgagaagtgccgccaatcgctgaccaaggagctgcaatcgtggaaggccgatgttgtgctccacgacggtgctcccaatgtgggtaggaactggctgtacgatgcc

SEQ ID NO: 19052 - DNA, 2878 bp, DROSOPHILA
atacagaacgtactttcgtttcattgttgtccaaaaaagataataatattatatacttgcggttatttacaactgcaagtaatgtgtcactaatttttagtgaaaataacacaaaatacgacttgtacggcaaataagtatacgaggcaatcacgataaataaaaaaccaaacttggatttgtagcttgctttgtgttgcggcaccatggaggaccccaatcgcatgttggcccacaccggcggcatgatggctccgcaaggatacggcttgtctggccaggatgatggccagaatgccggcagcgagaacgaggtgcgcaagcagaaggacatcggcgagatattgcaacagataatgagtatctcggagcaatcacttgacgaggcccaggccagaaaacatacactaaactgtcaccgaatgaagccggcacttttctctgtactttgcgaaatcaaggagaagaccgtcctctcgattcgcaacacccaggaggaggagcccccagatccgcaactgatgcgcttggacaacatgctgattgccgagggcgtggccggacccgagaagggcggtggcggagcagcggctgcctctgcggctgcggccagccagggcggttccctgtccatcgatggtgctgacaatgccattgagcattccgactaccgtgccaagctggcacagatccgtcaaatatatcaccaggaattggagaagtacgagcaggcatgcaacgagttcaccacgcatgtcatgaatcttctacgcgaacagagtcgcacgagacccattacaccaaaggaaatcgagcgaatggtgcagatcatccacaaaaagtttagttccatacaaatgcagctgaagcagtcgacctgcgaggctgtaatgatacttcgttcgcgtttcctggacgcacgccgcaaacgccgcaatttcagcaagcaggcatccgagattctcaacgagtacttctacagtcacttgagcaacccatatccatccgaagaggccaaagaggagttggcacgaaagtgtggcatcacggtctcgcaagtatcgaattggtttggcaacaagcgtattcgctataagaagaacattggtaaggcacaggaggaggccaatttgtatgcggccaagaaggcggctggtgcttcaccgtattccatggccggtccacccagcgggacaaccacacccatgatgtcacccgctccgccacaggattccatgggctatccaatgggctccggcggatacgaccagcagcaaccgtacgacaacagcatgggcggctacgacccaaatctccatcaggatctaagcccctgaggatcagggctgtgaaccactcccagtccggagaatccctcatacagttgcggtcaaaataactgcgctgaaaaatctaacatgcagttttttcataattatgcggcttatatttgcttcttcgccaagaacaacaattcttaagggatttttaaattcagctttctgtcctttggtttcgagtcagataagtttaaaattcccatcaatttagatatagttccgatagatatacataaatacgtgagtagaatataaatacgtaatagttagtttgtgcttgctacattttggttggcagaaaaaactttgcctgcttaaatcaaaaaagaaagtaaataagctgatatggttttttaattgacacagtctcctgctttttaacaatatatgcatgcaggatgtattaagaagtcgacaattgaataatggcctaattaagaatattttttgcccgaacataaaacgaaaagtttgctcgctttttttttttaattcacaatcaattgaaatggaaagcatgttgtttgtggcatgtcaactgtaaaatacataaatacgtaataattcgcttaagcgattataatttgatcaacgttctttaaaaagggttaataaccaatgcagtgactttttctgcatagccccatttagcttatatattaaccatcgaaaacatatgcaaagaaactcgattaaactggtagtatacgaatattttcacaacgagtggaggaggcacaagtttcagagctattattttgaccgcagctgtgtataaatatattttaatacatttacctacatttgcgggtatatacaaatattgcatgtaaatcatactatgacgattcttttttggctacagtacgtatacgacagcaaaatagtgtttactgaatttaaaactgtacgaaatttttaaaaacttgaacaatacgaaaatacgaaactaaaccatgtatacgatgtatatcaaataaataaataatacatgttgttgttatccgcacacacgtcaactaattacaaaaatattttgaatgtaaaaacggaaaagaaaagtcttggataaacaaaatgtcacatttctatcgaaggacgaattgtattatttaacagcttataacatttaatagatttattaacgtgtattttaaaagtctcaaaacaattgtttgtttcttacatcctaaaaagtattaaacattaaatcttaatggatttcttgctataaaaacgaacttcccaacttaattgcattataaaatcaagaacaaattcgtctttcgcttagtaagaagtgtacactactctttgcccccaattaaaacggatatgaaaacagattatttgaaagtatacaaaacgattataattttaaatgataaataacatatgtctttgacagactttcgctcacattacggtcaaatgaaaccattcaatgtatttcagtaagtaaggtactgcattaaacattttggataacaatagaaaaatatataaatacacaactttacacaaataacttaataaat

SEQ ID NO: 19053 - protein, 376 aa, DROSOPHILA
MEDPNRMLAHTGGMMAPQGYGLSGQDDGQNAGSENEVRKQKDIGEILQQIMSISEQSLDEAQARKHTLNCHRMKPALFSVLCEIKEKTVLSIRNTQEEEPPDPQLMRLDNMLIAEGVAGPEKGGGGAAAASAAAASQGGSLSIDGADNAIEHSDYRAKLAQIRQIYHQELEKYEQACNEFTTHVMNLLREQSRTRPITPKEIERMVQIIHKKFSSIQMQLKQSTCEAVMILRSRFLDARRKRRNFSKQASEILNEYFYSHLSNPYPSEEAKEELARKCGITVSQVSNWFGNKRIRYKKNIGKAQEEANLYAAKKAAGASPYSMAGPPSGTTTPMMSPAPPQDSMGYPMGSGGYDQQQPYDNSMGGYDPNLHQDLSP

SEQ ID NO: 19054 - DNA, 3134 bp, DROSOPHILA
acctcgcaggtgtgcctccgtttctttatggtgatgatgacatgtaagtgggttgtaaattaaaaaaatatatatatatacaattggaaatggaatcactatattgatcaatatcaatgataatgtagtaatatccgttttaaatgatcatagctatagcttttacgctattcggaatatatttctatatgtgcttttccagttggcgttgcgctggtcgttcccaagctcaatctgttcatctcgctgatcggagcactgtgctccacctgtctggcttttgtgattccggtgctgatcgacttcgtgacgcgggcgcaggtgcccaaggcactgggtgtgtggtcctacatcaaaaacattctcatcctgacggtggccgtgctgggcatcgtcactggcacctaccagagcatcgtggagatcgtcaaggagtttaagtaggcttagagagctagcaagtatattttgtacataaataatgctgtcattccgcggaactatgtgaatgcgttgtcctgttctgatgtaagattaatttgtgtatttttccactcttttttttattattattttgttgatagttttaagctgtgcatattttttttttgtttgtatgtataaaaaaaatgtttatttggcacaaaaacgaaaggaggcataaaggaaaaacatgatctgcagctataacccattttaataattgattaccatagcaatagggctttgattgtgtgagagcctgcaaatgatcgttaaagccatatgtatgtaataaatgctattcatcgattttataaatatatatgtataaagtattaactagccttcagccaacaatgtttaacactaagttcttttacaaagtgaaaaatatgcgcttttgagagcgtataaatcaataaacataaatcaacaacgaatttaatacattcaaagcagtttattcgtaaattttggtggtaaatactctaagatcggcagtatattagtgagtcttttacattcccggtcccgaaagactcttctccatgaacttcttcttggcaaagcatatccaccacttgctcggctttccatccggagtatcaaagaccttttccagcaatctgtttccggtttcctggcgcaactgcaggaagtactgacgcatcagctccggatcctcgggcttggtgtatattccgttcagcggaaatcccgcatctccgggtatatcgaaccgcgagatggccagcgtatagagctcctgctgaccctgcgatttgcttgtgcatcgggccaatcgcttcaaacattccgtgatgtagagcgttatgtagatgagcaccctgtccacctccgactgcgattagatatacaatgtatgggtaataggggttttttaaaaagtaattttaaaagtttaaacatagcaacaatattctaagaatgatatcataattgataagactattattgctataagctatatagtaatataagctatataagctataagctattattgaacttttaaaaaaaaattccaagctccaaaaaaataatttcattatgtagaaatacccaactcttggaacaccatataagaaaggggtattactaaaaatttaacaaataacttcactcttatcaggctgattgtaacgacatatttctacaaataagggcggtgagataacgcacttggttttaacattataaaattgactccactagggctttaagattgtttcgaaatatttaacaagctgtgccgtcttcttaatgtatcttcattttaaaaattagaatatcgcctcgctttatctctatgctcatttctttgtccagtcaccaaccttaacttcgtaagtgcggaagaaaatgttcgatttccagaagtagagtgactcatcgatgatgtcgttgggaatatcaacagtgggcgctggtcctcggacttgggtacgtagtggtagaagggccatattccccaccgaggcttggaaatcctctatttccgagtgaaatgcctgtgcgaaccatgtaaacaaatggacaggttaagggtttaatgcgtttaatgtacatttatgttaagaaactgcccatctgcagctgcatacctcggttgtattttactcaccggcatttcaatgacttctgtcttgtttttcaaaagttaaaaataaacgaaaaatatagtaatatatgatatatcagaacttcctagtgatgtgaaaacgttatctttttgaagttgaataaacgacccattggcgttaaaatgaactggttcgttccgagtttatttggtattttttgaaaatatacatttctaaagatattattttaatcatttaagctgacattttcccacataaatgtgcaagtacgtctcagttttcgtcgttttattttagttctgttgcatatgaaattgatatcaatgcagaaatggagttaacaggacttggctctttcggttagaacttgttgcgcttgctaattaaaaatgggaaagatatagataaaaaataggaaagaaatgaacataacaactgtaataaggtccccaatcgaatatatataatatatatattaatatacaatatatataatataatataatatagcttttttattaaaaaataattaattgaacgtttccaacttttcgcgcgacaatgaaaagcttcaactttggcggtaagttacaaaggcgaaagcagtgtgcccagacacatttgggttaacactcaaactatttcacatgttccagttcactttgaaaatacaaattacgtctattaaaaacattattcgatggtcgacacagttgattgtttatagataagaagtttgtaaattgtgtataaatataaaatactaggtaaaatataatcgatcgataacataatatcgatagaactaattgtatagtctgaagaacaaacgatggtgtgatcgagatcgaagagcttaaatcaattgttttaaagagaaacatcgtgaataaaaatacttaaaaagattgttacagaccaagacaacaataataaagcagtaatacattggaatatagtgctattcttaaaaaatcaaaacccgatataattgacatattaaaatcaaaaaaagtttattttggt

SEQ ID NO: 19055 - DNA, 525 bp, DROSOPHILA
atgccggcatttcactcggaaatagaggatttccaagcctcggtggggaatatggcccttctaccactacgtacccaagtccgaggaccagcgcccactgttgatattcccaacgacatcatcgatgagtcactctacttctggaaatcgaacattttcttccgcacttacgaagttaagtcggaggtggacagggtgctcatctacataacgctctacatcacggaatgtttgaagcgattggcccgatgcacaagcaaatcgcagggtcagcaggagctctatacgctggccatctcgcggttcgatatacccggagatgcgggatttccgctgaacggaatatacaccaagcccgaggatccggagctgatgcgtcagtacttcctgcagttgcgccaggaaaccggaaacagattgctggaaaaggtctttgatactccggatggaaagccgagcaagtggtggatatgctttgccaagaagaagttcatggagaagagtctttcgggaccgggaatgtaa

SEQ ID NO: 19056 - protein, 174 aa, DROSOPHILA
MPAFHSEIEDFQASVGNMALLPLRTQVRGPAPTVDIPNDIIDESLYFWKSNIFFRTYEVKSEVDRVLIYITLYITECLKRLARCTSKSQGQQELYTLAISRFDIPGDAGFPLNGIYTKPEDPELMRQYFLQLRQETGNRLLEKVFDTPDGKPSKWWICFAKKKFMEKSLSGPGM

SEQ ID NO: 19057 - DNA, 5954 bp, DROSOPHILA
aaaagatatgaaagagcccccgttaagctattcaaaaacaaaacaatgtgcaacatgttttaaatgcttaaataattttaatttgatataattcacaagcgttatacattttttcccttagacaaccctatgaagtgaacctgatgcttcccacataagtaaacatcttggatgcactcgaatttcgtcgccaggcaccgccagtctggatcgaactaagcaaagtccagagcaccgcgattgagtattgggcgtttcaaatttcctggctaatttctcacaatcagttaatgctaacaaaagtacttatgcggcggatagttcctaagaatgtgggagtatgactttaagatacgataaacttacttaatgcaaataggagtaagattgaaagttaataattagttttaggtacccataagatgtttttttcttcggctctcaaaatctgctttatttagttttcgttctttaaactatgtatcttttaagtgggcagtaaacaagcttcatccactaaaagcccaaacaaatatttactgcctttttttgctactataattggtttattactgagctgagaacctctcccaaagagatctatttaaatgccgactgagagattttaagaacagagagagagttccattttgtttatgaaaagctaattgccaaattgggaagccaaagcctgctggaatattgcattccatttaagaaaagagggtaggaagaagaagaactggaaacgtggctaaatatgttaactaattcattaacttcgtttccttttcaacgcccactggaactagaatcagagagagagagagagagagagagagagagagagagagagagccaaacttaaaattaaaacactacctttttccagttaaccggccggcttacacacacagtcaaacgcctgaagcttgaaagagagtgtttgcttgatgagagcggcaagcgtataaaagcagcgtcgccggcagaagaaagtcagttgcagtgcagtcgtcgtgacgatcggttcagtgatagcttcccagtggctggagagagtgagagtagagagtaacggaaagagagtgcgaatcgaaccgaacgctattccttcgcccacgatttaagtgaacgcttattagcgaattgaagacccgagagccccagtgcccagctgatttcgtattctttgttgaggtaagccaaggaatccctggaaccacctcatttcgtagcaccttagtgatgtaattacgcaccaagatttacccttgccaaaaagtggaaaacgcttttgcgaacttcgatgccgaatggtgttcgtctcgaatcggttctaaaattacacacaatggttttttggcttcgattgatttgatttgatttttgggtcaatcgattcgaaatcgaaaagttttgaactcgtttcgcagaatcgcagttcgcgcggatctctcgcctcgctcgcaagcaaatatgtgaaggacaacgacgttaaccgatcaactagaagccctcttcttctgcctcttcagaaccgatcagatcggaatagaaatatagaaacgaccatagcacctccgtcgactgtggagtgcgtgaacgtatttcgaagcgtgaggtactcgaaccggaaccaacttgagtgtagtgcatattcgggatcttatccaaacgcaggcttacataacccctattttaataccttttcaaaaaggaataattgaaattcaaaacaaaattatttagcaacaaacaaacaatcagttatatttttgaactgatatgcctcggggctaggggtcccagactttcaaattctagtgataacccccccgatcggcgagttcatctggaaatgttgcccatatgggccgggtgcacgtgaatctcttcagtgcccattgacgcactttgtgtgcctccactgggtccttgacccgctgtgatccctgccctttcccatggattggataatctaggtgtcattatcttccctaaccttttcccacgattaaagtgaaaccatttgccacgattttagtgccgtagtgccagatcaaagagccaaaatagatcagagaatcgaaatttaattaaatcatgacaccgaaacaccgagacagaccaaattaaattcaattgaagctgtcatggcaacaagtgccagcaaaaaaaaggaagagcactacggcgaaaccagaagataacaccgaaaagtcaaatcgattgttgcaatttgagactctccgaaagcgaaaattgcagcggaagaggcggccaatcggccattactaaacggtgatggggttggggaggggatccgaagtcttggtgactgactgggcgccctgccaaaatgatggcaaaggcagagacaccatgattcctcagccaaatcgaacgaaaacgggtttacgctctacatggaccccattgcacactgaatccgtttatccagcgaggcaaaaagtgccgacgacaatggaaacaggggcgtagtatccgtacctcctccgtcctacgattcttccagcagcgccaacgccccaaaagatattgattccgacttttgcgcgattcagcgaaaaacataaggggaccaaaagtgggcagacgggcggaggagtggtgtctgtttctttgatatgcgtgggtgtgttgtctgtgcggcaatcgatgcacttccggtgggttctatggggaaatactcttgcgtttcagtatatatctactatatatattgcaattttatggtaattatattttctgtcaacttttgccttgactccgcttgatttattgcattgttcttgaagaatagcctcataaggcatgcaagcaaacatggctttcgaactagcgcaaaattagctagtagcttatagagtatatgtagcttacccccaacggtttttatatcatttgtttaaaccacttaagaatattcgtagccttgtggacacactttatcgtggatcgtggaagttatacgacaccgtaatatatccttatcactcacgcatattctggcccacttcagctagaaacgtttggcgcgttcgccttatcataaaaatcaggctatcgactgattaactgagtttaataagccagcaaacgtaaacaaaaactacgaaagttctggaaaactaaccaaggctatttcaaaacggcgtgaaatggctagcactctaaattattgaagttttcaacatatgtatatctaatctgatagccaagaaaacataatggttaccaactttccatatacaccgtaatttattattgatgaatatcaaattatcgatagtacttccccgataagattctgttaacacacattgctctacttttctatcagggaattgcattgagaaagcgcagagatggccgatgaagcacaagcaccaccagctgagggagcaccaccagccgagggagaggcgccaccacccgccgagggagccgagggtgccgtcgagggcggagaggccgctccaccagcagagcccgccgagcccatcaagcacagctacacgctcttctacttcaacgtgaaggcgttggccgagcccctgcgctacctgttcgcctacggcaaccaggagtacgaggatgtgcgcgtcacccgcgacgagtggccagccctgaagcccagtgagtgccatagtccatcattgagtggtcagtggactaaccataatctactctgtctcatccaatagccatgcccatgggacagatgcccgtgctggaggtggacggcaagcgtgtgcaccagagcatttcgatggctcgattcctggccaagactgtcggcctgtgcggcgctactccgtgggaggatctgcagatcgacattgtcgttgacaccatcaatgacttccgtctaagtagcgaacaatgtgtgcctcagtttcatgttcagtgtccttgattaactctggaatttttaatgtatagaaattgcagtcgtctcgtacgagccggaggacgagattaaagagaagaagttggtcaccctgaatgcggaggtcattccattctacctggagaagctcgagcagaccgtcaaggacaacgatggtcacctggctctgggcaaggtgcgtgctcaaatgagaacttgaaaccatacactcgttaattttgaatgaacaatactaagaaccatcgattcctttcacccacagctgacctgggccgacgtctacttcgcaggcatcaccgactacatgaactacatggtcaagcgcgatctgttggaaccctacccagctctgcgcggagtcgtggatgccgtcaacgctttggaaccgatcaaggcctggatcgagaagcgccccgtcaccgaggtctaagttcaccgaacaggacttgggaggatgggaaagcattgcacaaccactcagacacaaccgcaccgcagaaatgcacaccacccacatctgcacacattttgttcctttttgcggaggatccgagaggacggcggattttcgcacggggtcataaacgcgtaggagtttagcacgtatcactatggataaatcgtatttgttcttaatttcttggttataattctctttgcatggcgctatatacatatttctattggggtccggcagcggatcgccgttcgttagcttcttctgaaatgatgaaagataatacttattgcacagtttataatattttggcttacttttagaacatacatttagcgcacctatgcagacatttgctgtacctatatatatatatatatgcataaaatacaaaagctacgagtggttcatcttataggcgtattctattgcaatttattcaatgcggagggctcaataaatatttaaaacaacaccagctaaggctgagaaacaattacaaattcttattttgttttttatacaacacgccatcgcggccccaggaattttcttcgtctcatccagttcccttttaagtagccattaaaaaaagactcacatcaatagaaccggtttctccaaaaaaaaaaaaaacagactcttactgccaaatttcaaatgcacataatcacattattatatacatattatttattcaaatttgtaattgtattttttgaatattttcacaaaacactttttaataaacataacacctaaaaaggaatgagcactttttaaaagcacgacaactggttttatttaatttttgtacgatgtattggaataatttattaattgttgacatatttaagaaatttaaagaaagtgtttatttacattattaatttttatttttattatcctttcaatttgcatttccaaagccgacccgacagacataaataaatgcatggagttgtgttcaacattgttttataaacgtttaaaaaaataacatttcaaattaacattcttttaagtcactttggacaattcaagcttaaaagtataaatgcacaattggtcagttttgattcattatttcatattgtatgttgcggttactggtgcttccagttgggtgggcgcttctcgaagaagctagcaatgccctctttggtgtcgcccagctggaaattttcgcacatcttctcctgcgcagccgaaaaggcttccgcttgggacatggccagttgcttgtagtagaactcttttcccagagagatgacggcacgactttttgcctttatggcattggtgatttcctcgatctccttatctagttcctctgcaggaacagctttggtgaccattcccgatatgtaggcttcttcaccagtaacgggaagaccggtcattagcatataggcggactttggacgcgacataatccgggcaactgcgactccgggtgttgagcaaaaaactccgactccagccctaaaaatataaattataacatgattaactggtttcatagagggttttcatccttaccctggagtagagaacttg

SEQ ID NO: 19058 - DNA, 1562 bp, DROSOPHILA
cagttgcagtgcagtcgtcgtgacgatcggttcagtgatagcttcccagtggctggagagagtgagagtagagagtaacggaaagagagtgcgaatcgaaccgaacgctattccttcgcccacgatttaagtgaacgcttattagcgaattgaagacccgagagccccagtgcccagctgatttcgtattctttgttgagggaattgcattgagaaagcgcagagatggccgatgaagcacaagcaccaccagctgagggagcaccaccagccgagggagaggcgccaccacccgccgagggagccgagggtgccgtcgagggcggagaggccgctccaccagcagagcccgccgagcccatcaagcacagctacacgctcttctacttcaacgtgaaggcgttggccgagcccctgcgctacctgttcgcctacggcaaccaggagtacgaggatgtgcgcgtcacccgcgacgagtggccagccctgaagcccaccatgcccatgggacagatgcccgtgctggaggtggacggcaagcgtgtgcaccagagcatttcgatggctcgattcctggccaagactgtcggcctgtgcggcgctactccgtgggaggatctgcagatcgacattgtcgttgacaccatcaatgacttccgtctaaaaattgcagtcgtctcgtacgagccggaggacgagattaaagagaagaagttggtcaccctgaatgcggaggtcattccattctacctggagaagctcgagcagaccgtcaaggacaacgatggtcacctggctctgggcaagctgacctgggccgacgtctacttcgcaggcatcaccgactacatgaactacatggtcaagcgcgatctgttggaaccctacccagctctgcgcggagtcgtggatgccgtcaacgctttggaaccgatcaaggcctggatcgagaagcgccccgtcaccgaggtctaagttcaccgaacaggacttgggaggatgggaaagcattgcacaaccactcagacacaaccgcaccgcagaaatgcacaccacccacatctgcacacattttgttcctttttgcggaggatccgagaggacggcggattttcgcacggggtcataaacgcgtaggagtttagcacgtatcactatggataaatcgtatttgttcttaatttcttggttataattctctttgcatggcgctatatacatatttctattggggtccggcagcggatcgccgttcgttagcttcttctgaaatgatgaaagataatacttattgcacagtttataatattttggcttacttttagaacatacatttagcgcacctatgcagacatttgctgtacctatatatatatatatatgcataaaatacaaaagctacgagtggttcatcttataggcgtattctattgcaatttattcaatgcggagggctcaataaatatttaaaacaacaccagctaaggctgagaaacaattacaaattcttattttgttttttatacaacacgccatcgcggccccaggaattttcttcgtct

SEQ ID NO: 19059 - protein, 249 aa, DROSOPHILA
MADEAQAPPAEGAPPAEGEAPPPAEGAEGAVEGGEAAPPAEPAEPIKHSYTLFYFNVKALAEPLRYLFAYGNQEYEDVRVTRDEWPALKPTMPMGQMPVLEVDGKRVHQSISMARFLAKTVGLCGATPWEDLQIDIVVDTINDFRLKIAVVSYEPEDEIKEKKLVTLNAEVIPFYLEKLEQTVKDNDGHLALGKLTWADVYFAGITDYMNYMVKRDLLEPYPALRGVVDAVNALEPIKAWIEKRPVTEV

SEQ ID NO: 19060 - DNA, 4663 bp, DROSOPHILA
agtcttggataaacaaaatgtcacatttctatcgaaggacgaattgtattatttaacagcttataacatttaatagatttattaacgtgtattttaaaagtctcaaaacaattgtttgtttcttacatcctaaaaagtattaaacattaaatcttaatggatttcttgctataaaaacgaacttcccaacttaattgcattataaaatcaagaacaaattcgtctttcgcttagtaagaagtgtacactactctttgcccccaattaaaacggatatgaaaacagattatttgaaagtatacaaaacgattataattttaaatgataaataacatatgtctttgacagactttcgctcacattacggtcaaatgaaaccattcaatgtatttcagtaagtaaggtactgcattaaacattttggataacaatagaaaaatatataaatacacaactttacacaaataacttaataaatcaaaacgaagtattaattaatggttttttgggagtattaaagaaaagggcgttatcctttgcagataatctatacacgtaatagaaagagatggagcatctgtagatacacttgctcttctttaattaaaactatctggctcacagatagaaatcattcttttatgtggggttggtcaataaaaacagaagaattttaattttttagatttttggcagctgtaaaacagacaaaaaattttaattttaggcgtattttatttttattatggttcattacggcttaatgtacttcaccccacatcttacagttattcccaaaagtgtgtagtaatttatataaatcactttgatcgaccaattttaaatttataaataataaagtagaaattttaaaaaaattcacccgctgccccaatgcattccacaatttaagaacacgttccacttatctagcactcaatcgccgctaccttgacgcgcatgctggcactgcccggaatactttgaattgtcaatacggccacactgttggcaacacgtgcacgaattcgacatttgatttgaattcgttttgatttttatcgtaattgtacgaaaagccagcagcaatgggcaagaagacgaaagttggaaagacgcgcaaggataagttctaccagttggccaaggagacgggcctgcgatcgcgtgccgccttcaaattgatccagctgaatcgcaaattcggtttcctccaacaatcgcaagtatgtttggatttgtgcgcagctcccggtggctggatgcaggtggccaagcagaatatgccggtgtccagcattgtgatcggcgtggatctctttcccatccgtcccattgccggctgcattggtctcgtcgaggacatcaccaccgagaagtgccgccaatcgctgaccaaggagctgcaatcgtggaaggccgatgttgtgctccacgacggtgctcccaatgtgggtaggaactggctgtacgatgcctatcagcagatctgtctcaccctcaacgcgctcaagttgagcacacagtttctgcgcaacggcggctggtttgtgacgaaggttttccgctccaaggattacaatgccctgctctgggtgctcaagcagctgttcaagaaggtgcacgccaccaagccgagtgcgtcgcgtaaggaatccgccgagatattcgtcgtctgtcagggctacctggcgcccgatcacattgatccccgtctcctggactcgaagtatgtgttcgaggagctggatctcgatgccaaaaagaagagcagcctgctgcatcccgaaaagcaaaagcgcatcaaggccgagggctatacggcccaggatattgcgctgcgcaacgatctggctgccacagagttcctgaaggctgaaaatgcactggctgcgctgcagggcatcggttcgattcgcatcgatgatcagcgcattgccaatcacaagaagaccacgccagagattctcgagtgctgcaaggatctgaaggtattgggccgcaaggatatcaagggtctcgtgcaatggtggaaggatgttagggagttgttcgttgaaaaggaaaccccactggtcgtcggcaatgccgcagatgagaagcccaagccattgacgcaagcggaaatcgaggacatggaagatgccgagctgcaaacgcaaattgagacaattgtcgaagaggagaagaaggacttgaagcgtaagcgtaagaagacgctcaagaccaaggcgaaattgcacgagaagatgaaccttaatatggtgatcaagggagacgatggtccggtcgaggaaatggagcacgaaatctttgacctcaagaatattcgcacctctgccgagcttgacgagctgctagacgtgcaacccgattttgctgtcgatgaatcgcagcccgaggaaacaaagctgccaaaatacaagtatttcgacaaggatgagggcaacatcaacgatgatctaaactatgacgatgacaatgatgaggagcaaagcgaggcctccgacgacgaggatcaaatcaatgataagcagggcctgggcctcagtgacgacgacaatgatgagggcaatgcaaagggcaaaaacaagagaaagaaacgctccgagaatccgctgattaaatccaatgatttccgtgacaaaaacaccaagcgagagcaacgcgtacagctgtggtacgagaaggatgtactacagaatatccagtcggatgacgacgaggaaacctacgatctgaacaatctggccaaggaattcaaggccaagggtgtcgccgttctgggtgagagcaccctaacgccggacgccaacgaggaggttgtccagggtaagaaggccaaacgtcgtgcacgccatgagaccgcaactaaagacagcagctcagagtcatccgaatccgaggatgacgctaacgaggatagcgacggcgaacagccagctgcaggtgagttcaaaataagcatttaatattcctaaacctaatattctcgtttgctttttatcaggtacaaatgccaagaaggttcgcctgtccgaaaacgaaatggctttgggcgcactgctgacacgcagcaagaagacacgccgtgacttgatcgacgcagcctggaatcgctacgctttcaacgatgagaacgttcccgtttggttcaagctcgatgaggacgagcatatgaccaagccaacaccggtgccgaaggagctgaccgccgagtaccagcgcaagttgcaggaggtgaacgtgcgtccgatcaagaaggtcatggaggccaaggcgcgcaagcatcgtcgtgccacgaaacgcttggccaaggctaagaagatggccgaaaagattatggagaacagcgatgccaccaaccacgagaagtccaagcaactgaagaaggtgtacaagaaggctcaggagaagaagaaggaggtcacatatgtggtggccaagaagcagacagcagctcgacgcgcacgtcgtccagctggcgtcaagggtcgctataaggtcgtcgatccgcgcgagaagaaggacaagcggtcaatggatgcaaagaagaggcgcgaaaagggttcgaagggtcgcaaggggaaggggcgtaaataaatgtaaatctaaaaaataaatatgtaatattttatagatactaaatatatatataaaacgaatcaggtagttttttttttctttgaatatgattttatacacttaaaataagaaatcagatgcgaaactgcaaatataaacgcaaaactgttgtttcctttgaagaatatatgtatttatattaaattcagctgactattgacttttccatgcccattgcaacgcctttaagtgcgaagaaattcgaaaaaaaaacatttttcagctgcaagaaaccgaaagggagccattcaaaaacacagtgtatgttttcagaggaagtcttttgcactctttttgaattctttaatttatttcgattttatgcgttatttcaaaaaaaaatgtattgacttttggataaatgccgtgcatttggacgccaactgccatttgacgttggtaatgcactaataaattttaaacaatatcgaaagcaaaaccattttgaatatctgagtttgcggctatacggagtaatccgtgtaagctagtgtattataggttatttttaatttgtaataataataataaataaatgcataccggtctgttaaatattatttcatttccatataaataattttataaatgagatgctgtttactattccaatacaattcaaccagttattttgagttcttattttatgtattctaatagtatacacatataaatatttttataaaaaggtatgaagggacttgtagataagaagacatcgcttttttttattatccgctctcctcgcaattgattttagctgatcatctcgcgatacttcagcttgtgtttggtcagcatgtccgtcactgtgaccagcttcttaattgaaagtatgttggatagctcgtgcagttcttgcgaatgagatacgcagatgtgatgcaaggtagccagctcgcgtcctgcaggaattataaaagaaatcattgtatatttaataatataacagcgccaaatagaaaacatgagctgacaaataattaccagtgtcttgtgaattcagatttgtactttg

SEQ ID NO: 19061 - DNA, 2602 bp, DROSOPHILA
ccacactgttggcaacacgtgcacgaattcgacatttgatttgaattcgttttgatttttatcgtaattgtacgaaaagccagcagcaatgggcaagaagacgaaagttggaaagacgcgcaaggataagttctaccagttggccaaggagacgggcctgcgatcgcgtgccgccttcaaattgatccagctgaatcgcaaattcggtttcctccaacaatcgcaagtatgtttggatttgtgcgcagctcccggtggctggatgcaggtggccaagcagaatatgccggtgtccagcattgtgatcggcgtggatctctttcccatccgtcccattgccggctgcattggtctcgtcgaggacatcaccaccgagaagtgccgccaatcgctgaccaaggagctgcaatcgtggaaggccgatgttgtgctccacgacggtgctcccaatgtgggtaggaactggctgtacgatgcctatcagcagatctgtctcaccctcaacgcgctcaagttgagcacacagtttctgcgcaacggcggctggtttgtgacgaaggttttccgctccaaggattacaatgccctgctctgggtgctcaagcagctgttcaagaaggtgcacgccaccaagccgagtgcgtcgcgtaaggaatccgccgagatattcgtcgtctgtcagggctacctggcgcccgatcacattgatccccgtctcctggactcgaagtatgtgttcgaggagctggatctcgatgccaaaaagaagagcagcctgctgcatcccgaaaagcaaaagcgcatcaaggccgagggctatacggcccaggatattgcgctgcgcaacgatctggctgccacagagttcctgaaggctgaaaatgcactggctgcgctgcagggcatcggttcgattcgcatcgatgatcagcgcattgccaatcacaagaagaccacgccagagattctcgagtgctgcaaggatctgaaggtattgggccgcaaggatatcaagggtctcgtgcaatggtggaaggatgttagggagttgttcgttgaaaaggaaaccccactggtcgtcggcaatgccgcagatgagaagcccaagccattgacgcaagcggaaatcgaggacatggaagatgccgagctgcaaacgcaaattgagacaattgtcgaagaggagaagaaggacttgaagcgtaagcgtaagaagacgctcaagaccaaggcgaaattgcacgagaagatgaaccttaatatggtgatcaagggagacgatggtccggtcgaggaaatggagcacgaaatctttgacctcaagaatattcgcacctctgccgagcttgacgagctgctagacgtgcaacccgattttgctgtcgatgaatcgcagcccgaggaaacaaagctgccaaaatacaagtatttcgacaaggatgagggcaacatcaacgatgatctaaactatgacgatgacaatgatgaggagcaaagcgaggcctccgacgacgaggatcaaatcaatgataagcagggcctgggcctcagtgacgacgacaatgatgagggcaatgcaaagggcaaaaacaagagaaagaaacgctccgagaatccgctgattaaatccaatgatttccgtgacaaaaacaccaagcgagagcaacgcgtacagctgtggtacgagaaggatgtactacagaatatccagtcggatgacgacgaggaaacctacgatctgaacaatctggccaaggaattcaaggccaagggtgtcgccgttctgggtgagagcaccctaacgccggacgccaacgaggaggttgtccagggtaagaaggccaaacgtcgtgcacgccatgagaccgcaactaaagacagcagctcagagtcatccgaatccgaggatgacgctaacgaggatagcgacggcgaacagccagctgcaggtacaaatgccaagaaggttcgcctgtccgaaaacgaaatggctttgggcgcactgctgacacgcagcaagaagacacgccgtgacttgatcgacgcagcctggaatcgctacgctttcaacgatgagaacgttcccgtttggttcaagctcgatgaggacgagcatatgaccaagccaacaccggtgccgaaggagctgaccgccgagtaccagcgcaagttgcaggaggtgaacgtgcgtccgatcaagaaggtcatggaggccaaggcgcgcaagcatcgtcgtgccacgaaacgcttggccaaggctaagaagatggccgaaaagattatggagaacagcgatgccaccaaccacgagaagtccaagcaactgaagaaggtgtacaagaaggctcaggagaagaagaaggaggtcacatatgtggtggccaagaagcagacagcagctcgacgcgcacgtcgtccagctggcgtcaagggtcgctataaggtcgtcgatccgcgcgagaagaaggacaagcggtcaatggatgcaaagaagaggcgcgaaaagggttcgaagggtcgcaaggggaaggggcgtaaataaatgtaaatctaaaaaataaatatgtaatattttatagatactaaatatatatataaaacg

SEQ ID NO: 19062 - protein, 817 aa, DROSOPHILA
MGKKTKVGKTRKDKFYQLAKETGLRSRAAFKLIQLNRKFGFLQQSQVCLDLCAAPGGWMQVAKQNMPVSSIVIGVDLFPIRPIAGCIGLVEDITTEKCRQSLTKELQSWKADVVLHDGAPNVGRNWLYDAYQQICLTLNALKLSTQFLRNGGWFVTKVFRSKDYNALLWVLKQLFKKVHATKPSASRKESAEIFVVCQGYLAPDHIDPRLLDSKYVFEELDLDAKKKSSLLHPEKQKRIKAEGYTAQDIALRNDLAATEFLKAENALAALQGIGSIRIDDQRIANHKKTTPEILECCKDLKVLGRKDIKGLVQWWKDVRELFVEKETPLVVGNAADEKPKPLTQAEIEDMEDAELQTQIETIVEEEKKDLKRKRKKTLKTKAKLHEKMNLNMVIKGDDGPVEEMEHEIFDLKNIRTSAELDELLDVQPDFAVDESQPEETKLPKYKYFDKDEGNINDDLNYDDDNDEEQSEASDDEDQINDKQGLGLSDDDNDEGNAKGKNKRKKRSENPLIKSNDFRDKNTKREQRVQLWYEKDVLQNIQSDDDEETYDLNNLAKEFKAKGVAVLGESTLTPDANEEVVQGKKAKRRARHETATKDSSSESSESEDDANEDSDGEQPAAGTNAKKVRLSENEMALGALLTRSKKTRRDLIDAAWNRYAFNDENVPVWFKLDEDEHMTKPTPVPKELTAEYQRKLQEVNVRPIKKVMEAKARKHRRATKRLAKAKKMAEKIMENSDATNHEKSKQLKKVYKKAQEKKKEVTYVVAKKQTAARRARRPAGVKGRYKVVDPREKKDKRSMDAKKRREKGSKGRKGKGRK

SEQ ID NO: 19063 - DNA, 2252 bp, DROSOPHILA
gaagatgtggcgccgcactgtctcaagctactcacatggctgcacgattgtcaggaggagatgcactccgagcaccgccatctgcgactgagccaatccgttgtggaatccctgctaaaggctcacctgtacctgttcgagtgctatgatcgcttcgggcaatcgctggccgaacgctgcgattgccgtggcttcttcgctagctgctctgcattggtggatcgacggaagtgtattcgtgagctgtgtaccaccatcgtgaacacacgaaagggagaaactcatgcaccactgcttcatctttcgcatcgaacgttggccgagattcagcctgcgtggagtgagatcggtgatttggactggtcggcaatacgccaatcggatgcgctttcttccagcgattttatcaatcccgatcttcagcagatgcgacggctagtcaagcggattggccgcttatccagccttgaggacatgcagaccgcaataaagcgctccatggagctgattgagtaccaggtgtggctgcagctttttagggagccaaaggacagcgaaattcacaaggattgctacctaatgcgccacatgatctgtgacactttatcggagggcggatctaccgcttgcaccggcttcctgcacaatatctttctgttcgtatcgcaatccgccaatgagatgagattctgggccagtatggagcatgtacgtctggccggcagccttattgcctacctaatcgaccattggaatcgccacctgccctacctagacttggatgagatgcaattgaccgctgatgcaccagtcacggctgtctcgcagctgcccgtgaacgaggccacatacataacctacctgatgctggccaccggatccatatgtcgccggcagttcgcccagcagctgcgtgcccaactaccccccaattcctggacacatttgctggagctgctaaataaagtggcattcgttttcacttaactacactacgagtttaatcatgtttcggcaaaaactcgcagttgccatcggtcaggcgaaccaccttctcgcccttctcggccaggatctcctcgatgttgcgcttgccgtccagatctgtgaaccagttcagattgtcggcgatcaggtggtgattggagcagccctcgcaggtcacgataacaacgccgcgttggtatgccagcttcgaaatggtcttcatgttccgggtctggcacaccttgcaggtgtagatcagctgcatcttggcctccagtttcgccagaggaatgctattcgtggccaccgtcttgtccgcatcgtcctgggagcagagcaaaataattatacttaacttttttgttatacataattttaaatattgcattccatttataatattttaaattacaaatgtaaataacattatttaatatcaattgggtagtttatttgtatttacaactgatttccaaacataccactggcttactgcagtgtatactgcggcaaatgcacgtgtagttgttgctgctgctaaaaacagctgtttgtgttttggttgcaaagtgatgcacttgcaactgcaattgtggactatttaaagcatcaatttgtgttcttcgggaactggtaagtagtgcgcctcttctcacacctgcgctgattttataaaatttttttagggcggacatatcctcgattttgttgatattatttaactcaatcgaaaagtgtgaaattcatttaaacttagagatggcacctcctttcatttcaaaactagtcgcgagtcacgattttaaaaagttactatagctgtcactggtgctgataaaatttgctgtaactcacagacattaaaaccaattgttaatataaattctactgtgaaatattaagttaagttattaatgaagtccacctggactctggggcttaaaaataacttatttttcaaacaggtagtaaccgtttctccgctatcccgtgacactgccaatcgatgacatctgttaatgccatctcacgtgatactatcgacagtactatcgaccatctggtagtaagcactcatattttcgaattttttttgtggaaattctcgagtcaaacaaattatataaagggcacgaaccgatggcgacacgtgtggtggcaacggcgacagtgcgggcggtgaaaggccggaagttaatcccgacgcgggccgctctgactctggtaaggaaaccaaaacctggtgaaatcggcgcatgctgctg

SEQ ID NO: 19064 - DNA, 252 bp, DROSOPHILA
atgcagctgatctacacctgcaaggtgtgccagacccggaacatgaagaccatttcgaagctggcataccaacgcggcgttgttatcgtgacctgcgagggctgctccaatcaccacctgatcgccgacaatctgaactggttcacagatctggacggcaagcgcaacatcgaggagatcctggccgagaagggcgagaaggtggttcgcctgaccgatggcaactgcgagtttttgccgaaacatgattaa

SEQ ID NO: 19065 - protein, 83 aa, DROSOPHILA
MQLIYTCKVCQTRNMKTISKLAYQRGVVIVTCEGCSNHHLIADNLNWFTDLDGKRNIEEILAEKGEKVVRLTDGNCEFLPKHD

SEQ ID NO: 19066 - DNA, 5504 bp, DROSOPHILA
gctttatttagttttcgttctttaaactatgtatcttttaagtgggcagtaaacaagcttcatccactaaaagcccaaacaaatatttactgcctttttttgctactataattggtttattactgagctgagaacctctcccaaagagatctatttaaatgccgactgagagattttaagaacagagagagagttccattttgtttatgaaaagctaattgccaaattgggaagccaaagcctgctggaatattgcattccatttaagaaaagagggtaggaagaagaagaactggaaacgtggctaaatatgttaactaattcattaacttcgtttccttttcaacgcccactggaactagaatcagagagagagagagagagagagagagagagagagagagagagccaaacttaaaattaaaacactacctttttccagttaaccggccggcttacacacacagtcaaacgcctgaagcttgaaagagagtgtttgcttgatgagagcggcaagcgtataaaagcagcgtcgccggcagaagaaagtcagttgcagtgcagtcgtcgtgacgatcggttcagtgatagcttcccagtggctggagagagtgagagtagagagtaacggaaagagagtgcgaatcgaaccgaacgctattccttcgcccacgatttaagtgaacgcttattagcgaattgaagacccgagagccccagtgcccagctgatttcgtattctttgttgaggtaagccaaggaatccctggaaccacctcatttcgtagcaccttagtgatgtaattacgcaccaagatttacccttgccaaaaagtggaaaacgcttttgcgaacttcgatgccgaatggtgttcgtctcgaatcggttctaaaattacacacaatggttttttggcttcgattgatttgatttgatttttgggtcaatcgattcgaaatcgaaaagttttgaactcgtttcgcagaatcgcagttcgcgcggatctctcgcctcgctcgcaagcaaatatgtgaaggacaacgacgttaaccgatcaactagaagccctcttcttctgcctcttcagaaccgatcagatcggaatagaaatatagaaacgaccatagcacctccgtcgactgtggagtgcgtgaacgtatttcgaagcgtgaggtactcgaaccggaaccaacttgagtgtagtgcatattcgggatcttatccaaacgcaggcttacataacccctattttaataccttttcaaaaaggaataattgaaattcaaaacaaaattatttagcaacaaacaaacaatcagttatatttttgaactgatatgcctcggggctaggggtcccagactttcaaattctagtgataacccccccgatcggcgagttcatctggaaatgttgcccatatgggccgggtgcacgtgaatctcttcagtgcccattgacgcactttgtgtgcctccactgggtccttgacccgctgtgatccctgccctttcccatggattggataatctaggtgtcattatcttccctaaccttttcccacgattaaagtgaaaccatttgccacgattttagtgccgtagtgccagatcaaagagccaaaatagatcagagaatcgaaatttaattaaatcatgacaccgaaacaccgagacagaccaaattaaattcaattgaagctgtcatggcaacaagtgccagcaaaaaaaaggaagagcactacggcgaaaccagaagataacaccgaaaagtcaaatcgattgttgcaatttgagactctccgaaagcgaaaattgcagcggaagaggcggccaatcggccattactaaacggtgatggggttggggaggggatccgaagtcttggtgactgactgggcgccctgccaaaatgatggcaaaggcagagacaccatgattcctcagccaaatcgaacgaaaacgggtttacgctctacatggaccccattgcacactgaatccgtttatccagcgaggcaaaaagtgccgacgacaatggaaacaggggcgtagtatccgtacctcctccgtcctacgattcttccagcagcgccaacgccccaaaagatattgattccgacttttgcgcgattcagcgaaaaacataaggggaccaaaagtgggcagacgggcggaggagtggtgtctgtttctttgatatgcgtgggtgtgttgtctgtgcggcaatcgatgcacttccggtgggttctatggggaaatactcttgcgtttcagtatatatctactatatatattgcaattttatggtaattatattttctgtcaacttttgccttgactccgcttgatttattgcattgttcttgaagaatagcctcataaggcatgcaagcaaacatggctttcgaactagcgcaaaattagctagtagcttatagagtatatgtagcttacccccaacggtttttatatcatttgtttaaaccacttaagaatattcgtagccttgtggacacactttatcgtggatcgtggaagttatacgacaccgtaatatatccttatcactcacgcatattctggcccacttcagctagaaacgtttggcgcgttcgccttatcataaaaatcaggctatcgactgattaactgagtttaataagccagcaaacgtaaacaaaaactacgaaagttctggaaaactaaccaaggctatttcaaaacggcgtgaaatggctagcactctaaattattgaagttttcaacatatgtatatctaatctgatagccaagaaaacataatggttaccaactttccatatacaccgtaatttattattgatgaatatcaaattatcgatagtacttccccgataagattctgttaacacacattgctctacttttctatcagggaattgcattgagaaagcgcagagatggccgatgaagcacaagcaccaccagctgagggagcaccaccagccgagggagaggcgccaccacccgccgagggagccgagggtgccgtcgagggcggagaggccgctccaccagcagagcccgccgagcccatcaagcacagctacacgctcttctacttcaacgtgaaggcgttggccgagcccctgcgctacctgttcgcctacggcaaccaggagtacgaggatgtgcgcgtcacccgcgacgagtggccagccctgaagcccagtgagtgccatagtccatcattgagtggtcagtggactaaccataatctactctgtctcatccaatagccatgcccatgggacagatgcccgtgctggaggtggacggcaagcgtgtgcaccagagcatttcgatggctcgattcctggccaagactgtcggcctgtgcggcgctactccgtgggaggatctgcagatcgacattgtcgttgacaccatcaatgacttccgtctaagtagcgaacaatgtgtgcctcagtttcatgttcagtgtccttgattaactctggaatttttaatgtatagaaattgcagtcgtctcgtacgagccggaggacgagattaaagagaagaagttggtcaccctgaatgcggaggtcattccattctacctggagaagctcgagcagaccgtcaaggacaacgatggtcacctggctctgggcaaggtgcgtgctcaaatgagaacttgaaaccatacactcgttaattttgaatgaacaatactaagaaccatcgattcctttcacccacagctgacctgggccgacgtctacttcgcaggcatcaccgactacatgaactacatggtcaagcgcgatctgttggaaccctacccagctctgcgcggagtcgtggatgccgtcaacgctttggaaccgatcaaggcctggatcgagaagcgccccgtcaccgaggtctaagttcaccgaacaggacttgggaggatgggaaagcattgcacaaccactcagacacaaccgcaccgcagaaatgcacaccacccacatctgcacacattttgttcctttttgcggaggatccgagaggacggcggattttcgcacggggtcataaacgcgtaggagtttagcacgtatcactatggataaatcgtatttgttcttaatttcttggttataattctctttgcatggcgctatatacatatttctattggggtccggcagcggatcgccgttcgttagcttcttctgaaatgatgaaagataatacttattgcacagtttataatattttggcttacttttagaacatacatttagcgcacctatgcagacatttgctgtacctatatatatatatatatgcataaaatacaaaagctacgagtggttcatcttataggcgtattctattgcaatttattcaatgcggagggctcaataaatatttaaaacaacaccagctaaggctgagaaacaattacaaattcttattttgttttttatacaacacgccatcgcggccccaggaattttcttcgtctcatccagttcccttttaagtagccattaaaaaaagactcacatcaatagaaccggtttctccaaaaaaaaaaaaaacagactcttactgccaaatttcaaatgcacataatcacattattatatacatattatttattcaaatttgtaattgtattttttgaatattttcacaaaacactttttaataaacataacacctaaaaaggaatgagcactttttaaaagcacgacaactggttttatttaatttttgtacgatgtattggaataatttattaattgttgacatatttaagaaatttaaagaaagtgtttatttacattattaatttttatttttattatcctttcaatttgcatttccaaagccgacccgacagacataaataaatgcatggagttgtgttcaacattgttttataaacgtttaaaaaaataacatttcaaattaacattcttttaagtcactttggacaattcaagcttaaaagtataaatgcacaattggtcagttttgattcattatttcatattgtatgttgcggttactggtgcttccagttgggtgggcgcttctcgaagaagctagcaatgccctctttggtgtcgcccagctggaaattttcgcacatcttctcctgcgcagccgaaaaggcttccgcttgggacatggccagttgcttgtagtagaactcttttcccagagagatgacggcacgactttttgcctttatggcattggtgatttcctcgatctccttatctagttcctctgcaggaacagctttggtgaccattcccgatatgtaggcttcttcaccagtaacgggaagaccggtcattagcatataggcggactttggacgcgacataatccgggcaactgcgactccgggtgttgagcaaaaaactccgactccagccctaaaaatataaattataacatgattaactggtttcatagagggttttcatccttaccctggagtagagaacttg

SEQ ID NO: 19067 - DNA, 1536 bp, DROSOPHILA
cggatctctcgcctcgctcgcaagcaaatatgtgaaggacaacgacgttaaccgatcaactagaagccctcttcttctgcctcttcagaaccgatcagatcggaatagaaatatagaaacgaccatagcacctccgtcgactgtggagtgcgtgaacgtatttcgaagcgtgagggaattgcattgagaaagcgcagagatggccgatgaagcacaagcaccaccagctgagggagcaccaccagccgagggagaggcgccaccacccgccgagggagccgagggtgccgtcgagggcggagaggccgctccaccagcagagcccgccgagcccatcaagcacagctacacgctcttctacttcaacgtgaaggcgttggccgagcccctgcgctacctgttcgcctacggcaaccaggagtacgaggatgtgcgcgtcacccgcgacgagtggccagccctgaagcccaccatgcccatgggacagatgcccgtgctggaggtggacggcaagcgtgtgcaccagagcatttcgatggctcgattcctggccaagactgtcggcctgtgcggcgctactccgtgggaggatctgcagatcgacattgtcgttgacaccatcaatgacttccgtctaaaaattgcagtcgtctcgtacgagccggaggacgagattaaagagaagaagttggtcaccctgaatgcggaggtcattccattctacctggagaagctcgagcagaccgtcaaggacaacgatggtcacctggctctgggcaagctgacctgggccgacgtctacttcgcaggcatcaccgactacatgaactacatggtcaagcgcgatctgttggaaccctacccagctctgcgcggagtcgtggatgccgtcaacgctttggaaccgatcaaggcctggatcgagaagcgccccgtcaccgaggtctaagttcaccgaacaggacttgggaggatgggaaagcattgcacaaccactcagacacaaccgcaccgcagaaatgcacaccacccacatctgcacacattttgttcctttttgcggaggatccgagaggacggcggattttcgcacggggtcataaacgcgtaggagtttagcacgtatcactatggataaatcgtatttgttcttaatttcttggttataattctctttgcatggcgctatatacatatttctattggggtccggcagcggatcgccgttcgttagcttcttctgaaatgatgaaagataatacttattgcacagtttataatattttggcttacttttagaacatacatttagcgcacctatgcagacatttgctgtacctatatatatatatatatgcataaaatacaaaagctacgagtggttcatcttataggcgtattctattgcaatttattcaatgcggagggctcaataaatatttaaaacaacaccagctaaggctgagaaacaattacaaattcttattttgttttttatacaacacgccatcgcggccccaggaattttcttcgtct

SEQ ID NO: 19068 - protein, 249 aa, DROSOPHILA; identical to SEQ ID NO: 19059

SEQ ID NO: 19069 - DNA, 3320 bp, DROSOPHILA
gcttcttcaagcattatatttgacaataggctttttcctcagtcagtcatatattttagcgcaaattattagctataaatataagccatgctaactaattcggcctgcgttaatcagctagattttccaaattttgacccgaccaaattttgatgagcatgtttatcttgttgttaatcatttagtttttaagtgattaaattctttgaattgagacagacttattagaataccgagttctttgtctttggtcaataaacaaggctgcctataaattagccacacagttaatgacagaaattcgatgttgtttctgccacaggttggcctaaaggtgggcgtacggcagcgaggatgcaatggtctgtcctacacgctggactatgccagccaaaaaggtaagccactctggacagaatgttgttcggtggagatctaatgctgcgttctgtgtcgatttttgccagcagacaagttggatgaggaggtggtccaggatggcgtcaaggtcttcatcgacaagaaagcgcagttgtcgctgctgggtaagttcataccagcttagcatagcattggacaagccagctaatacagagtataattcgcttgcaggtaccgagatggactttgtggaatcgaagctgtccagcgagttcgtgtttaacaatccgaacattaagggcacatgcggctgcggcgaatcgttcagcatgtaaaccgatggagatccggaggagatccgccggcacccgcctcgcagacagacctaaattaactaagttaaatgcagtacgcggcccgaccttgtatctcattacgttgttggcaaaagcaccgcatcctttgtaaattttacttcgcaaacgaattctaaatattaagttgtgttctatagttaaattttagttgtagcgctaggtaagtgacgcacccgcttccttgccgcaggctggcagtttgtcctctttagccctagttcaatatatagacaaggaatgttctagaaaacccatgtgcaaatcaagtttattattgaaaaaatacttcgactacgtgcatgttaccgctgattgataccctggaaaccgtactcctcgtagtcgtcttgcgtgtaaacaaactcttcaaagttggggctggtcgcaacctccttgccgccgtaccacgcgtaccgcaccggatcctcgggacagatgagtgacacttcaagatcgtcgggcaccagggcacgtaaatcgcgctttaggcgcggcagaaatcccggaaactgggcactgccgcccacaataaggatgttgagcaggagttcgcggtgcgcttcccaggggcaagccttcagacaatcggccaccgcttccggaatgcccacctgttgcacaccaatgtccgagggattgaagagcagctcgggcacggtgaaacgttcattgcacagcgacaccatttgctgttgctcctcatcctcgcgcggctttccgggaacacgaacatagccccgtttgacggtggtgaagtctggaaggacataatcaactgtgacttcgcgtcgcttctcctccgaataatgcacctgcatcgcctgcttgaagtcctccgccacaaagcagacatcttccttgatctggttaactacatgactctcgtccatgacgtttaggtggcgataagagattagctcctttagctggttggtcagcgccttcccgcccatgtcgatgcgtcgtatgccttggagaacgcgccgtcccagcacaaaaggaacaacgtgggtgaaactgtagcctacatcgatgatgatgcagttaagcgattccattgtagtccgctcctcgctgtcagccacatagttaaaggcagccagatcggcagcagtggtcttgtacaccccatcaaccttgtactcctcaaacagaatctccagcgttgcctcctggatgctctggaagttcatctgcggctcagtgatgacaatattgcggttctccagcgaacaaccaatgccgtccttgctgaatatgtaatcccacaccgttttctgtgtgtgccagttgagcaggtagccgcgctggaacgccagaatgtaatagagcgccgatgtgtcccggcattcatctatctgatttcccacaaaagcgcgtcgccgctcgctctttgctttcatgatgcagttgggcaccacatggggctcatcctgattggccaggcccactttcgccgtatgcgctccgttgtccaacaccaccacagcgttggccatccttttcgtcctcaacgtagatctataccatttttcggaagaggacaacaaacaacacttcttctgttctagtgctgtcgattaatttgttcaatctatcgagatttttaaaatcgttatttttggtgttttaacggtctacatcaaattaaataaggaaaacaaaaacaaaatgaaaacacaagaaacaactttttggaatgctaataattctatatttcagcaaaatacaaatacacatacaataaaattataatattctcgatgtagatctatagcatttttcgacagaggaaaagaaatgacacttcgtctgctttagtgctgtcgattaatctagccatttttttaaattggatctagtgagaattttaaaatcgtaatgtttggtgtttttaacgggcaacaacaaattaaaaaggacaaaaaaaaaatagagcacagatcaaacaaacttttggaacgctaacaattctatatttcgtcaaaatacaaatatagtacaaaaaactatcgaccaagcctacttgctaattgggaatcgaggcggcaggagcagccagtggcaggacctctagcttatgcgaatcactgtgatcgctgacgaagtgcagcacttcgaagcccacctctaccatgatcaggattatgatcatccactcgagccggatatgatgggcatcgttcagattgtgggacaccagctcggccagttccacgcagtggttgatcttctcgttcatcaccttggtgcgccgtgagatgctgaagtaggagcacacctgcaggtagagtgcctccagttcctcgcggtcccagtagaaatcgggtgcatccagcagatccgacgacaggttgatcacatgacgcagggcaaataattcaccggtttttcgcagcatggccgcccgcgagattcttaatcggcgaccacgctttagatcctcggtgagatgctctatggagtctatgtagcggtccagtgtcgcctcccacatgcccagctttattgactgtgccatcgcattggagaaggtgtacttatacaggaaactatccgtat

SEQ ID NO: 19070 - DNA, 1320 bp, DROSOPHILA
aagaagtgttgtttgttgtcctcttccgaaaaatggtatagatctacgttgaggacgaaaaggatggccaacgctgtggtggtgttggacaacggagcgcatacggcgaaagtgggcctggccaatcaggatgagccccatgtggtgcccaactgcatcatgaaagcaaagagcgagcggcgacgcgcttttgtgggaaatcagatagatgaatgccgggacacatcggcgctctattacattctggcgttccagcgcggctacctgctcaactggcacacacagaaaacggtgtgggattacatattcagcaaggacggcattggttgttcgctggagaaccgcaatattgtcatcactgagccgcagatgaacttccagagcatccaggaggcaacgctggagattctgtttgaggagtacaaggttgatggggtgtacaagaccactgctgccgatctggctgcctttaactatgtggctgacagcgaggagcggactacaatggaatcgcttaactgcatcatcatcgatgtaggctacagtttcacccacgttgttccttttgtgctgggacggcgcgttctccaaggcatacgacgcatcgacatgggcgggaaggcgctgaccaaccagctaaaggagctaatctcttatcgccacctaaacgtcatggacgagagtcatgtagttaaccagatcaaggaagatgtctgctttgtggcggaggacttcaagcaggcgatgcaggtgcattattcggaggagaagcgacgcgaagtcacagttgattatgtccttccagacttcaccaccgtcaaacggggctatgttcgtgttcccggaaagccgcgcgaggatgaggagcaacagcaaatggtgtcgctgtgcaatgaacgtttcaccgtgcccgagctgctcttcaatccctcggacattggtgtgcaacaggtgggcattccggaagcggtggccgattgtctgaaggcttgcccctgggaagcgcaccgcgaactcctgctcaacatccttattgtgggcggcagtgcccagtttccgggatttctgccgcgcctaaagcgcgatttacgtgccctggtgcccgacgatcttgaagtgtcactcatctgtcccgaggatccggtgcggtacgcgtggtacggcggcaaggaggttgcgaccagccccaactttgaagagtttgtttacacgcaagacgactacgaggagtacggtttccagggtatcaatcagcggtaacatgcacgtagtcgaagtattttttcaataataaacttgatttgcacatgggttttctag

SEQ ID NO: 19071 - protein, 398 aa, DROSOPHILA
MANAVVVLDNGAHTAKVGLANQDEPHVVPNCIMKAKSERRRAFVGNQIDECRDTSALYYILAFQRGYLLNWHTQKTVWDYIFSKDGIGCSLENRNIVITEPQMNFQSIQEATLEILFEEYKVDGVYKTTAADLAAFNYVADSEERTTMESLNCIIIDVGYSFTHVVPFVLGRRVLQGIRRIDMGGKALTNQLKELISYRHLNVMDESHVVNQIKEDVCFVAEDFKQAMQVHYSEEKRREVTVDYVLPDFTTVKRGYVRVPGKPREDEEQQQMVSLCNERFTVPELLFNPSDIGVQQVGIPEAVADCLKACPWEAHRELLLNILIVGGSAQFPGFLPRLKRDLRALVPDDLEVSLICPEDPVRYAWYGGKEVATSPNFEEFVYTQDDYEEYGFQGINQR

SEQ ID NO: 19072 - DNA, 4937 bp, DROSOPHILA
tcaccagtaacgggaagaccggtcattagcatataggcggactttggacgcgacataatccgggcaactgcgactccgggtgttgagcaaaaaactccgactccagccctaaaaatataaattataacatgattaactggtttcatagagggttttcatccttaccctggagtagagaacttgctgttcttggtgcagactaccatgtcacatgacaccaccagttggcagcctgcagcagccgcatagccattgacttttcctagtacgggcaccggcagtctttggatgtcgtttataacatcggttagcttctggaacacacaagcctgtatcttggggtcattgtgcaactccttgagattgtgacctgccgaccagatctttccttgggccgtcaggaccacgcatctcagatccaagttgtctttatcttttagcagggcgtcctgaagggcacacatcatgtccagtgatagggaattcagagtttttggatgattcagcgttatctctcgcactccgttatgctccttgaccaggaccaaatcactgggtccattgctggtaaagcgaatgacctgttgcacgcaacctgttgcatattttgatatttttaaggagttgtttaaaatacgcaacatttttattttgatttggcagcaagtgttggtaaattcgccgcccaaacagctggttatctatcgaaacagctgcaagtcgatagcaaggcgcaacagttgtcaaacggtcactctaagccgcaatgagtttgtacgattaaaagtttatgtctattcgcgtttttcgaagctttcccgattcccgtagctgtcccactgtacaggtgagtaaccgctcaggtgcgtcaacaaccgctgccgttctttgtccatcagctgagcggtcagacagaacaacaacaaagccagaagctcgcgcgccagcctgtgtacgtagtaaatctatgtgactactacaaaagcagaactttatcagccaccaaagccatttgttatttgtcgccccacattcgcggccccgccaatcagttaacaaatcgaaccacgcgagtgcggatcccccgacttgagctccactaaaacgtacaccattaaattaccacattccagcttgccacacgatgcgtccgttctccggcagcgattgccttaagcccgtcaccgagggcatcaaccgggcgttcggcgccaaggagccctggcaggtggccaccatcacggccaccacggtgctgggaggcgtctggctctggactgtgatctgccaggatgaaagtgagttggtggtgtctatgtgtgtgatagatctcctggaattagttctaaacaacaatgcctttgctggattttcttcttgcacagtttatatgcaatctgcaagaaaatatgacaaaattcgacttaaacgaaagttggacttatataaaacagtgtcaagtcatcacagtcagccgatttcatttatttcgtgcttgcagggcagggcacgtcaattacctaaatccatcaaactatcttatctgatgggtgcgttgcttataaacatagctagacttcttctcttacaattttcctaaaaaacgctaatataaaacgtatcgtacaaagagaattcacctaagaattcaccacttttataatattgtattaaaataagcacgctttactgtgtactttgtgcccatagcttatataagccatgcactcgtctggtgccctccccgaacttctgaatttaatctagtcacagattacgatagattagagtttaaatgtttgctaaagcgtgtagcaacttaaaatcaatcaaatatgcaaagttcaacagcgcgaagaaaattgataagattgagatatcctgcccttgctagcacatagtaatagtttaggggcttagtaccaaaactaatgagattaggtaggtagtttccccgataccatgactaatgctttaaattaggaatgatgaaaaaataatgtttctagcatagcttctcgataaagtgccataaagcctgtccaaagtttcgtccacagcaaggcatgtcatgtccgataagatcgagcgggtatcatacacacttcgtttatcaggctgcaatttttttcaatgattctttgttttgggtctgttaacctcatgaatataaaacttttaacgacttcagtctgatgaaaacaaaggacagtgaaaggtttatctatagtaatataataataactgtacgcaaacttattccataattttctctcccaagatctttacattcgtggcaagcgtcagttctttaagtttgccaagaagattccagccgtgcgtcgtcaggtggagactgaattggccaaggccaaaaacgacttcgagacggaaatcaaaaagagcaacgcccaccttacctactcggaaactctgcccgagaagggactcagcaaggaggagatcctccgactggtggatgagcacctgaagactggtcactacaactggcgtgatggtcgtgtatctggcgcggtctacggctacaagcctgatctggtggagctcgtcactgaagtgtacggcaaggcctcctacaccaatcccttgcacgcagatcttttcccgggagtttgcaaaatggaggcggaggtagtgcgcatggcatgcaacctgttccatggaaactcagccagctgtggaaccatgaccaccggcggcaccgaatccattgtaatggccatgaaggcgtacagggatttcgctagagagtacaagggaatcaccaggccaaacatcgtggtgcctaagacggtccacgcggccttcgacaagggcggtcagtactttaatatccacgtgcgatccgtggatgtagatccggagacctacgaagtggacattaagaagttcaaacgtgccattaacaggaacacgattctggtatgggtttacatagcaaaatgtattctaaaactaatcttgaaactttaatcagctggttgggtctgctccgaacttcccctatggaaccatcgatgacatcgaagctatcgccgctttgggcgttaagtacgacattcccgtgcacgtggacgcctgcctgggcagctttgtggtggccttggtccgcaacgccggctataagctgcgtcccttcgactttgaggtcaagggagtgaccagtatctccgctgatacccacaagtatggtttcgcgcccaagggatcatcggtgatcctttactcggacaagaagtacaaggaccatcagttcactgtgactactgactggcctggcggcgtgtatggttctcccacagtcaacggttcccgtgccggaggtattatcgccgcctgctgggctaccatgatgagctttggctatgatggttatctggaagccactaagcgcattgtggatacggcgcgctatatcgagagggggtaagtttgtatcaaagttcgttgtgacaataatataattttaaatctatattaccagcgttcgcgacatcgatggcatctttatctttggcaagccagctacttcagtgattgccctgggttccaatgtgtttgacattttccggctatcggattcgctgtgcaaactgggctggaacctgaatgcgctgcagtttccatctgggtaggtgactcaacttttaaattagcggaaccattcttataagtgaaattccctctaagtatccacctgtgcgtgacggacatgcacacacagcccggagtcgcggataaattcattgccgatgtgcgcagctgtacggcggagatcatgaaggatcccggccagcccgtcgttggaaagatggctctctacggcatggcacagagcatacccgaccgttcggtgatcggagaagtgactcgcctattcctgcactccatgtactacactcccagccagaaatagacacctggagcaatccccgttctcttcgcccaccccacggagctaatgcatttcctgtgctgtatttaaaccaccaaaacaccccgtcgttaaaccttcctcaagcaatttatattaggatgcaattagtgctgtaatcgagggtacaaaacgtcgttctacgcgaaaatctatctacctatgttcatcccatttgtcaacattcgtcgctctaagagccatgttattaaagtgtttttctgtgtaacttgctagtgaaataataatataatattaatcaatttttgtgtactatacatttgtgaatgctgttaatgctcgttaatcttgaaacttccatttcctctgcaaaatagaatgaaaacatatacatttagcttaattggattgtggcctcacaaatttttagcatggatctatttgttaccatttaatttatatttgtttacattgtttaccacttcagcaattaacaataattactgctgcgtgggtatatgcaatccggtccgatctgatctggattggtgtttttatttcttttcgaacattttgccacgcgtcggcgttttttaatttagttgatcttggatgcccagctgacacgcccatttcctcttttgtaatttatggaagtctcgaatggcgtgcacaaaaattatttcaaatacatttctatggcggaaacatttatttcaaaggcaagcgcacattttaacaaggcacacgttcgttgtcatttttcaaagaaaaaataaatataaatagccaaagcgaagcaacaagtgtcgcacaaaggtgacgatcgatttgtggcatccatatcaaaacctgtcaccctaacacacctaatgcgcccacgcaactctgcacttcctgcccctgtccaccagaaatccgggtgcactagcaactccagacagccgggcagcccagaaaaattcggctcaaactgggttgccaaaaaagtgtgcatgaaataaattcacttttttcccca

SEQ ID NO: 19073 - DNA, 1782 bp, DROSOPHILA
caccaaagccatttgttatttgtcgccccacattcgcggccccgccaatcagttaacaaatcgaaccacgcgagtgcggatcccccgacttgagctccactaaaacgtacaccattaaattaccacattccagcttgccacacgatgcgtccgttctccggcagcgattgccttaagcccgtcaccgagggcatcaaccgggcgttcggcgccaaggagccctggcaggtggccaccatcacggccaccacggtgctgggaggcgtctggctctggactgtgatctgccaggatgaaaatctttacattcgtggcaagcgtcagttctttaagtttgccaagaagattccagccgtgcgtcgtcaggtggagactgaattggccaaggccaaaaacgacttcgagacggaaatcaaaaagagcaacgcccaccttacctactcggaaactctgcccgagaagggactcagcaaggaggagatcctccgactggtggatgagcacctgaagactggtcactacaactggcgtgatggtcgtgtatctggcgcggtctacggctacaagcctgatctggtggagctcgtcactgaagtgtacggcaaggcctcctacaccaatcccttgcacgcagatcttttcccgggagtttgcaaaatggaggcggaggtagtgcgcatggcatgcaacctgttccatggaaactcagccagctgtggaaccatgaccaccggcggcaccgaatccattgtaatggccatgaaggcgtacagggatttcgctagagagtacaagggaatcaccaggccaaacatcgtggtgcctaagacggtccacgcggccttcgacaagggcggtcagtactttaatatccacgtgcgatccgtggatgtagatccggagacctacgaagtggacattaagaagttcaaacgtgccattaacaggaacacgattctgctggttgggtctgctccgaacttcccctatggaaccatcgatgacatcgaagctatcgccgctttgggcgttaagtacgacattcccgtgcacgtggacgcctgcctgggcagctttgtggtggccttggtccgcaacgccggctataagctgcgtcccttcgactttgaggtcaagggagtgaccagtatctccgctgatacccacaagtatggtttcgcgcccaagggatcatcggtgatcctttactcggacaagaagtacaaggaccatcagttcactgtgactactgactggcctggcggcgtgtatggttctcccacagtcaacggttcccgtgccggaggtattatcgccgcctgctgggctaccatgatgagctttggctatgatggttatctggaagccactaagcgcattgtggatacggcgcgctatatcgagaggggcgttcgcgacatcgatggcatctttatctttggcaagccagctacttcagtgattgccctgggttccaatgtgtttgacattttccggctatcggattcgctgtgcaaactgggctggaacctgaatgcgctgcagtttccatctggtatccacctgtgcgtgacggacatgcacacacagcccggagtcgcggataaattcattgccgatgtgcgcagctgtacggcggagatcatgaaggatcccggccagcccgtcgttggaaagatggctctctacggcatggcacagagcatacccgaccgttcggtgatcggagaagtgactcgcctattcctgcactccatgtactacactcccagccagaaatag

SEQ ID NO: 19074 - protein, 545 aa, DROSOPHILA
MRPFSGSDCLKPVTEGINRAFGAKEPWQVATITATTVLGGVWLWTVICQDENLYIRGKRQFFKFAKKIPAVRRQVETELAKAKNDFETEIKKSNAHLTYSETLPEKGLSKEEILRLVDEHLKTGHYNWRDGRVSGAVYGYKPDLVELVTEVYGKASYTNPLHADLFPGVCKMEAEVVRMACNLFHGNSASCGTMTTGGTESIVMAMKAYRDFAREYKGITRPNIVVPKTVHAAFDKGGQYFNIHVRSVDVDPETYEVDIKKFKRAINRNTILLVGSAPNFPYGTIDDIEAIAALGVKYDIPVHVDACLGSFVVALVRNAGYKLRPFDFEVKGVTSISADTHKYGFAPKGSSVILYSDKKYKDHQFTVTTDWPGGVYGSPTVNGSRAGGIIAACWATMMSFGYDGYLEATKRIVDTARYIERGVRDIDGIFIFGKPATSVIALGSNVFDIFRLSDSLCKLGWNLNALQFPSGIHLCVTDMHTQPGVADKFIADVRSCTAEIMKDPGQPVVGKMALYGMAQSIPDRSVIGEVTRLFLHSMYYTPSQK

SEQ ID NO: 19075 - DNA, 3344 bp, DROSOPHILA
tcgatgatgatgcagttaagcgattccattgtagtccgctcctcgctgtcagccacatagttaaaggcagccagatcggcagcagtggtcttgtacaccccatcaaccttgtactcctcaaacagaatctccagcgttgcctcctggatgctctggaagttcatctgcggctcagtgatgacaatattgcggttctccagcgaacaaccaatgccgtccttgctgaatatgtaatcccacaccgttttctgtgtgtgccagttgagcaggtagccgcgctggaacgccagaatgtaatagagcgccgatgtgtcccggcattcatctatctgatttcccacaaaagcgcgtcgccgctcgctctttgctttcatgatgcagttgggcaccacatggggctcatcctgattggccaggcccactttcgccgtatgcgctccgttgtccaacaccaccacagcgttggccatccttttcgtcctcaacgtagatctataccatttttcggaagaggacaacaaacaacacttcttctgttctagtgctgtcgattaatttgttcaatctatcgagatttttaaaatcgttatttttggtgttttaacggtctacatcaaattaaataaggaaaacaaaaacaaaatgaaaacacaagaaacaactttttggaatgctaataattctatatttcagcaaaatacaaatacacatacaataaaattataatattctcgatgtagatctatagcatttttcgacagaggaaaagaaatgacacttcgtctgctttagtgctgtcgattaatctagccatttttttaaattggatctagtgagaattttaaaatcgtaatgtttggtgtttttaacgggcaacaacaaattaaaaaggacaaaaaaaaaatagagcacagatcaaacaaacttttggaacgctaacaattctatatttcgtcaaaatacaaatatagtacaaaaaactatcgaccaagcctacttgctaattgggaatcgaggcggcaggagcagccagtggcaggacctctagcttatgcgaatcactgtgatcgctgacgaagtgcagcacttcgaagcccacctctaccatgatcaggattatgatcatccactcgagccggatatgatgggcatcgttcagattgtgggacaccagctcggccagttccacgcagtggttgatcttctcgttcatcaccttggtgcgccgtgagatgctgaagtaggagcacacctgcaggtagagtgcctccagttcctcgcggtcccagtagaaatcgggtgcatccagcagatccgacgacaggttgatcacatgacgcagggcaaataattcaccggtttttcgcagcatggccgcccgcgagattcttaatcggcgaccacgctttagatcctcggtgagatgctctatggagtctatgtagcggtccagtgtcgcctcccacatgcccagctttattgactgtgccatcgcattggagaaggtgtacttatacaggaaactatccgtatcggcggtaacaaagaacttgccattctggaagaatgcccgtgacgtgacattgaagtcgctgctctccgccaccagatcgccctccacatccaccgccgtcgatggaatgtaggtgtagggcatcacctcgctctccccgtgaaccagggcactcacatacgattccctttcgaaggcgcgcaggaaacttagcacattgttcgtctcgatgtcgctgcagttccaaaagaccaccgagccctcgcggaagaagaatatctcccgcggctgctgacccgtcggatatttggccgccacaaagagcacattctgctccacgtccagattgtctgtggagaagaaacgcttcgtctcgtacaggttctgttcgcggagggctatctgcagatcctccagattgtactcctcggcggtcgtataaccacgggtgttgagaaaccccaaagcggacagttcatcgatggccaagcgcttctttcgaatgatcctggtgcgaatgggcgatagtatcgactccaagcgctcctcggctagcggcaatggctttacccgcggttgcgtttgagttctaggtacagaagctgcttgagctggcgccgcagccgatgaggtggcttcactggccaaccatcggcggcggtccatcatccactgcgtctgcgtctgctggcgcggaattcgaagtcctccaaggaccatctgcccgaatctcaggcgtgcaaagttcatggcttttgatttatgctccagcagcaattagtggcccatttctgggagttgagatcggtttggtaacgaatcgtatctggtggctatataatatagtagccggcctccgattgccttttgttgtgattatcgaatccgataggcactcagtggtgaactcggttcttcggccgttagttatttctaagctatgaattttcattattgcttggtatttatactacaaatttggtagttgaaattctgttatttgctttttgaaatgctgtaacgagtcttcaactcatactacataaacttctgccaatagagacaaattactgaacctggatacaaaatagccaaaatgtgagaactgaatttaagcggccaaccgcctgcactgctccgataacgatagccatcagctgttttcatcgctccacttaaccattttcttccccatttggggcaaaacaaaacgcagtaactaccccacattcagcacgtgcggcgccagaattcaggacgcactgcagcgggcggcaagagcagaaagcaacgcggatgtgcaacaccgcttagtagcaacataaaatgaacgcattgcgcaacatcttcacatcgcgaactctcaactatttgcgccagaatggacaaaacgcgatcctcaacgccacccagcagcaacaagcggtggacgccgtgccgctaaccaacgatgccgagcagcacctaaaatcgtcgcgtccagcaccgctttccataccgcgctccatactcgatgcgtgccatttcacggccaagcagtttgacctgggaggctccacgtccggaaaccaggcgaatggctctctgtcgccgacgacactgaagcgcttccgacgcatgcaacgccgcatggagctggtgtaccgctgcaagctgtgcaacacccgcaacacgaagaccatcagcgaagaggcctactacagcggcgtggtgatcctacagtgcgacggctgtgccgtcgaccatctgatcaaggacaatctgggactgttcaccggcagcgatggcgatagcagcattagctctggaatcagtaccagcaagaatatcg

SEQ ID NO: 19076 - DNA, 1344 bp, DROSOPHILA
accagatacgattcgttaccaaaccgatctcaactcccagaaatgggccactaattgctgctggagcataaatcaaaagccatgaactttgcacgcctgagattcgggcagatggtccttggaggacttcgaattccgcgccagcagacgcagacgcagtggatgatggaccgccgccgatggttggccagtgaagccacctcatcggctgcggcgccagctcaagcagcttctgtacctagaactcaaacgcaaccgcgggtaaagccattgccgctagccgaggagcgcttggagtcgatactatcgcccattcgcaccaggatcattcgaaagaagcgcttggccatcgatgaactgtccgctttggggtttctcaacacccgtggttatacgaccgccgaggagtacaatctggaggatctgcagatagccctccgcgaacagaacctgtacgagacgaagcgtttcttctccacagacaatctggacgtggagcagaatgtgctctttgtggcggccaaatatccgacgggtcagcagccgcgggagatattcttcttccgcgagggctcggtggtcttttggaactgcagcgacatcgagacgaacaatgtgctaagtttcctgcgcgccttcgaaagggaatcgtatgtgagtgccctggttcacggggagagcgaggtgatgccctacacctacattccatcgacggcggtggatgtggagggcgatctggtggcggagagcagcgacttcaatgtcacgtcacgggcattcttccagaatggcaagttctttgttaccgccgatacggatagtttcctgtataagtacaccttctccaatgcgatggcacagtcaataaagctgggcatgtgggaggcgacactggaccgctacatagactccatagagcatctcaccgaggatctaaagcgtggtcgccgattaagaatctcgcgggcggccatgctgcgaaaaaccggtgaattatttgccctgcgtcatgtgatcaacctgtcgtcggatctgctggatgcacccgatttctactgggaccgcgaggaactggaggcactctacctgcaggtgtgctcctacttcagcatctcacggcgcaccaaggtgatgaacgagaagatcaaccactgcgtggaactggccgagctggtgtcccacaatctgaacgatgcccatcatatccggctcgagtggatgatcataatcctgatcatggtagaggtgggcttcgaagtgctgcacttcgtcagcgatcacagtgattcgcataagctagaggtcctgccactggctgctcctgccgcctcgattcccaattag

SEQ ID NO: 19077 - protein, 420 aa, DROSOPHILA
MNFARLRFGQMVLGGLRIPRQQTQTQWMMDRRRWLASEATSSAAAPAQAASVPRTQTQPRVKPLPLAEERLESILSPIRTRIIRKKRLAIDELSALGFLNTRGYTTAEEYNLEDLQIALREQNLYETKRFFSTDNLDVEQNVLFVAAKYPTGQQPREIFFFREGSVVFWNCSDIETNNVLSFLRAFERESYVSALVHGESEVMPYTYIPSTAVDVEGDLVAESSDFNVTSRAFFQNGKFFVTADTDSFLYKYTFSNAMAQSIKLGMWEATLDRYIDSIEHLTEDLKRGRRLRISRAAMLRKTGELFALRHVINLSSDLLDAPDFYWDREELEALYLQVCSYFSISRRTKVMNEKINHCVELAELVSHNLNDAHHIRLEWMIIILIMVEVGFEVLHFVSDHSDSHKLEVLPLAAPAASIPN

SEQ ID NO: 19078 - DNA, 5003 bp, DROSOPHILA
ttatgttttgtggttgtattttgcattgtgtggcttaaacatacatagttgcttgttagatgtgcttagtaacttagttattgctgttaattaacggcttaagttgctgggttttcggttcggtctatcagtttgatggcaattggctgctgcagttgtggttcttgcgtataaatatatagttagtacatagaatactttatgaaatacttagttctggaatgcatctactcgctcacatcgattatcgcgggacgggaaggaatgtatacaattcttacatcaataatcagattgtaatgctgtgtgtgtctggagagaagaactcgaaattggcactgaaatgttaagcatttgttattaattataagtacctctctacccctctctttctggcccttcctatcgccttctctgtcaaattgaactcactcaaaaatcattgggaagtcaaaggaagtgtaagtgttctaccaatttcttagaactaaagttgcattcatgggcgttgttgttaaatactttttgtgtttaagtacgtctacaggtaagtggattcgaatagagtacaattaaattatgtatagcttcgagaactaataaatataaaaacaaaataatacatgagaccctgttcgcggtttcgattcagacaaaattggacatacaaatatgatatttgtatgatagctgcatgtatgcaaagttattgttactgcttaatttcagttccctggcattggttttcggttttcaactgaatcaaattgcaaaatagatctgaacatcgagtgaatctaaaactaagattaagaaagctaactaagttgcctaagtagctggcaatttaaagatgttacagttgcagttacagtttcaattttagttaaatttaaaactatttgacatagcgaccacgcccacgaccacgtccgcgccccctaccgcgactcttggccttggaccagtccttgtccttgtccctctcccaatccctatctcacagactgctacgacccgaacgaccaacagcgccgacggcaccattgggtcgattgtgtcgacgcttgtgcagatagaggccggccgcttgggcaaatgccgaaccgcatatctggcagacgtagcgcttgatcttgtcgtggatctgtttgtggttctgcagattctttgtcgacttgaacgtcttgccgcaaatgtcgcacttgaactcctcgttgctgtagtgctgcttcaggtgctcgaacaggctgttgcgcgccacaaacgatttattgcactgcggatagtcgcatttatagcaccgctcccgctcatcctggtggacaattcgatgcgcattcaggtggcccggcgtggcgaaactgcggcgacacacatcgcatccatacggcttggcaatgtcagtgccaccaccaccagaaccaccaccaccaccgccgccaattcgatcatcatcgtcgaccatgtcatcggttgctttcgcagcgtgcctccttttgcggcgactgccgctgcctctggactcctcgccctcgactccgatctcgtcatctcccaggccgccctccatgatgctgtgattaagcgccagcgagggcagaaacagctcctcgttatggcgccgcaggtgctcatcatagttggccttctcgcggaaactggccgtgcacaattcgcagttgaacttgatctcggttacgccgcccaaatgcaactgcttgtggttatcgaactcctgggcattgtggaactgtatgctgcagatgttgcaatagtaaccgccacccaaactaggctggtgggtgagcatgtggaggtccagttccctgagtgtttgcactatttccgggcagtgtgcgcacttaaatggcggaatgtcgtcgtccataaagtgcatctgatcgtagtacaaatagttcgcaatgaatttcttgcccagcctctcgctgttaaggcgctccatcttctgtttggagtaatcgaatcgcagctgggaaatgcgctttgatatctggatggtggtcacatcgatcagctgctgcagttcaatggccatctgatggagtccctcgccgcgtcgctccttgctgcggtagtcgggatcgaagcggttgtaaaagcactggtaccgcttcaccatgctcagcagcttggcagtagacgtatcgttccaaatggccgagaagcggcggcgataggaggtttcctgtcggaaggatgagagttattgattgacatttgataagccccacaaaactaacaactttgattaggcatttacgagttgcattctgaggtaggaaggaggagaagaggactattactgcgcatatgcaggagaaattcagtttaaaaattaattagtggtgtagaaaagtcaacctttatattttcaagacattaattacgatattaaagtaaacggaggacttggtagtcagccacccaatcacgtcgctggataaataaataaagtctctactcaagtcgcccacctgtttacgttaattaatccgctaacaaggttccgtttcaatccacccccaattcagagaagcggacgcataggatcgaattgaaaggggagccactaaccttaacaacagcatcggacatcttatcgttgtagctgtatacctcgttgaggaagtgcagctccttgaagtaccacagcgtactgatgttggtcttctccagagccatgcgattgcactcccgcttgtataccgtgcgcaggttgtcccacttacgggtgatggcgtccttggccagcgagatgttaaaccggctcttgaactccagcacaatccagtcgaggaagcgggcgcgcttaacgcgatcccggaactgtgcattgccgtggtcccacaaaaaggggttgcgctgatacgagtggatgagaaactggatcatcttgcggtccttgatgtgcatcgtaacctcccggtcgcgctaaggggtgggaaaatgataaaatcattacaaataggtatatatggatattagtgaaaattaagggtgaaataaatgtagcttttaaatcgatgggcgaaaattttaacaaaaatatctgtatgtatatagtataaaaatataacttactcccagcagggactcctccaccatctcatcatagctgagaaagtccgattcggttccgaaaccactgtggttaacgccgtcgaatccagcaaagtccatgtactctccggaattgtcgtccatatagctgtgatccggatcaccgtagtcgtccatggatgaatcgccgtcaccggcgatgagaagctcgctagacatgtccctctggcgctgctttgtgacctttttgcgtgcccgcgtcttggaactgaccaccggtacatcgctttcgggtaatatggcctcgtcctcatcggcctcggaatcgttcagccgttgctcatcgtcgtcttcttcgccggcgaccacatcatcatcgctgcagggcagatcctggagctcttgtttgatgaccatttggggctccagcagcgctgtgtccgcgtccgttaagtcttcgatctcgtggaagttgggcagatccccattacgaccggacagggacatgggctcgccgagattgaaggggagacgggaggaggtattcgccacggactggtcgcccaggtgaactgtctgcatgtggccgatgaaggagtcgaagtagagaaacttctcgctgcagaagatgcaacgcagggcgaagtactggaagtcatctgtggccgtcaccatgccgcagtccttggtgcagtgacggaaaatctcctcgtcgttggtacgtggatacgccaggacactcatcgcgccgcctgcggatcctcgtcctgtccggttaacaatcagaattcaattaagtctcttggtactctacgctgcggtcggcgcactctagtattgtgccttattttgacttgattttatcccgatttggccaataaaaaaaaactttttagtgttggggtttgggcgcacggttgcatttcatttgctaatcgccatcggtggtcgcaggtgagccgattaaattgtgcggcttattttgcagtgatttagcgggaaatagccattactagcgggaaatatattaccacccttaagaccttctttaatactcataatcatataatctttgtaaataacttagatattaagaatcgcttaaattgataccgattaaattaagttgcccaagaagggtaatggtacgctagtcaataaaataatttcgtttaataaatttaaataaaaaaaaagatatatatatgaaacattttttaaatgtcattttgcatgtaagccaccacaacgaaaaatctaattagaaataaataaaagtgttacaaattggaagtgattacaatactatcgattgtactgctttgaagtctctagttgtctttcccccatctggtcacacttgccatctgatttcttcgattcgcctaactttaagcgtgcttggatttgtgccgattcctattgatttattttgccgagctaagaaaatctctgtttaattgcgacacgcgatggcttcgattagcttgctgaaccccaaggccgagtttgcccgcgccgcccaggctctggccatcaatatcagtgccgccaagggactgcaggatgtgatgcgcaccaatttgggacccaagggcaccgttaagatgtaagttactaaaaccggcctctaatatccctcactttgcgttccattagcaatttgagtgagaatgctagtttataggcgaaaaaacaaacgttttggtcacagctgcggcaactgcaagtttgaggttagactggaactagcggcatgcgtcatcgcaaaagaaagaaagagaatgttgcaactctggagcaaaaagcttagaatttaggtgtttttatttaatttcaaaaagaatcttaaatgaaagatgcccccagaggctttaatttattcataaatgtgtgtttacctgcatatccagcaccgg

SEQ ID NO: 19079 - DNA, 2464 bp, DROSOPHILA
aaccgtgcgcccaaaccccaacactaaaaagtttttttttattggccaaatcgggataaaatcaagtcaaaataaggcacaatactagagtgcgccgaccgcagcgtagagtaccaagagacttaattgaattctgattgttaaccggacaggacgaggatccgcaggcggcgcgatgagtgtcctggcgtatccacgtaccaacgacgaggagattttccgtcactgcaccaaggactgcggcatggtgacggccacagatgacttccagtacttcgccctgcgttgcatcttctgcagcgagaagtttctctacttcgactccttcatcggccacatgcagacagttcacctgggcgaccagtccgtggcgaatacctcctcccgtctccccttcaatctcggcgagcccatgtccctgtccggtcgtaatggggatctgcccaacttccacgagatcgaagacttaacggacgcggacacagcgctgctggagccccaaatggtcatcaaacaagagctccaggatctgccctgcagcgatgatgatgtggtcgccggcgaagaagacgacgatgagcaacggctgaacgattccgaggccgatgaggacgaggccatattacccgaaagcgatgtaccggtggtcagttccaagacgcgggcacgcaaaaaggtcacaaagcagcgccagagggacatgtctagcgagcttctcatcgccggtgacggcgattcatccatggacgactacggtgatccggatcacagctatatggacgacaattccggagagtacatggactttgctggattcgacggcgttaaccacagtggtttcggaaccgaatcggactttctcagctatgatgagatggtggaggagtccctgctgggacgcgaccgggaggttacgatgcacatcaaggaccgcaagatgatccagtttctcatccactcgtatcagcgcaacccctttttgtgggaccacggcaatgcacagttccgggatcgcgttaagcgcgcccgcttcctcgactggattgtgctggagttcaagagccggtttaacatctcgctggccaaggacgccatcacccgtaagtgggacaacctgcgcacggtatacaagcgggagtgcaatcgcatggctctggagaagaccaacatcagtacgctgtggtacttcaaggagctgcacttcctcaacgaggtatacagctacaacgataagatgtccgatgctgttgttaaggaaacctcctatcgccgccgcttctcggccatttggaacgatacgtctactgccaagctgctgagcatggtgaagcggtaccagtgcttttacaaccgcttcgatcccgactaccgcagcaaggagcgacgcggcgagggactccatcagatggccattgaactgcagcagctgatcgatgtgaccaccatccagatatcaaagcgcatttcccagctgcgattcgattactccaaacagaagatggagcgccttaacagcgagaggctgggcaagaaattcattgcgaactatttgtactacgatcagatgcactttatggacgacgacattccgccatttaagtgcgcacactgcccggaaatagtgcaaacactcagggaactggacctccacatgctcacccaccagcctagtttgggtggcggttactattgcaacatctgcagcatacagttccacaatgcccaggagttcgataaccacaagcagttgcatttgggcggcgtaaccgagatcaagttcaactgcgaattgtgcacggccagtttccgcgagaaggccaactatgatgagcacctgcggcgccataacgaggagctgtttctgccctcgctggcgcttaatcacagcatcatggagggcggcctgggagatgacgagatcggagtcgagggcgaggagtccagaggcagcggcagtcgccgcaaaaggaggcacgctgcgaaagcaaccgatgacatggtcgacgatgatgatcgaattggcggcggtggtggtggtggttctggtggtggtggcactgacattgccaagccgtatggatgcgatgtgtgtcgccgcagtttcgccacgccgggccacctgaatgcgcatcgaattgtccaccaggatgagcgggagcggtgctataaatgcgactatccgcagtgcaataaatcgtttgtggcgcgcaacagcctgttcgagcacctgaagcagcactacagcaacgaggagttcaagtgcgacatttgcggcaagacgttcaagtcgacaaagaatctgcagaaccacaaacagatccacgacaagatcaagcgctacgtctgccagatatgcggttcggcatttgcccaagcggccggcctctatctgcacaagcgtcgacacaatcgacccaatggtgccgtcggcgctgttggtcgttcgggtcgtagcagtctgtga

SEQ ID NO: 19080 - protein, 762 aa, DROSOPHILA
MSVLAYPRTNDEEIFRHCTKDCGMVTATDDFQYFALRCIFCSEKFLYFDSFIGHMQTVHLGDQSVANTSSRLPFNLGEPMSLSGRNGDLPNFHEIEDLTDADTALLEPQMVIKQELQDLPCSDDDVVAGEEDDDEQRLNDSEADEDEAILPESDVPVVSSKTRARKKVTKQRQRDMSSELLIAGDGDSSMDDYGDPDHSYMDDNSGEYMDFAGFDGVNHSGFGTESDFLSYDEMVEESLLGRDREVTMHIKDRKMIQFLIHSYQRNPFLWDHGNAQFRDRVKRARFLDWIVLEFKSRFNISLAKDAITRKWDNLRTVYKRECNRMALEKTNISTLWYFKELHFLNEVYSYNDKMSDAVVKETSYRRRFSAIWNDTSTAKLLSMVKRYQCFYNRFDPDYRSKERRGEGLHQMAIELQQLIDVTTIQISKRISQLRFDYSKQKMERLNSERLGKKFIANYLYYDQMHFMDDDIPPFKCAHCPEIVQTLRELDLHMLTHQPSLGGGYYCNICSIQFHNAQEFDNHKQLHLGGVTEIKFNCELCTASFREKANYDEHLRRHNEELFLPSLALNHSIMEGGLGDDEIGVEGEESRGSGSRRKRRHAAKATDDMVDDDDRIGGGGGGGSGGGGTDIAKPYGCDVCRRSFATPGHLNAHRIVHQDERERCYKCDYPQCNKSFVARNSLFEHLKQHYSNEEFKCDICGKTFKSTKNLQNHKQIHDKIKRYVCQICGSAFAQAAGLYLHKRRHNRPNGAVGAVGRSGRSSL

SEQ ID NO: 19081 - DNA, 9190 bp, DROSOPHILA
cgggcaaaagcatcgacaccattgtggtcatgtcgcaggaaccgtatcccatgtcagcagcccagttcaagctgcttattggactctatttccacggcaacgagtgccacacgaattttgccaagctctcggccaagatcatggtctcccagagattcgcctagacgaaggacagaagtttggagccactacagtgccttggtaaccagttcctgagtttaatcatagctggcagtattgtagttattcgccgtatgctcttgcttttcaaacaatacttacttagaacgtttaccttatgcattattaaaacatgcattttgtcaggttagacgaatattttcaaagctggaacgaattttccaatctcgaacgaatttcgagttattaagactgcatttccattttattgacttaaagctattcatattgccttcccaaaagatatccaaatggggaacggtcgaatatttaagaaaatgaatttataaaaggcaaggcacgctatattatatccgcatataatactaagacagtgcgtacatttggcaagaacttaagaaatactgtacgttgaaaatatctccctacatggcatccatgcaaaatgttatacgaaagcgaagcaatcgaatgctcgatcaaatataagactttattatagtatactatttagtctaaaagggattaaaactaccaaaaaaaaattgctgataattaattataatatacatacatataacaataatatttattatgctaaacggaaatctcaacttaagggaatttatatgaaataaaaaaaaaatttcgaatgcataagatacgtaaatgcagctaaaagtattggagaatgtattccggaaatacggctagtgatctccggaacgcaagccaccaaagcccgtttaaaaggaactaaaactcattcacatgtagccccaccccaaatccctgctgccttcgtcttcgattggaatccgatctccgcatcccagcctcatatgtagtccagcatgccgcttatgatctcaaaggcatcccgagccgtgggctcaatggcgctgctgggcagcagataaccgtgcactccgttgtccgccagctggagcgtgtagctgaagggaattccgatctcgtaggcggcaaaagcgtccgcacagcctggataaatcaaggaagccaaaggattggcaaggtcggataaagatctctattatattctacttcgaagcaaataatataaatattacgcacccgatcgctgttcaattagatcgttggatgcgtcgaccttatatcgggacttactaccctttttgcgcaatccatcggtacccaccatcgccacgtccagaaaatcatccaatctttctgaattgaaagtggaattggccttgaccggataggatatcacctgaccataggcctgtagggaaatgtaaagctgcaaaaataatgaataaagttaataaatcaaaaaatatatctattttagagagttaatataaaaattatatattgttctaagcatacctttatctgcgtcctatagtccataaggaactcagatactgccttggtttccggttcagaaaatggcgctggaccggcgtagaactcattgcagggtgccttggagctaccccgtttgccccaatgatacagccagtttctgtccaggtccaccccgtagcagaccttatccggaccccgtttttgctggagccatgtcatcgccgagtcgaggaggccactgggaggtggagtctggtgctgagatcgcgacttcttccagaaacgatcgtactcgtggctgtacgcatatccgtccggattcaggaccggcattatgtaccatgtggtgttccggatgaactccacgtcctcgttgctttctgttgagtaaacgttttatgggttatttttatacataactttacataatgcatatgaaataaatgttaataaatattaattctcttaagaaaataaatacgttgttcaaccgatcaacgtagccgcttttccccaactcaaattacattagttatccctttgtcagtccgttagtcagtatatttgtagacccagaaatcgatagtgtatactttagacctttacagcttgccacttctcctccagttggaccaagatcagaatggagaggcgaagaccccgaaagtcctcgcgtaaatacgtgtgctccaaatcaaactcttcagttggaggaggagtagaggaagacagtggctcatcattgcctgccaccgccaaagcgttactcctccagccggacggtaataaagcaccaaccatgacatcccttctgggcgaacgactcagaagagtttctcgcatcgcaagagctccgcacagcctacaagttaccgaaaatccagaagaaggtggagcaccaatcgtaccactaagagaatccggcgcatcggaagtgtcagaagtaaatccgggggttatggtcattccggagtcggccagtccccggggatcggcggtgcatggacaacacgctagcttggtcttcagtgctgaagccagggattcggacagtacgcggatatcggaggaaatggtggaagtgttccaaacctcttcggcgagaaccacatccaatgagcccgcagggggcaatctgcgctttgaaaccactcccgtggctgtaagcgaaagtatggttggcaatataaacttctccccgaacgccatctacgatcagaacaggtatagcagcatgatgtccaacggggattacaataatggcaacaggggtgagagtgagaggagcgtgggagcctgccaccatggttgggcggcgcgacaacaacaagttgccgctggacctgccggcagagacaccctgggattcgccatcagtctgggcgccgctaatttgggccagaaccgatgcagtctgggcgttgcatgcgatgaggactgtggctatggaactggctgtgattttggatgcggtcaggcccatggcgttgatcccggaagctttctaggtccgggaaccatgggaactggtccattaatattgacaacgggatcaggaggcccacctgtacagagcgccctacgaggagctcaaggtggcggctataagcaagttggcgccgggcagcggggaacttttggaacagatttcggaagtgagcagcttaacttcttcattaccttcctattggaggtcctcggtgttttagtgtgagtatatatttatatattccaggattggatcattccaactctatgataatctacgtaatcttccattagtttttttgccatctgcacgataacattttggattactctgggctaccatgttgtccagttgctggtggacctgaagaacgccgatcgcaacattcaggtggcggtggccattgtgttcgggctgctgctcgttgcgtttgccatatcgcaggtgaccaacctcagtggttcctgctgtcattcacgggatcgagcccgttccagaaccaaaggtggtggcattggcttctttcacagatccaccaagccaaagaccaagagctgtgcatccaaaaccaagacctgtgctcataagccgaagattaagaaggcagccacttgtggacccagcctgggctttcacacgcaccgcaaaacgaggtatacggattgcgagggacgggcaattttcttgagctcgagacgatatgctattccgactgagatgaaacaaccacccaccattgtgctctggatgcgcgacacactggttcgcatgttgcagtaaccaccaacgaagccccacgttgggcgccaataatacttaaactgacttaagactgcgaaactatacgtattgcctggaaacacgaaccattcgatcatttgcaaaaatttcaatttgaataaactttaagagaaaacttttgtaggtattactaaattgttacttatgatctgggccagtattattaatatcgtgaaatagatgtttaagaatacgaacatactagttcggtaatagtatatgtgtatatactcactgtttgttttcattagtcgcagcagttcggcaatcatccaggtggccgccgcgggtccaatccaggccaatccctgagcaccagcttcgacgaaaacggcatttgcctggcccgacttccgcttccgcttgggtcgcttgatggtgtgtagaccatcgttgttcgccgccgccgccgtctgtttggattcgatctttaccacaattaagggtcgaccttcgaaggaacgaccaatgtggatgagctcaacgagctgcggatgacgcattcgcaccgtctccagatacttgacgatctcatcgtgattatggtaacgattccatgtcatgggcggtggtgccgtgggacgcggcttcgagggacgagtggtttgtaggtaatcctctttggtcagttcgtatgcgatggccttgcccacatcgaaaatgagcacttcgtgcgctatgccctcgtagtttagagtgccctgaaagtccacgagcatcttgggtggcacaagaacatccgtaagacctctgaaacgatgaggtgagtgagaagatttggtttaaaatgtattgtaataatccccaaattgattgtcatcatacatttttgagctttaagtctagcttacctgagacttggacccttgagccattgcaacttaacgccgtcctcgccctttttgaactcctccagtgcacggacctgctcttcatcctgcggctttagacgccaaatctgatacttgtcatagcttatgcgcctgggaacgtccggccgcgatgtggtggttgtggtgctagtggttcccctggtggtcattcgagtggccaaggcctggaggagcggattacttgtgctcgtagagatggcactgccagtggaattgacaatatgatgggccaaaatgccaatccagttttgtggattcctcagtggatccacaatggtcaggatgggcacctgggccgccgccgccgatggtgtgtgcgtcgttgttgtcgtcgaggtggtcgatgtggaggtagtggaacgacgtctaaacttacgttttggccgcgaatcgaaccagctggaaaaccattctgttcgtggagaaaataagtcatatattgtgcttgggctgtttgtctttggttatatttcctagcggtgcagaaagcgtgaaggaaaacgagaacccatttgggagacccacaccgttagccattcaattaggttctgggttttcccttttatcttcctgctcattcagccaatctcgccattaaatgaaccactcgaataacaagaacatagcatggctcgcttttaattgcacggtaattagattgaaaacaacaatgttagaaaatccaaacatataaattaatgaattgtctaatcatcgttactataattcctaaaataaatatcaaatcaaccatgaagttgttttaactgcctttatatatgcatgactattattttgggcatagtttaatactacctaacatccttgcaatctgtaagcattggccttaaacattgaacattcttttttgtagtactcactgtcgtagtcatcttccgcatccgcctccgtggtcgaaccgaatccgaaccaggactccagccaactgggtggcgccttggtgggcgggggcaatggcactggcatggtagtggtagtgctgccgatcttcttagtgcgtcgctgcaggccaaaccaggaaccaaaccagctgcccagcgaggaggagtcttcgtcatcctccgaatcctcatcatccggctcggcatacgcttcattgctgtgggcgctgtgatagagggtatagctgggatactttgaaacgggttgtgtggctggctccttgtcctcctcctcatcgggtgtgccaaagccatccataagccgcgacatggccacttggacagggtagaagatcatgcgaaagaagccagcaattccggagtcctcatcgtcgtcgtaatcctcatcggagtccaccggtcgcctcttgatgcgaatcttctttttggccatggagtttttggtgcttgaggtggcatccagctcctcgctgctcgatatagtcgctgtggtcgtggtttcctcctccaccatagctccaaaatcagctccctcctccgcggagctgctatcttccttgagatcactctgtcccacctcggtgctgctgctttcattgggcttatttttatcctcatccttgtgctcgtcctcgaaatagtagtcttcatcgtcgtcctgctcctcctcctcctcctccccctcatcctcgtagtcgccatcggacatgagttcgaatatatcaaaacttggcagctggggtcttccgcgtttgcgttctttaacttttcttttctttttttgattggcatttagtggaaccttgggtacttcatcctgactgtgatttctgtgaagcagatgcagggcggtgggtatgtgaagtacgccacccgaattcttctctttcttctgcgtggatggtggtgtttgctgcttggtctttcgcctcccggaacttccctttggtgagcgccttttgggagtactcacccgacgagctgctacaacatttgggtttcctctggataatatggttttggactccttagatacgactttttgtgatcgttttgtagaatctgctgtgacctctttttccgcttcttctgatggaactttggtcgccttttctgtttttatagatttctctatttcaccatttttaatgctatacaaagagcgacgacttctgcggtgttgtgttctagaagaatccatttctccctgattcttcaggagcctagctcttttaaccgcatttttaagtacactcttcttaatcagagcttttaaagatgaatttcttttttttgcgtgaagtggtccccttcttttctctcttcgtacatcttccaccgaacgccgtattctaagatttagttgctcatccgattgaagtggttcctgttcttctagtgtttcactttcttccgccggctctaagtcgcttctcaacaaatgctgactaaagacattggatgtgggcagtgtggcctggggcatatgtggtttctccagttgcgtataagccggcggtggtcgcgatgtggtggttgtggtggtggtgctcggtcttttgcccaggataatgggcaaggagccttgcggacctctggtgttatttgccccatagcccggcctctttttgatcactttagtcttattctttggtatcttcttgcgcttcttcctacgtgtatttggccttgaagttgtgctggtggtggtggttgtgcttctggtggtgctacccgttcggtggggcagcttgagcagctgatcggatacatgatcgatgggtccgctggttaccatcacaggtggtggtcgataatttggtttgggtaatttgttactgggcttggttattggattcttgggcttcttcagtcggatgatctgaggcctggcggtggtgccaccatgatgcactggattcagcgtggatataaccgttcccggtggaattggcaggcattgctgctcatattgcctccgcagactctccatatcggcatcgtactgtgcctttgttacatagatcgctattgcattgctatcattcctactttgggtgggtattccattcggattatgacccacacccacttggctaatggcgtagacaatcccggtggttggatgtgtgaagtatatgggaaatgtggtgccattaccggctgattgtggctttgtttggggcttgcgcgatggattgggttccttaatctctagcagttcgctctgcacatggaattgatcgaaaattgtggatcccggttggctttcctccacagactcaaagacatacggctgcgagggtgcctgatcctgatcctcatcgaaaagctgaaaatccagttcaggcggctcgaaacgaatggatgtctgatgctggtagcgcggcacaaaacggcgatcttggacgcgacgctgaaggagatcgcgaccccagctttggcgcaccaggctgtcggactcttcggcactcggatgatagccaaagtcgatggcacccgttcgatggacgacatccacgaccatgaccacgatcaagagcacaacgggcagcccagttaccatgtctaatgctcgccaaactgacgattatccacgacgacgatattactatggctgtttggctgcgcggctggttggcaaatgaaacgagccccaagttgcgggcccaactcagccggtcggtgaaagccccgtcttcgggcccctgcgccatcacagtttcggccacttggcttttggcccgtaacgctcctcctcctcctcctcctcctcccagtcaacctcctcttctccactcgtcttctcttcttctgcctctctgtggcttcgagctcgcgtaaccccaactcctcgaacgttctggccgccacttagctggtataaccccccccccccctttcacaaagccaaacaaccaaccaactatcttcttaactggccttgcgacagttatcgagccatgccaaattgccgatctaatcggcaatgtgatacacaagggttaagctgtagataaataatggaatcgaaagtacaggagcatggataacctaagtcttatcctatttcctttttgcatactatgttttatactattaataaatcgatttttttttacaattttttttttttttatataaaattatgttctgtggatgggagtaagaaaataaaattgtcattgaaattaacaactacctaaattataaataaaatattcaattagcctttttcgcttcaactgtaatattaagtggactttttgcttagtgctcccctgtgcgatcttgggaggcccccatgcgatttggctttatggaggcacgcatcccagcagatgggatgagccagcatgcgatggcgatctcggccaggtcatttgcttgtggtatgtagtacgtagcatatagtggcttgaatgtggtgcttggaatggcgacccacttaggcgacaccgctgtttgcctttctggaggataaggcgccggaggtgggccaacaggtcgaacttgtccagcggtgggcggtcgtgggggaggcagtggggcacaggctccaagag

SEQ ID NO: 19082 - DNA, 4293 bp, DROSOPHILA
atggtaactgggctgcccgttgtgctcttgatcgtggtcatggtcgtggatgtcgtccatcgaacgggtgccatcgactttggctatcatccgagtgccgaagagtccgacagcctggtgcgccaaagctggggtcgcgatctccttcagcgtcgcgtccaagatcgccgttttgtgccgcgctaccagcatcagacatccattcgtttcgagccgcctgaactggattttcagcttttcgatgaggatcaggatcaggcaccctcgcagccgtatgtctttgagtctgtggaggaaagccaaccgggatccacaattttcgatcaattccatgtgcagagcgaactgctagagattaaggaacccaatccatcgcgcaagccccaaacaaagccacaatcagccggtaatggcaccacatttcccatatacttcacacatccaaccaccgggattgtctacgccattagccaagtgggtgtgggtcataatccgaatggaatacccacccaaagtaggaatgatagcaatgcaatagcgatctatgtaacaaaggcacagtacgatgccgatatggagagtctgcggaggcaatatgagcagcaatgcctgccaattccaccgggaacggttatatccacgctgaatccagtgcatcatggtggcaccaccgccaggcctcagatcatccgactgaagaagcccaagaatccaataaccaagcccagtaacaaattacccaaaccaaattatcgaccaccacctgtgatggtaaccagcggacccatcgatcatgtatccgatcagctgctcaagctgccccaccgaacgggtagcaccaccagaagcacaaccaccaccaccagcacaacttcaaggccaaatacacgtaggaagaagcgcaagaagataccaaagaataagactaaagtgatcaaaaagaggccgggctatggggcaaataacaccagaggtccgcaaggctccttgcccattatcctgggcaaaagaccgagcaccaccaccacaaccaccacatcgcgaccaccgccggcttatacgcaactggagaaaccacatatgccccaggccacactgcccacatccaatgtctttagtcagcatttgttgagaagcgacttagagccggcggaagaaagtgaaacactagaagaacaggaaccacttcaatcggatgagcaactaaatcttagaatacggcgttcggtggaagatgtacgaagagagaaaagaaggggaccacttcacgcaaaaaaaagaaattcatctttaaaagctctgattaagaagagtgtacttaaaaatgcggttaaaagagctaggctcctgaagaatcagggagaaatggattcttctagaacacaacaccgcagaagtcgtcgctctttgtatagcattaaaaatggtgaaatagagaaatctataaaaacagaaaaggcgaccaaagttccatcagaagaagcggaaaaagaggtcacagcagattctacaaaacgatcacaaaaagtcgtatctaaggagtccaaaaccatattatccagaggaaacccaaatgttgtagcagctcgtcgggtgagtactcccaaaaggcgctcaccaaagggaagttccgggaggcgaaagaccaagcagcaaacaccaccatccacgcagaagaaagagaagaattcgggtggcgtacttcacatacccaccgccctgcatctgcttcacagaaatcacagtcaggatgaagtacccaaggttccactaaatgccaatcaaaaaaagaaaagaaaagttaaagaacgcaaacgcggaagaccccagctgccaagttttgatatattcgaactcatgtccgatggcgactacgaggatgagggggaggaggaggaggaggagcaggacgacgatgaagactactatttcgaggacgagcacaaggatgaggataaaaataagcccaatgaaagcagcagcaccgaggtgggacagagtgatctcaaggaagatagcagctccgcggaggagggagctgattttggagctatggtggaggaggaaaccacgaccacagcgactatatcgagcagcgaggagctggatgccacctcaagcaccaaaaactccatggccaaaaagaagattcgcatcaagaggcgaccggtggactccgatgaggattacgacgacgatgaggactccggaattgctggcttctttcgcatgatcttctaccctgtccaagtggccatgtcgcggcttatggatggctttggcacacccgatgaggaggaggacaaggagccagccacacaacccgtttcaaagtatcccagctataccctctatcacagcgcccacagcaatgaagcgtatgccgagccggatgatgaggattcggaggatgacgaagactcctcctcgctgggcagctggtttggttcctggtttggcctgcagcgacgcactaagaagatcggcagcactaccactaccatgccagtgccattgcccccgcccaccaaggcgccacccagttggctggagtcctggttcggattcggttcgaccacggaggcggatgcggaagatgactacgacaaatggttttccagctggttcgattcgcggccaaaacgtaagtttagacgtcgttccactacctccacatcgaccacctcgacgacaacaacgacgcacacaccatcggcggcggcggcccaggtgcccatcctgaccattgtggatccactgaggaatccacaaaactggattggcattttggcccatcatattgtcaattccactggcagtgccatctctacgagcacaagtaatccgctcctccaggccttggccactcgaatgaccaccaggggaaccactagcaccacaaccaccacatcgcggccggacgttcccaggcgcataagctatgacaagtatcagatttggcgtctaaagccgcaggatgaagagcaggtccgtgcactggaggagttcaaaaagggcgaggacggcgttaagttgcaatggctcaagggtccaagtctcagaggtcttacggatgttcttgtgccacccaagatgctcgtggactttcagggcactctaaactacgagggcatagcgcacgaagtgctcattttcgatgtgggcaaggccatcgcatacgaactgaccaaagaggattacctacaaaccactcgtccctcgaagccgcgtcccacggcaccaccgcccatgacatggaatcgttaccataatcacgatgagatcgtcaagtatctggagacggtgcgaatgcgtcatccgcagctcgttgagctcatccacattggtcgttccttcgaaggtcgacccttaattgtggtaaagatcgaatccaaacagacggcggcggcggcgaacaacgatggtctacacaccatcaagcgacccaagcggaagcggaagtcgggccaggcaaatgccgttttcgtcgaagctggtgctcagggattggcctggattggacccgcggcggccacctggatgattgccgaactgctgcgactaatgaaaacaaacaaaagcaacgaggacgtggagttcatccggaacaccacatggtacataatgccggtcctgaatccggacggatatgcgtacagccacgagtacgatcgtttctggaagaagtcgcgatctcagcaccagactccacctcccagtggcctcctcgactcggcgatgacatggctccagcaaaaacggggtccggataaggtctgctacggggtggacctggacagaaactggctgtatcattggggcaaacggggtagctccaaggcaccctgcaatgagttctacgccggtccagcgccattttctgaaccggaaaccaaggcagtatctgagttccttatggactataggacgcagataaagctttacatttccctacaggcctatggtcaggtgatatcctatccggtcaaggccaattccactttcaattcagaaagattggatgattttctggacgtggcgatggtgggtaccgatggattgcgcaaaaagggtagtaagtcccgatataaggtcgacgcatccaacgatctaattgaacagcgatcgggctgtgcggacgcttttgccgcctacgagatcggaattcccttcagctacacgctccagctggcggacaacggagtgcacggttatctgctgcccagcagcgccattgagcccacggctcgggatgcctttgagatcataagcggcatgctggactacatatga

SEQ ID NO: 19083 - protein, 1430 aa, DROSOPHILA
MVTGLPVVLLIVVMVVDVVHRTGAIDFGYHPSAEESDSLVRQSWGRDLLQRRVQDRRFVPRYQHQTSIRFEPPELDFQLFDEDQDQAPSQPYVFESVEESQPGSTIFDQFHVQSELLEIKEPNPSRKPQTKPQSAGNGTTFPIYFTHPTTGIVYAISQVGVGHNPNGIPTQSRNDSNAIAIYVTKAQYDADMESLRRQYEQQCLPIPPGTVISTLNPVHHGGTTARPQIIRLKKPKNPITKPSNKLPKPNYRPPPVMVTSGPIDHVSDQLLKLPHRTGSTTRSTTTTTSTTSRPNTRRKKRKKIPKNKTKVIKKRPGYGANNTRGPQGSLPIILGKRPSTTTTTTTSRPPPAYTQLEKPHMPQATLPTSNVFSQHLLRSDLEPAEESETLEEQEPLQSDEQLNLRIRRSVEDVRREKRRGPLHAKKRNSSLKALIKKSVLKNAVKRARLLKNQGEMDSSRTQHRRSRRSLYSIKNGEIEKSIKTEKATKVPSEEAEKEVTADSTKRSQKVVSKESKTILSRGNPNVVAARRVSTPKRRSPKGSSGRRKTKQQTPPSTQKKEKNSGGVLHIPTALHLLHRNHSQDEVPKVPLNANQKKKRKVKERKRGRPQLPSFDIFELMSDGDYEDEGEEEEEEQDDDEDYYFEDEHKDEDKNKPNESSSTEVGQSDLKEDSSSAEEGADFGAMVEEETTTTATISSSEELDATSSTKNSMAKKKIRIKRRPVDSDEDYDDDEDSGIAGFFRMIFYPVQVAMSRLMDGFGTPDEEEDKEPATQPVSKYPSYTLYHSAHSNEAYAEPDDEDSEDDEDSSSLGSWFGSWFGLQRRTKKIGSTTTTMPVPLPPPTKAPPSWLESWFGFGSTTEADAEDDYDKWFSSWFDSRPKRKFRRRSTTSTSTTSTTTTTHTPSAAAAQVPILTIVDPLRNPQNWIGILAHHIVNSTGSAISTSTSNPLLQALATRMTTRGTTSTTTTTSRPDVPRRISYDKYQIWRLKPQDEEQVRALEEFKKGEDGVKLQWLKGPSLRGLTDVLVPPKMLVDFQGTLNYEGIAHEVLIFDVGKAIAYELTKEDYLQTTRPSKPRPTAPPPMTWNRYHNHDEIVKYLETVRMRHPQLVELIHIGRSFEGRPLIVVKIESKQTAAAANNDGLHTIKRPKRKRKSGQANAVFVEAGAQGLAWIGPAAATWMIAELLRLMKTNKSNEDVEFIRNTTWYIMPVLNPDGYAYSHEYDRFWKKSRSQHQTPPPSGLLDSAMTWLQQKRGPDKVCYGVDLDRNWLYHWGKRGSSKAPCNEFYAGPAPFSEPETKAVSEFLMDYRTQIKLYISLQAYGQVISYPVKANSTFNSERLDDFLDVAMVGTDGLRKKGSKSRYKVDASNDLIEQRSGCADAFAAYEIGIPFSYTLQLADNGVHGYLLPSSAIEPTARDAFEIISGMLDYI

SEQ ID NO: 19084 - DNA, 4620 bp, DROSOPHILA
agtaaaggatttaaatacacttttaaacgttaagctcgtcgagttcattttatgaatttattgagtggtatgttttggttgacttacaacttttttctcattctaaaaaatatgaggattacaaatcagttgatctcagtcgttttattagtccgcgaacattttacatattttaaatattacatattatatatgtatgtatgtatgcttaacaggcctccaatgatttagtagtaaatatgactcaatcacttttgtgtgtcattccaaacgtttcctgtaactaatgataatggttaatacaaaaataattttttaaaaagaaataatttcccttatatagtgatgaacaaactattttaatgtaaataaacaaaaaattgctgtggttgtccaaacttaaaactccaaacacaaaacgaaaggtattgaaaaacaaaggggttgtcataccaatacttcacggatttgatcagtttataaaactgcaagtttccggtttttttgcattgtattgttattatgaaaagttatacagttttagagcattacaaaaactctgcctttacaacagctattgaaagctcctccgtgtggaggaagtgtttggccaaaatatatgtttgatatcacgatttattaaagcgtgcgttttatctattggattgattaaccacacagaaactctgtatgggaatagatacatatatgacaagtactgaaaaaggaaacgctgatacgactggttggtatcagcgttttcttttccagtactcgtaaagtattcgtataaatcttcttaactattacagttagacgtaatatatatctcgtacttgtaaagtaccctcttttgatgaaacctagatagtcaactttaagtaagcacaattgacatttgcttacatttatagtgagtcctgcattccgtacctaaatggtccagttattcttttaagcttgaggacattaccaacaaataattattataattattattataaatttatttcatgttattacattttttaattcaagtaatttaacaattttacaagcgattttgaaaggataagtgattttgtgtggattcaaactattcaaaatcacattcaacaatggcttcttcggcttcaaaatttcgcctagaggtagaacgtcgatagtactttatgccaatgattgtggcggccacaccaatgatcattccagcgcaggagcctacgataatcatccacttgttagacgatccagttcggtcaggaatccgtacctcagcctctgatcttgccccctgctctggcaaaatatgacaaacgtatcgcgaattctccccgctgtaatccatgtcactatcctcttggcacaccagttgaccactcgataaatcgcattggcaattgtccaaattgaggcacggcttgtcctggggatcaacacagatcttggcacacttggctgtattgaaagtacccatcccatcgtattcaatccagcacatgcaaccggcagtgcaatttgagtgcggaacctcgctggttgatgtctgcagttgagggtctacagttgatgattgcaactccacagttgtggtgctgtattcataggagtccgtcgtggtttgtaactcgcatagtccgttaatattctcatagcccacgttgcactcgcacacattcggtgccacacagtctccgaattggcagcctttgcagatcggctgacacatagaagtgacaggatttgtgctattgagctgatagccatcgtggcatatacaaaaattgggtgccacacagtgtccgttgctgcagccactgtcgcaaataggatcgcattcgtgatgggagttgtccttgaagcgataacccggatcgcaggtacaggtttctggactggtgcacttgccatgaacacagtttaggctgcattttggctcacagacttgattgggacccatttgatagccaatactgcaaacacaagtctccggtgcaaagcaaaagccgttggtacatcccttgctgcacttgggtacgcacttcttgtccgcccccgacgactcatagcccggaaagcactcgcattggttgggcgccacgcagtgtgcgttatccgagcacttttcgcaatgcggctggcagagatcatttctcattacgtagcccggcttgcagacacaaacgccgggactcaagcataatccgttctccgggcaagtggagcacacgggtcggcaattggtgcctccgtcgtcaccggcatatccattttcacactcgcacacacctggcctcacacatcggctgttttggccacaatcctttgggcaaatgggcgagcaattgccatttgaattgttcttgtatccatctggaaagacggtgccgtttcccactttctcgtacccaggttcacattcgcatttcccgggctccgagcaaaagctatggtgtccacattccttttcgcaaactggaaggcaattgtcgctgggagaagttcgtttgtagccattttggcagctacagactccggggcgatcgcaaaactcgttttttccacataccgttgggcaaacgggatggcagtcgataccgccgtagcccgcattgcaactgcaagtattgggggacgagcagaatccatgttgaggacactgttgtctgcagacaggtttgcagttctcaacggatccttcgtagccctcacagcaactgggtctcattacggtcctgtaggcagtctagagaacaggagaaaaagcctctttaaaggaaactttaactacacacttaccaaagctataaataataatataaattatgtacaaattcgaattacctcatcttcatagacatattgatgcctgtacttagtaacccaaccatgaaagtatgaatactgttgaaacggaaccaatttacttttaagaaccttacggttatacggaacgctttccgggtgactgcaatcatttaggccatgccgtaaaatggcgaaacttgtgccaaaggacaatgacagacacacaaaatgcagtgaaaatgcagtaaaatccatgagtaatgcgagtcaattcgtttcctgaagtatataccatatatatattcactatcttaaagcaaccagtctgtccgatgaattaaacagaactggaccctcaattaatgtaatgttcttttctcttggatttttaatgaattccagataacgagcacactatatcttcgtttgctttgtacataggaatcttttagtattttataattatttgtattattagctttagggagactagttccgttccccatttatattttactcaaagttttgtatttacctcttcgtctgtataatactcggtgcggtattttgtctgccaaccactccagaaagatctatgctggtatggtatcactctactcctttcgacatatctcttgtaagtaaccacctgcgatcggttacaaacattcaagccgatgggttgaatgaagtcgacgagtagcataaaaaaacccagacacacccaaaggcattggatgtgtgacattatggaaagagcagaaatcttgtaaaattcagctttgatctctatgtaaatgagttcggcgcaacgtttcaaattcaactgagctgcaaatgtaaatttatatatttcatgttgctccaaaatcagctacatccgttgaggactcgacaatctagacctatacatataaaccgcttgggattatctgagcatttgtttatcccaatattgcaagcaaaatatgtaagacagaagcaaacgctataatgtttccttcaactactgtatatatttcatcagccattcaaatatgccctaggttactaaagatacttaaatttattctaaatggttaatttcattgcggctagtcgagttgcaacatcaaatgttattgcttttttctacaaagaacaagaccgtaaataaataataattgcttgatatgacgattgacgaccgcctgcaataatgattagctcttatcatttatatgttagaactgtttatggtgaaagtgtgagtagtttactctcccagagcactcactcaggtatctcggtgattccacactgttgaatacctctcccaaattcaatgagcagctacaaatagagcagagtatctgattccacaacagacgccgtttagaactcgtcgcgcgtggacgtagattttagagcgatcgaaaatggttctgattactttgaccctggtttcgttggtggtgggcctgctgtatgccgtgctggtatggaactatgactattggaggaaacggggcgttcctggtcccaagccaaagctattgtgcggaaactatccaaacatgtttactatgaagcggcatgcaatctacgatctagacgatatatacaggtgagttatcccagctagaaaggttatattaactaccaaaattcaatggatcatcaactgtttcacaaagaaaccaagaaccattcttaaaacgcatttaaaaaattacgctttacttgaatttaatgcgatcattttattcaggcagtataagaacaagtacgatgctgtgggcatttttggcagccgctctccacagctgctgg

SEQ ID NO: 19085 - DNA, 2023 bp, DROSOPHILA
ttgcgccgaactcatttacatagagatcaaagctgaattttacaagatttctgctctttccataatgtcacacatccaatgcctttgggtgtgtctgggtttttttatgctactcgtcgacttcattcaacccatcggcttgaatgtttgtaaccgatcgcaggtggttacttacaagagatatgtcgaaaggagtagagtgataccataccagcatagatctttctggagtggttggcagacaaaataccgcaccgagtattatacagacgaagagactgcctacaggaccgtaatgagacccagttgctgtgagggctacgaaggatccgttgagaactgcaaacctgtctgcagacaacagtgtcctcaacatggattctgctcgtcccccaatacttgcagttgcaatgcgggctacggcggtatcgactgccatcccgtttgcccaacggtatgtggaaaaaacgagttttgcgatcgccccggagtctgtagctgccaaaatggctacaaacgaacttctcccagcgacaattgccttccagtttgcgaaaaggaatgtggacaccatagcttttgctcggagcccgggaaatgcgaatgtgaacctgggtacgagaaagtgggaaacggcaccgtctttccagatggatacaagaacaattcaaatggcaattgctcgcccatttgcccaaaggattgtggccaaaacagccgatgtgtgaggccaggtgtgtgcgagtgtgaaaatggatatgccggtgacgacggaggcaccaattgccgacccgtgtgctccacttgcccggagaacggattatgcttgagtcccggcgtttgtgtctgcaagccgggctacgtaatgagaaatgatctctgccagccgcattgcgaaaagtgctcggataacgcacactgcgtggcgcccaaccaatgcgagtgctttccgggctatgagtcgtcgggggcggacaagaagtgcgtacccaagtgcagcaagggatgtaccaacggcttttgctttgcaccggagacttgtgtttgcagtattggctatcaaatgggtcccaatcaagtctgtgagccaaaatgcagcctaaactgtgttcatggcaagtgcaccagtccagaaacctgtacctgcgatccgggttatcgcttcaaggacaactcccatcacgaatgcgatcctatttgcgacagtggctgcagcaacggacactgtgtggcacccaatttttgtatatgccacgatggctatcagctcaatagcacaaatcctgtcacttctatgtgtcagccgatctgcaaaggctgccaattcggagactgtgtggcaccgaatgtgtgcgagtgcaacgtgggctatgagaatattaacggactatgcgagttacaaaccacgacggactcctatgaatacagcaccacaactgtggagttgcaatcatcaactgtagaccctcaactgcagacatcaaccagcgaggttccgcactcaaattgcactgccggttgcatgtgctggattgaatacgatgggatgggtactttcaatacagccaagtgtgccaagatctgtgttgatccccaggacaagccgtgcctcaatttggacaattgccaatgcgatttatcgagtggtcaactggtgtgccaagaggatagtgacatggattacagcggggagaattcgcgatacgtttgtcatattttgccagagcagggggcaagatcagaggctgaggtacggattcctgaccgaactggatcgtctaacaagtggatgattatcgtaggctcctgcgctggaatgatcattggtgtggccgccacaatcattggcataaagtactatcgacgttctacctctaggcgaaattttgaagccgaagaagccattgttgaatgtgattttgaatagtttgaatccacacaaaatcacttatcctttcaaaatcgcttgtaaaattgttaaattacttgaattaaaaaatgtaataacatgaaataaatttat

SEQ ID NO: 19086 - protein, 543 aa, DROSOPHILA
MRPSCCEGYEGSVENCKPVCRQQCPQHGFCSSPNTCSCNAGYGGIDCHPVCPTVCGKNEFCDRPGVCSCQNGYKRTSPSDNCLPVCEKECGHHSFCSEPGKCECEPGYEKVGNGTVFPDGYKNNSNGNCSPICPKDCGQNSRCVRPGVCECENGYAGDDGGTNCRPVCSTCPENGLCLSPGVCVCKPGYVMRNDLCQPHCEKCSDNAHCVAPNQCECFPGYESSGADKKCVPKCSKGCTNGFCFAPETCVCSIGYQMGPNQVCEPKCSLNCVHGKCTSPETCTCDPGYRFKDNSHHECDPICDSGCSNGHCVAPNFCICHDGYQLNSTNPVTSMCQPICKGCQFGDCVAPNVCECNVGYENINGLCELQTTTDSYEYSTTTVELQSSTVDPQLQTSTSEVPHSNCTAGCMCWIEYDGMGTFNTAKCAKICVDPQDKPCLNLDNCQCDLSSGQLVCQEDSDMDYSGENSRYVCHILPEQGARSEAEVRIPDRTGSSNKWMIIVGSCAGMIIGVAATIIGIKYYRRSTSRRNFEAEEAIVECDFE

SEQ ID NO: 19087 - DNA, 5187 bp, DROSOPHILA
tgggcgcttctcgaagaagctagcaatgccctctttggtgtcgcccagctggaaattttcgcacatcttctcctgcgcagccgaaaaggcttccgcttgggacatggccagttgcttgtagtagaactcttttcccagagagatgacggcacgactttttgcctttatggcattggtgatttcctcgatctccttatctagttcctctgcaggaacagctttggtgaccattcccgatatgtaggcttcttcaccagtaacgggaagaccggtcattagcatataggcggactttggacgcgacataatccgggcaactgcgactccgggtgttgagcaaaaaactccgactccagccctaaaaatataaattataacatgattaactggtttcatagagggttttcatccttaccctggagtagagaacttgctgttcttggtgcagactaccatgtcacatgacaccaccagttggcagcctgcagcagccgcatagccattgacttttcctagtacgggcaccggcagtctttggatgtcgtttataacatcggttagcttctggaacacacaagcctgtatcttggggtcattgtgcaactccttgagattgtgacctgccgaccagatctttccttgggccgtcaggaccacgcatctcagatccaagttgtctttatcttttagcagggcgtcctgaagggcacacatcatgtccagtgatagggaattcagagtttttggatgattcagcgttatctctcgcactccgttatgctccttgaccaggaccaaatcactgggtccattgctggtaaagcgaatgacctgttgcacgcaacctgttgcatattttgatatttttaaggagttgtttaaaatacgcaacatttttattttgatttggcagcaagtgttggtaaattcgccgcccaaacagctggttatctatcgaaacagctgcaagtcgatagcaaggcgcaacagttgtcaaacggtcactctaagccgcaatgagtttgtacgattaaaagtttatgtctattcgcgtttttcgaagctttcccgattcccgtagctgtcccactgtacaggtgagtaaccgctcaggtgcgtcaacaaccgctgccgttctttgtccatcagctgagcggtcagacagaacaacaacaaagccagaagctcgcgcgccagcctgtgtacgtagtaaatctatgtgactactacaaaagcagaactttatcagccaccaaagccatttgttatttgtcgccccacattcgcggccccgccaatcagttaacaaatcgaaccacgcgagtgcggatcccccgacttgagctccactaaaacgtacaccattaaattaccacattccagcttgccacacgatgcgtccgttctccggcagcgattgccttaagcccgtcaccgagggcatcaaccgggcgttcggcgccaaggagccctggcaggtggccaccatcacggccaccacggtgctgggaggcgtctggctctggactgtgatctgccaggatgaaagtgagttggtggtgtctatgtgtgtgatagatctcctggaattagttctaaacaacaatgcctttgctggattttcttcttgcacagtttatatgcaatctgcaagaaaatatgacaaaattcgacttaaacgaaagttggacttatataaaacagtgtcaagtcatcacagtcagccgatttcatttatttcgtgcttgcagggcagggcacgtcaattacctaaatccatcaaactatcttatctgatgggtgcgttgcttataaacatagctagacttcttctcttacaattttcctaaaaaacgctaatataaaacgtatcgtacaaagagaattcacctaagaattcaccacttttataatattgtattaaaataagcacgctttactgtgtactttgtgcccatagcttatataagccatgcactcgtctggtgccctccccgaacttctgaatttaatctagtcacagattacgatagattagagtttaaatgtttgctaaagcgtgtagcaacttaaaatcaatcaaatatgcaaagttcaacagcgcgaagaaaattgataagattgagatatcctgcccttgctagcacatagtaatagtttaggggcttagtaccaaaactaatgagattaggtaggtagtttccccgataccatgactaatgctttaaattaggaatgatgaaaaaataatgtttctagcatagcttctcgataaagtgccataaagcctgtccaaagtttcgtccacagcaaggcatgtcatgtccgataagatcgagcgggtatcatacacacttcgtttatcaggctgcaatttttttcaatgattctttgttttgggtctgttaacctcatgaatataaaacttttaacgacttcagtctgatgaaaacaaaggacagtgaaaggtttatctatagtaatataataataactgtacgcaaacttattccataattttctctcccaagatctttacattcgtggcaagcgtcagttctttaagtttgccaagaagattccagccgtgcgtcgtcaggtggagactgaattggccaaggccaaaaacgacttcgagacggaaatcaaaaagagcaacgcccaccttacctactcggaaactctgcccgagaagggactcagcaaggaggagatcctccgactggtggatgagcacctgaagactggtcactacaactggcgtgatggtcgtgtatctggcgcggtctacggctacaagcctgatctggtggagctcgtcactgaagtgtacggcaaggcctcctacaccaatcccttgcacgcagatcttttcccgggagtttgcaaaatggaggcggaggtagtgcgcatggcatgcaacctgttccatggaaactcagccagctgtggaaccatgaccaccggcggcaccgaatccattgtaatggccatgaaggcgtacagggatttcgctagagagtacaagggaatcaccaggccaaacatcgtggtgcctaagacggtccacgcggccttcgacaagggcggtcagtactttaatatccacgtgcgatccgtggatgtagatccggagacctacgaagtggacattaagaagttcaaacgtgccattaacaggaacacgattctggtatgggtttacatagcaaaatgtattctaaaactaatcttgaaactttaatcagctggttgggtctgctccgaacttcccctatggaaccatcgatgacatcgaagctatcgccgctttgggcgttaagtacgacattcccgtgcacgtggacgcctgcctgggcagctttgtggtggccttggtccgcaacgccggctataagctgcgtcccttcgactttgaggtcaagggagtgaccagtatctccgctgatacccacaagtatggtttcgcgcccaagggatcatcggtgatcctttactcggacaagaagtacaaggaccatcagttcactgtgactactgactggcctggcggcgtgtatggttctcccacagtcaacggttcccgtgccggaggtattatcgccgcctgctgggctaccatgatgagctttggctatgatggttatctggaagccactaagcgcattgtggatacggcgcgctatatcgagagggggtaagtttgtatcaaagttcgttgtgacaataatataattttaaatctatattaccagcgttcgcgacatcgatggcatctttatctttggcaagccagctacttcagtgattgccctgggttccaatgtgtttgacattttccggctatcggattcgctgtgcaaactgggctggaacctgaatgcgctgcagtttccatctgggtaggtgactcaacttttaaattagcggaaccattcttataagtgaaattccctctaagtatccacctgtgcgtgacggacatgcacacacagcccggagtcgcggataaattcattgccgatgtgcgcagctgtacggcggagatcatgaaggatcccggccagcccgtcgttggaaagatggctctctacggcatggcacagagcatacccgaccgttcggtgatcggagaagtgactcgcctattcctgcactccatgtactacactcccagccagaaatagacacctggagcaatccccgttctcttcgcccaccccacggagctaatgcatttcctgtgctgtatttaaaccaccaaaacaccccgtcgttaaaccttcctcaagcaatttatattaggatgcaattagtgctgtaatcgagggtacaaaacgtcgttctacgcgaaaatctatctacctatgttcatcccatttgtcaacattcgtcgctctaagagccatgttattaaagtgtttttctgtgtaacttgctagtgaaataataatataatattaatcaatttttgtgtactatacatttgtgaatgctgttaatgctcgttaatcttgaaacttccatttcctctgcaaaatagaatgaaaacatatacatttagcttaattggattgtggcctcacaaatttttagcatggatctatttgttaccatttaatttatatttgtttacattgtttaccacttcagcaattaacaataattactgctgcgtgggtatatgcaatccggtccgatctgatctggattggtgtttttatttcttttcgaacattttgccacgcgtcggcgttttttaatttagttgatcttggatgcccagctgacacgcccatttcctcttttgtaatttatggaagtctcgaatggcgtgcacaaaaattatttcaaatacatttctatggcggaaacatttatttcaaaggcaagcgcacattttaacaaggcacacgttcgttgtcatttttcaaagaaaaaataaatataaatagccaaagcgaagcaacaagtgtcgcacaaaggtgacgatcgatttgtggcatccatatcaaaacctgtcaccctaacacacctaatgcgcccacgcaactctgcacttcctgcccctgtccaccagaaatccgggtgcactagcaactccagacagccgggcagcccagaaaaattcggctcaaactgggttgccaaaaaagtgtgcatgaaataaattcacttttttcccca

SEQ ID NO: 19088 - DNA, 1746 bp, DROSOPHILA
gtcactctaagccgcaatgagtttgtacgattaaaagtttatgtctattcgcgtttttcgaagctttcccgattcccgtagctgtcccactgtacagcttgccacacgatgcgtccgttctccggcagcgattgccttaagcccgtcaccgagggcatcaaccgggcgttcggcgccaaggagccctggcaggtggccaccatcacggccaccacggtgctgggaggcgtctggctctggactgtgatctgccaggatgaaaatctttacattcgtggcaagcgtcagttctttaagtttgccaagaagattccagccgtgcgtcgtcaggtggagactgaattggccaaggccaaaaacgacttcgagacggaaatcaaaaagagcaacgcccaccttacctactcggaaactctgcccgagaagggactcagcaaggaggagatcctccgactggtggatgagcacctgaagactggtcactacaactggcgtgatggtcgtgtatctggcgcggtctacggctacaagcctgatctggtggagctcgtcactgaagtgtacggcaaggcctcctacaccaatcccttgcacgcagatcttttcccgggagtttgcaaaatggaggcggaggtagtgcgcatggcatgcaacctgttccatggaaactcagccagctgtggaaccatgaccaccggcggcaccgaatccattgtaatggccatgaaggcgtacagggatttcgctagagagtacaagggaatcaccaggccaaacatcgtggtgcctaagacggtccacgcggccttcgacaagggcggtcagtactttaatatccacgtgcgatccgtggatgtagatccggagacctacgaagtggacattaagaagttcaaacgtgccattaacaggaacacgattctgctggttgggtctgctccgaacttcccctatggaaccatcgatgacatcgaagctatcgccgctttgggcgttaagtacgacattcccgtgcacgtggacgcctgcctgggcagctttgtggtggccttggtccgcaacgccggctataagctgcgtcccttcgactttgaggtcaagggagtgaccagtatctccgctgatacccacaagtatggtttcgcgcccaagggatcatcggtgatcctttactcggacaagaagtacaaggaccatcagttcactgtgactactgactggcctggcggcgtgtatggttctcccacagtcaacggttcccgtgccggaggtattatcgccgcctgctgggctaccatgatgagctttggctatgatggttatctggaagccactaagcgcattgtggatacggcgcgctatatcgagaggggcgttcgcgacatcgatggcatctttatctttggcaagccagctacttcagtgattgccctgggttccaatgtgtttgacattttccggctatcggattcgctgtgcaaactgggctggaacctgaatgcgctgcagtttccatctggtatccacctgtgcgtgacggacatgcacacacagcccggagtcgcggataaattcattgccgatgtgcgcagctgtacggcggagatcatgaaggatcccggccagcccgtcgttggaaagatggctctctacggcatggcacagagcatacccgaccgttcggtgatcggagaagtgactcgcctattcctgcactccatgtactacactcccagccagaaatag

SEQ ID NO: 19089 - protein, 545 aa, DROSOPHILA; identical to SEQ ID NO: 19074

SEQ ID NO: 19090 - DNA, 2569 bp, DROSOPHILA
ccagggccagcacggcccaggatgattccaccggcgatggaaccaccaccactgtgatgcttattggcgagctcctgaagcaggccgatatctatctgtccgagggactgcatcctcgcatcatgaccgatggattcgagaaggcacgcgacaaggcattggaggtgctcgaccaggtcaaggtgcccgtggagatcaacaagaagaacctggtggaggtggccaacacaagtctgaagaccaaggtgcatcccgcccttgccgatctgcttacggacgtctgcgtgaatgccgtgctgaccattgccagtgccgataagaccaagcccgtggacctccacatggtggagctgatggagatgcagcacaaatccgataccgatacacagctggtgcgtggactagtcatggaccatggtgctcgccacccggacatgccgaagcgtttggagaatgcctacatccttacggccaatgtctcgctggagtacgagaaggccgaggtcaactctggcttcttctacaagaccgccgaggagcgtgaggcctttgtgcgcgccgagcgcgaattcatcgaccagcgtgtgaagaaggtgatcgaattgaagcgctccgtgtgcgatggcaccgacaaaaccttcgtcctgatcaaccagaagggcatcgaccccatctcgctggacgccctggccaaggagggcatcctggccttgcgtcgcgccaagcgccgcaacatggagcgtctgtctttggcctgcggtggcactgcaatgaactcctttgacgatctgcaggaggagcacttgggatacgccggtgtggtgtacgagcatgttctgggcgagaacaagtacactttcgttgaggactgcaagaacccgctgtccgtcacgatcctgatcaagggtcccaacaagcacacgatcacccagatcaaggacgccatcagggacggtctgcgtgccatcaacaacaccattgccgataaggctctggtgcccggagctggagcattcgaggtgcgcgcgtacaacgagctggtcgccttcaaggacaccatcaagggcaagtcccgcctggcagtgcaggcctttgccgatgccctgctggtcattcccaagacgctggccgtgaacagcggctacgatgcccaggacacaatcgtcaagctgactgttgaggatcgcctgagtcccgaactggtcggcctggatctggccaccggggagcccatgaagcccgtggatctgggcgtctacgacaactacatcgttaagaagcagatcctcaactcctgttcgatcattgccagcaacctgcttctcgtcgacgaggtgatgcgtgcgggcatgacgagcctcaagggctagtccccatcatttcatccgacccattcaatttaaccaagttaatgcaccgcatgctactcaacccgcgtctctcaaagccacacacaaccaaaagaaaactaaacacgtaaataatttggaaacacatgaaatcggaatggttgcggctgcaagtattcacatttaaaatacaattctaataaatacaaaaaccaaacacagctctatgcttaacgctaatgtattttctatttttattaacactaatgtttactcactacaaactttcattggtttaaaaataaatggaaatagcgatttagccgtgactcaaacctcaatatgggcggtaattggggaatacccacaactacattttttggggccacatggtatatttgaagagtccactgggtggtcacaccgcagtcaacagttgtcgctttcgctggaaagcagctgaaaacaagtgaatttctgaattaaaaacattttcaaacatgttttcggttacttgtgtggcgcccgtaaacatagcgctcatcaaatattgtgggtaaattaatacatatattataagcacataaacttatgcacatgcattcctttaaagggggaaagcggcacgaagagctaattctgcccgtcaatgattccattagcatgactctgagcaccgatgaggtaaatatgaaagatatttaaatatttatttgcgttttaaaaccaacaaattgtaattaaaaaattaaaaaaccttagacgcttttaataatggtttaagtttaaagtgcgcgtagtcgaagttttcattttctcacaaatgtaaatattacgaaaactttctatttaatttgggaagatctcacggattttcacttttcaccgattctctctctttcgatttgtgtggacactgaatttgcttaagattaaaatgaaattactaacttaaaaaaaatgggtttttgaatatgggttgttcgaaatcctgtaatttctaacttattttttgaaatagcaatctatcgagacttttaaaatcttgaacaattacctttcttgatcccatctcccaagctctgcgccaagacaacagtgactgcatcggaatcctttgaaacgaatcgcatgtggctgaatggggaggaggtgccttttgaagagagttcccgcctgcagcgctgtttgaatgaaggcgagtttatagttatatatat

SEQ ID NO: 19091 - DNA, 569 bp, DROSOPHILA
gtgtttggtttttgtatttattagaattgtattttaaatgtgaatacttgcagccgcaaccattccgatttcatgtgtttccaaattatttacgtgtttagttttcttttggttgtgtgtggctttgagagacgcgggttgagtagcatgcggtgcattaacttggttaaattgaatgggtcggatgaaatgatggggactagcccttgaggctcgtcatgcccgcacgcatcacctcgtcgacgagaagcaggttgctggcaatgatcgaacaggagttgaggatctgcttcttaacgatgtagttgtcgtagacgcccagatccacgggcttcatgggctccccggtggccagatccaggccgaccagttcgggactcaggcgatcctcaacagtcagcttgacgattgtgtcctgggcatcgtagccgctgttcacggccagcgtcttgggaatgaccagcagggcatcggcaaaggcctgcactgccaggcgggacttgcccttgatggtgtccttgaaggcgaccagctcgttgtacgcgcgcacctcgaatgctccagctccg

SEQ ID NO: 19092 - protein, 45 aa, DROSOPHILA
MCFQIIYVFSFLLVVCGFERRGLSSMRCINLVKLNGSDEMMGTSP

SEQ ID NO: 19093 - DNA, 10109 bp, DROSOPHILA
tacaaaaaaattgacaaaaaatgaatccttaaaaaatggttcgcatttgtaatattctgtgcaaacagtcattattttaggtttgcgaccaacttgtgataaaaaaaaaccgcccaaaagagtatagtaaaacaaccatttcaacattctacgttttctttgccttgctaagaaaatatttattattattattatattattatttttttttttttgatatggtatatggcagacttcagtttaaagtttacattttaaaagtgagcgaagcactgctatttatttttatacatttgtatatgtagtagatattagatacgttgtaatccatttttgcacaaattacgtgaattatgtataaataagcaacaaatgaagagcgtaacaattagtaaataaatctttgcagttgcactgagtttatactccttattaaataattaaaaataagtacattgtatggtcatggtattataaaggttaacatatttataaggtaagattgtggtttcctggtttccagcataaaataaaatgcagctcatgtaaatcccctcatgggtacgggtacacataatcaaaattagtttttacacaacgattattttcagatttcctaattctccttattaattgtatctaccgacgaatgcaagaaatagttgcgaactccacgaacttcatcgcactcaaattctaatggtgcggcttcaaatgttccacatagttctccggaatgagtcctgttttcccatttagtgtgccctgcagccagccgggttcgtgggagtaacgaactgtaagcggtgaaatcattgtaaataacaaatcttccactcatgctctcaaaactcaccattggttattatttggttgggctcgaaagaaagctcgccctcgctttctcccatgcaagcatagagtgtgcgcacacgactgtaagtaagcaacaggttttaggcgattaagttgcaattagaaccaatagtaaattatatactcacgcggtgcccgttgacaaatcacgttttatttggttgacgtcacgattacgatgcattttactaggcggatattcggtgctttcgctggcggtgccaccacagcttaaactaaccgagggcaatgttgtggccgtgacgacctcgtcgcaggtgggtccaagatgcggcgacagcgatgaattctgtgacgatatcagcgcatagtcattagtgttccgtgcgctcaagtgctgggcaacattcccactgttgccactattggccacaatggagctgcccaggccgttgttggaagatagtgaatcacatacgctgtcgttggagctggatgttgacgttggcattaggggtgaatagtgttttgtctggccgtacgagtgcagaccccgttgaacgggcggatgctgctgcggaccactggcgctgcccaggaatcgctccttgcgcattgcagtatttggcggggatacattgcttagactaatccgattgcttgagttagcaccagcactagatgtgttcgtatatatatggctacttgagcccgattgagtaactggattggccgtggtcattaggtactcgggatgtcgaaagttactcgtgctactaaccggcacagcgtgatgcgattgcagcgtcacaccgccgttgttagcacctataataccataatcgggcgcaatctcagtgtcgggcacgtatcgtcgtgtgctggtctcatttttcgatattgtgtgcagattattgatgctaccaatggtcggcgagagtatgccgttcagcatgtgcatcggcggcgacagggatatgcattgagcaccgcccgagctattcatggcgttcgagccaagggcatagttatcgccattcggaatattttgcaggctggatgacattgtgggctcggtgcagttggttttgctcacaacgcgatagattttctgctgattcaagaacatcggattgcccgctgtattactgctgctacccattgcacccgttgaagcggccttgccgatttgagaggctcgcggcattctggtcggtggactgctgcgactggggtacatgatgctgggtgccttcgtggcgtccggcaacttgatatcggcgctgggcttgttcttgaatatcctctcgtagttatcaattagaatgttgatgacgatattattaaacttaatatccaatatggcggcaactgattcctctcgaggacgcaacaatgttggcccaaacaccactcccagattaaatacggacattttgttcttctcgtacttgcgcgaaacgctgcgaatataaatatatacatatatagtattgcataagtgatcataacatatttcctgcagcgttactcactcagtcagatggcaaataaccatgtcgagcatctgaaaattgggctgcggcaacttgtagaccagcttgtgcacctcattcacgcgctgattgagggtttcttgttctgaaaataaagcaattcccatttgaaatatgtgcataaaggatggatgatgctagttgatgatgcttacttgcggcttcaatgaaatcactatgatattgatacgtcatcaatggctcattcagatttcgaagatacatttttagggcactagctatggtgttgctttccatcaaatcgcggtacttgtcgtcgacgaagacatcgtcgctctccttttgattgaggcccagtgctagcagcttgctgattttggttccaacaccgctctttctgtatatgccctcatcctccaggcctcgaatctctaatacttgaatgcatctgcggatgaacatgaatccggcttcatccagatggtatgcctcgctgactttgattttgccgggagccagatatgtctgtgttggaatgaaaaggattttaattatactagtgatttagttaagaaaaaaagtaatgactacttaccggctccgtgccatccatggcactaatccaatagcgatgatccttttcgctcaaagcctgaaatgtgtagacgacgcctggcttctccttgaaggtcaaatcgaagcagaacctcttctcgaactcagatgcccgtcgctggcaggagaaaagcgtcagtttctcgtcgtcacgcgcctcgggtctcgtgaagttgtgattcatctggttgaactggagcatagtgaactcgcgcttttgcttcttgaatgtacaatagtattttgtccaggtggctttgaatggctctaaaagggagattttcagaatggaacctatgattcgttcgcaatgagttgaattagttgtatgcagcgaatttcgttattattacattgtttgtttgtttgtttgtttggcagaaagataggcaggcagaaaaagactacgagagttataaagatattatattctttatatattattatcaataggctattaattattatcggttcaacagagaccgcataatcaaaatgataattgtaataataaataaacaatctctgcaaacaaggcagttcttgatcagaaaagaaataaagcttttatgtgtgattatcggttgaaaacacgtacttttctccattagaaataggtagccacgttttgtaaaaatttcctcgggcttctgttaacacacaaattattagaacattttcaagcgtattcatatatgtatcaacttactgtgcgtttttccatatattttgttttcaattcagtcactttttcgcgtgcctcctcgaaattttcccgagtctaaaagttatggggagcgttatttcggtatatcacaatggaaaacgactgttcgcctactttttgaactttgtgcctcaaatcctgcagataatcacgatgatcctccgcctgttcgtgcgccgtgtggtagaaaaccagccagccagagataaatgctagcaatatttcgacaaattcgaatttgattcgttcctgcacttcttggatgcgcagcacatagctcagcgactcctggatatactcgcgttcatgcatccccaaactggcgtcagcctacaaagaaagaaattatattaatattaatactattattcgaatgatatagcactaaattacaaatatgcgaccacaatccaagtgtgtaaaactatttattcataaaactatgccatttcaaagtgaagtggtaccttttaggtttcaaaaaacgtttctattttattatttttacattgcacaacaagttctgagtttaaacaatagcttttcgatggcaattgcaaaaaataaaaattttgaaataacttacctcctgtattgtgttttcgggctttttagttgacatattgaggaaacgctcctgcgattgacaaaatttctccgtctttttatcaaatttctttttgttttctttgacgccaccgatttgcttttttcgaaaatcctccagtgactcaataatatgtttatcggcgagcgttagctagttggtaattgttaatagattgttcagattctcactaatttggaaaccaatattatatgacccgatcagacaagccaacttaccattttttcgcgctcatcttcaatattgccaattatagcaccaaatcgcttgagactttcacaaatgacattctcatcgtcggtctgagcagtgccaatgcactcaaagttaaaatcgttaagtaaaatggccaattgtttcattcgagtggacaggactgaaaaagtatttaaatgcaatttgacaaaccattgaaataaatatgaaagcaaaagggaaaacatcaaacataacataaatctcattagaactagacgtctttgcctcacttcccaccacataaatacagcacagatatacgaaaaaaaaaaaacatgtataaaacgaggccctttttggcgagtaaaagaaaccctgatgctgatgctgatcctgatcctgatcctgatcctgatcctgatcctgttcctgaccccgaacctttgcaacctaagtaagctaataaattcccaatgtccatatgtccatttcatcaatgttaggacacgcgaaaggctttgctacttggaacagacatttctgaactttgcaaatagtatacgaacactgaaggaagatccaacggagtccgagattgtcgaaatagaccacgaagtgccgccagaggaatacctggtgccttacatccagaactacgagtgtgcggatataatagtcactgttcacgatcgcgtcttcctttgccacaatatcatactaagtatttactcaaggcgaatgctgaaaatattgcaggaagatgttgaccatattgtctttaagtcgaatgatttgagcccgaaaggattcagcgacgcatatctatggatgatttccagtgatggcgaggttaatccgtgcgatatgggcgaaattttgagggccgcatacttcctggacattcccgagctgctcgaggcctgttgggcgaacctggataggataacattctttgagatctctgcgtttcgcctattgttcgaattacgaggcgccaccaacttgtgggatgtattcgataagctgactgggcgcatttccatttcaattttgccagtcgcatcgactcgggaattcctgtgcctcagcgaaacacaaatttgctacatactcaagtccaactttctggcaatcaattcggaaatggaggcaagttctatatctatagtatagtagaagtataaccatgatatatgaatacacagcttttatattccgccttaatgtggctagcgcatctttggccgcagcgacgttcgagcacctatagggttttaagtcaaattcgcttcagcttcctgccgcccctcatgctaaagaagttcaggagtgaggaactccataagatgcccgaatttagtgacattctaaaggagtttagcaagtcgcccgatgtcatcacacttctgcgggactcggtgtttaacagcagtttgctcttaaccgtgcgcaacaatccgagtgtactcgatacgcatgtggagttcacggaggtggagctaatggagccacgccattgggtacaggatcatacctgtgactaccatcggaaggtgacacagctgtgtccaaatatgcgtttcataacgctaaacgaatatcaagagtacctaaaacgcctgtcgattggacccgaattcaatacgtgtttcaagcataccagggatcgggaatcagaaggacaagaagatatgtggaagcatatgtgaataggcattatttataaatcattttttgtatactttaataaacagacacacgttttacgccctccggtaaatggattgtactacttactctttgccgcactcataagatctttgacctctttgataattcgttttatttgatgactagtgtggtccagttccttttcatgtcgatttaaattttcgcgaaagtccggactgtcgacgatgcattcttcgaactccagaggctccaagccgcggcgtacatttttgccgccgcccatgatgtttgcgtttgcttttaataatattgaatttgaatatttgctgtgattttcagtttaagtttcagttttatttaggttctttcgatgttgctttccacagagctaagtgcattcgcagtgactgatatattgtgatatattgtgtagatttgtcggttgagtttcgagaaaactgcggtgtttgcaacatttacagctggaattgcgctccttttatatatttactattcaatgcaaatactgtttatcagttggtggattatgcatattggtaatccttcctgcaaagacaactgatataagatatctttttaaacaacaagtagagttaattgcgcaaaacttgcattgcggctgagcggccaagaatacgctaagttactttgagaaaatattttgttctagcatgaagaaacatgattcactcgattcttatcaactctgtattaaagaacttgcattctctcttttagagaacccattgctttgtgtggtttaaaaacgatattttgagtacatcgcaatcaccggaatatgaatttatagcctaaattgaccaataattagcaagtgaagtccattatgtattatatttattcgttttgatcgcgcagagctctggcaattgtgattttgatttaaggtcggttccccacattcgataaactttaaactgtgaaattccgaaaataagagcagatccgaaaagcaaactgatgagattatataaaaagataaattgaaacacagtgccacgataaaaagtgggcagtcaacgactaactttcatcaagaacggactattgttaatttcttatcgtctgtgtaccgagcaagacccacactctagtaaatttcttatcttttgcaaacatatacatatgtacaagcgtttaccaaaaacaagtttaaatacacttgcgaacactttcctattacagtgaaaccagccacaggctgataagtcgtcgccattacataaatgcaaaaccgactttgcaattgaaaatcatgttcaataaaaattgcgaaagtcagccacttggaaaatacactttgaatgccatttatttatgggtgtatttaaatcataaagttgcttacagacgcctgtttactacattgtcattgttgtatatgtttttcttatcagatcttaagatagataggcgcaggcacggagaattctcagaaataatcgcctaatcaatatatattttaaacaaattttagtggattccaggcccaagttatcaaggaaacaatgacgcagataaatgtatatacaccctaactaaaacaattcacaaaacatatcccctttacgcaataatagtctttccattcaaattcgcaaagtacttttatccggctcataggaccattgattactgataaccagttaatcacctgttttcactttctttgactacaacaactttaaaaatccttgataactttataagcctaagagatagttatatatatgaaaatgttaggcattgaaataatgcaatatatatgtatttatttaaagccgagttcagatagtgcaattcaagatcatgggaaattttgttggcgagtttccactgatggaatgcgcaacgagtaaaaacacagctgttgctatgtattttcgctagatataccttaatacctgttgaatacgaacttatggtggatttttggggcttaaaaaacagttaaacattccgttttaaattatcttatcggtttttttttacagttaagcccgcttaaaattgttgcatgaagctaggtatgtacaggcatacttgcatacttgcatacatacagatgtgcaccgcctgtatttgtatgttgtgtacatttgttatttaaaaataactttagtttatgttcgcttactgataaataactcatatgcgcactttacaacactatgtgcataagaatgtgttgaagggaggggtgggcgagagtttttatcgtttcctctttttttttgcataaacttgttaaatttcgatgtacatatgtaaacattcgatcttaaaacaggttgcgaggccactaacaccataatttcgatatcggacatacccctgggatgaaattcaactgcagcaccaaatcctttgtttatttcgcatgcatgtagttgtttaaaaaactaaataatatatatatatcagcatacatatacgtagatacacaccagcacacatacatacgcaatgcaatggaatcacaaataaataaataaatcaaatccttataaacgaatcgtcgaggggctcatgtttagacgcttttcatatgactttagcccattggaattcacttatacaaaaataaatgctcttagttacgaaaggcaaccgtcggtagtttttcgcgtaccgcaaccgcacacacatttgtgcccgtgttaaaattactcacagagtaaacattagtgtatgagtaatttcccaatatctaatgttgctctgatcgaagaacgcaaattggccgtgtcgtgtcgcgcgtttcgcatcaattacgcgatattattcagcatcaattgcatatttcgtttcattgtattctaaatgcaccacaatatatatatattactttgactgttaaatctccgattagaaaaaaaaattaatgtaggtctgataaaaatacacaagttatctgaacgtgctgttaagtatattaactgtgctgttaagcgcatcaaataccctgtctccaccgcgacactaacatttgcaggagtgtccataagcttttgccgtgccatctacttctcatgcgttccaacaaccacctgttacttacttgttcgcatttcaacgcattactctctcccattctctaactttaattgacagaaatgattgggaaacaaaatgaaagcgctaaaacttctttgatagatatcaaatgtttattaagcgtctaaagtttgcagcatgcatagcttagcacgaattgtgaatcatctattttgtcaatgaacaacattgcgcgtcgttacatagagaggggtgaattcattaccaaaatgtattacaaatgttacaaatttattaaaaactacaatttctgatttacatagttgcgataataatcacatcatgtttccactactccaattataagagcatgtggaatcgaaattgaccagaaataatcgatggtcaagcagccgtgccccaaatatcgctgatatcgatactgtggccgatgttttgacagctcttttggttattctgcaccggctcgcttttatgctttgttaaattatattatataagtatgatgcggagcgttattaatcaattactgggtctccggtgggtacacttatcgttgctatagtggccatttagtaaattctggtttctccattcaggctcagtggaaatagcagtgttttggttacgcaggtgcgcgataagggccatttgagcagacctcgactgcggaatccccaatggtttctgcgcaaggaaattacagtatgtgacatatatctttttatctataaacaaactactcatttgcgttttattgcaacagaaatacaacgatttgatgacggcggagaacaagcagttcgtcaacgaa

SEQ ID NO: 19094 - DNA, 3175 bp, DROSOPHILA
tcaaagtaatatatatatattgtggtgcatttagaatacaatgaaacgaaatatgcaattgatgctgaataatatcgcgtaattgatgcgaaacgcgcgacacgacacggccaatttgcgttcttcgatcagagcaacattagatattgggaaattactcatacactaatgtttactctgaaggattaccaatatgcataatccaccaactgataaacagtatttgcattgaatagtaaatatataaaaggagcgcaattccagctgtaaatgttgcaaacaccgcagttttctcgaaactcaaccgacaaatctacacaatatatcacaatatatcagtcactgcgaatgcacttagctctgtggaaagcaacatcgaaagaacctaaataaaactgaaacttaaactgaaaatcacagcaaatattcaaattcaatattattaaaagcaaacgcaaacatcatgggcggcggcaaaaatgtacgccgcggcttggagcctctggagttcgaagaatgcatcgtcgacagtccggactttcgcgaaaatttaaatcgacatgaaaaggaactggaccacactagtcatcaaataaaacgaattatcaaagaggtcaaagatcttatgagtgcggcaaagatcctgtccactcgaatgaaacaattggccattttacttaacgattttaactttgagtgcattggcactgctcagaccgacgatgagaatgtcatttgtgaaagtctcaagcgatttggtgctataattggcaatattgaagatgagcgcgaaaaaatgctaacgctcgccgataaacatattattgagtcactggaggattttcgaaaaaagcaaatcggtggcgtcaaagaaaacaaaaagaaatttgataaaaagacggagaaattttgtcaatcgcaggagcgtttcctcaatatgtcaactaaaaagcccgaaaacacaatacaggaggctgacgccagtttggggatgcatgaacgcgagtatatccaggagtcgctgagctatgtgctgcgcatccaagaagtgcaggaacgaatcaaattcgaatttgtcgaaatattgctagcatttatctctggctggctggttttctaccacacggcgcacgaacaggcggaggatcatcagccattcaaagccacctggacaaaatactattgtacattcaagaagcaaaagcgcgagttcactatgctccagttcaaccagatgaatcacaacttcacgagacccgaggcgcgtgacgacgagaaactgacgcttttctcctgccagcgacgggcatctgagttcgagaagaggttctgcttcgatttgaccttcaaggagaagccaggcgtcgtctacacatttcaggctttgagcgaaaaggatcatcgctattggattagtgccatggatggcacggagccgacatatctggctcccggcaaaatcaaagtcagcgaggcataccatctggatgaagccggattcatgttcatccgcagatgcattcaagtattagagattcgaggcctggaggatgagggcatatacagaaagagcggtgttggaaccaaaatcagcaagctgctagcactgggcctcaatcaaaaggagagcgacgatgtcttcgtcgacgacaagtaccgcgatttgatggaaagcaacaccatagctagtgccctaaaaatgtatcttcgaaatctgaatgagccattgatgacgtatcaatatcatagtgatttcattgaagccgcaaaacaagaaaccctcaatcagcgcgtgaatgaggtgcacaagctggtctacaagttgccgcagcccaattttcagatgctcgacatggttatttgccatctgactgacgtttcgcgcaagtacgagaagaacaaaatgtccgtatttaatctgggagtggtgtttgggccaacattgttgcgtcctcgagaggaatcagttgccgccatattggatattaagtttaataatatcgtcatcaacattctaattgataactacgagaggatattcaagaacaagcccagcgccgatatcaagttgccggacgccacgaaggcacccagcatcatgtaccccagtcgcagcagtccaccgaccagaatgccgcgagcctctcaaatcggcaaggccgcttcaacgggtgcaatgggtagcagcagtaatacagcgggcaatccgatgttcttgaatcagcagaaaatctatcgcgttgtgagcaaaaccaactgcaccgagcccacaatgtcatccagcctgcaaaatattccgaatggcgataactatgcccttggctcgaacgccatgaatagctcgggcggtgctcaatgcatatccctgtcgccgccgatgcacatgctgaacggcatactctcgccgaccattggtagcatcaataatctgcacacaatatcgaaaaatgagaccagcacacgacgatacgtgcccgacactgagattgcgcccgattatggtattataggtgctaacaacggcggtgtgacgctgcaatcgcatcacgctgtgccggttagtagcacgagtaactttcgacatcccgagtacctaatgaccacggccaatccagttactcaatcgggctcaagtagccatatatatacgaacacatctagtgctggtgctaactcaagcaatcggattagtctaagcaatgtatccccgccaaatactgcaatgcgcaaggagcgattcctgggcagcgccagtggtccgcagcagcatccgcccgttcaacggggtctgcactcgtacggccagacaaaacactattcacccctaatgccaacgtcaacatccagctccaacgacagcgtatgtgattcactatcttccaacaacggcctgggcagctccattgtggccaatagtggcaacagtgggaatgttgcccagcacttgagcgcacggaacactaatgactatgcgctgatatcgtcacagaattcatcgctgtcgccgcatcttggacccacctgcgacgaggtcgtcacggccacaacattgccctcggttagtttaagctgtggtggcaccgccagcgaaagcaccgaatatccgcctagtaaaatgcatcgtaatcgtgacgtcaaccaaataaaacgtgatttgtcaacgggcaccgcgtga

SEQ ID NO: 19095 - protein, 903 aa, DROSOPHILA
MGGGKNVRRGLEPLEFEECIVDSPDFRENLNRHEKELDHTSHQIKRIIKEVKDLMSAAKILSTRMKQLAILLNDFNFECIGTAQTDDENVICESLKRFGAIIGNIEDEREKMLTLADKHIIESLEDFRKKQIGGVKENKKKFDKKTEKFCQSQERFLNMSTKKPENTIQEADASLGMHEREYIQESLSYVLRIQEVQERIKFEFVEILLAFISGWLVFYHTAHEQAEDHQPFKATWTKYYCTFKKQKREFTMLQFNQMNHNFTRPEARDDEKLTLFSCQRRASEFEKRFCFDLTFKEKPGVVYTFQALSEKDHRYWISAMDGTEPTYLAPGKIKVSEAYHLDEAGFMFIRRCIQVLEIRGLEDEGIYRKSGVGTKISKLLALGLNQKESDDVFVDDKYRDLMESNTIASALKMYLRNLNEPLMTYQYHSDFIEAAKQETLNQRVNEVHKLVYKLPQPNFQMLDMVICHLTDVSRKYEKNKMSVFNLGVVFGPTLLRPREESVAAILDIKFNNIVINILIDNYERIFKNKPSADIKLPDATKAPSIMYPSRSSPPTRMPRASQIGKAASTGAMGSSSNTAGNPMFLNQQKIYRVVSKTNCTEPTMSSSLQNIPNGDNYALGSNAMNSSGGAQCISLSPPMHMLNGILSPTIGSINNLHTISKNETSTRRYVPDTEIAPDYGIIGANNGGVTLQSHHAVPVSSTSNFRHPEYLMTTANPVTQSGSSSHIYTNTSSAGANSSNRISLSNVSPPNTAMRKERFLGSASGPQQHPPVQRGLHSYGQTKHYSPLMPTSTSSSNDSVCDSLSSNNGLGSSIVANSGNSGNVAQHLSARNTNDYALISSQNSSLSPHLGPTCDEVVTATTLPSVSLSCGGTASESTEYPPSKMHRNRDVNQIKRDLSTGTA

SEQ ID NO: 19096 - DNA, 7207 bp, DROSOPHILA
atcattattaaactgtttgctttatttttgtttcgaatctgcgcaattcgcagatccattccttttgtttgttggtttgtcaagttaagatttaaaaaaaaaaaactcaaaattacaattgttagttcttctttccccgcccttctccctcgtgtctgctttcgcttcgctacgcttatgtaacaataaaattgtagcttttgccaaataaataatatatgcatatataataaaatatatatatatatatacgatcatatatcataaagacattaatgtagtgcatacaaaaaaaaactaaactaaaacaaatctatctgcaatttgaatcggaggttaaagaatatggtgtgttgtaaatataaatttttatgcttatagttttaaaataaaaaacatgaattgtaatcggtaaataactacaaaacaagatataaattctgcaccaattagcaggataccaagccgatgatcagcagattaaacaaacatttcgatcgcactgtaaaaataaatgtgggaagtgtggtggctgccaaacctataaataatatatatacaaataaatatatatatataaaattgtcgatttcctcgtcccgagaagcgtgcattcggttcgacttgactcgcattttggttgtcatcgtaatcattttatcatcatgatttatcctccgtatttatgttaggtggatgtaaatatacactctttcatatactctatttatatatatttgtttatatataatttgtatatagtttaattagctttttattgcagttgagtatactatgttgacttgttttttgttggtgttgttgctttgctggtgttgttgatcctatttcgtttgtttatccttttgttttgttttgtttctttcgattcgattcgatacgaggctttatccatattgcttcttgatcttgataggtcggctgttggctgtattcttcttttgtagttatcttgaatggtgttgtattttatttgtggctatttctctggcttttcctccgtcttgcttaatgcaatgcttattttagtttatttttgcttttaatttacgctttgctaattataaattatgttttagtttttgtgtttcttgttgaagttcttgttgcagctgttggttgatttatcctgatttgtcctgtgccaagtccatgcagtccgctcagccagttacatactgccactatatagtcggttggggactggaactcgatccgaacacaagtgaatcgcgggctggttgtggtggtggggagagatgcgtcgcccagaggagagaagtaagaggatggagcaggatgcacgcggtttctcagtcattgtcgtgggccaccgccagtcgtcgtcatcatctaagccatttccagatgccctcaataaatagggttggatccgggcctgctaaacgaggacaagctgctgacggcggccacaatcgaccaatcatcatcgcaatcatcatcagctgcgccagaagaagctctttttgagcctaacagacagcttgcgatgtacgcgcagcctaacctgctcctgatcctaagtatcgtctgacatgaacgcgttctgagtcttcgactcctcgatacggcggatctggtggcgtaaatacataattctgcgaaaggcaatacataaaatgcattggttagaacaactaccatttagatgtcattgcaacactcacttttgttcctgcagggtggcattgatttcggtgcttcgcaccaggctgcgggcgcacttcaattccgcgcatatcctcgtgcacgttatgtcgccaaacaggtgcgtatcctcacagcacttctgcgccttcgagaaacaatggaaaacatttacaatcagttcgagtccatggatatatgtatacgtatgtacagaggtcgggttagtgccttattcgcaggcaaatcctacctcacagcttacctgacgctccagcacctccgcgtgccaattggtcacatgcgcgatcagatcggcgcggaagtatttggccagctttggcgaaatctcgggaccacgtaggtttgccgcctgtcctgaggaactcacgcagctctgcagtgagctcagcgtggccgacgacgtcccatccactggaataacaaatgggcaaacattgtcatatattttaaactcggaacacactagaattttgaatacatacatttccgctgctgctgggcctgttgcgccgcctgtagctggaggcttgacgctgtcgcggctgccgctgcggcggccaactgttgctgctccaacgccgagccgctcaaatccagctcctgggtgggcgtaggcggtccttcgcatagcgtgccgctgttgctgcccatcgaggtgatcacactgattccgcagacggggcccatgccgggcacgatgctttggctgctattcgctccactggagccggaggaggcgttgccaccgggcgtggccggtgaggcattcgccaccatcactccgccatcgagggtagccttgaggccaaagggtggattgcaggtgtaggcgatgctcatgttgttcgtgtggcccacaatcgtcggtatgggactcttggtgaagttcaacgagggcgacatgctgtggtgcatatacaacggcgagtttacgctgttgtccctgcaatattgatatccatgaagtttagttgatgatcttgcaacatgccttcaatagcttaccgtaagctgccggagaccgagttattgaccgaattgtaggcgtgattggtcccatctgacaccgaaccaaccgagttaacgccgtgatgtgattgtacatcgaggacgcccaggcccaggtgcatcttctggcgcatcagcagcgcctgatccttgcccttggcacccggtggcagtggagcattcgagttcagatgatgctggtgcggatcctgacttcccagtgtgggcacagtcgtctgcaatgcataatgcatataaataagaataaagccaaagcttaaggctatcaaacaagccaaacttacgccagatgtggagccaatgtgaccgacaacggagttcctcagactgctgctgctggcattgctgctgctgccgccggcactgttgctgctgttgctgttcagcattcccgacatggtgggcagcattgtggcgcccgtcaccgggccaccgcccgttccgctgccgtagtgcagtccccccgtcgcacctgtgcccgtcgccacggatgcggaggagttggcagttgggtgggaggacaaacgaggcagggcattgcccattggctgatcgctgttgctaccgccgccgcctccgggaccgcctccgcccggaccgccgccgtgtgtggtgggcgtgccgcttagcgagtaactggcttccgaggtaggcgtcgagtcgccgcttatatccatgtcagcattgtcgttgtgtcgacctgtcggtaggattttaaaatcaattaactagatcctacgcaacctgctttatgctcaccatccaaacgccttcgatgactgggcggaccgccatcgttgtcgtaattccatctcagtcgtgaattgtcccgcgaagaattggaatgtttgtatgctgcaaagaaaaacacatgttttgaatatcatatttgaaatttctgaagcaggttcttaactcacttgatctggagaaacgatcatcgcggtcgcgatcgcgatccttgtcacgataatccttctcacgatgctgatcgcgcggcaaatttctgtaaccatataacacattaatgactatttaaccaaggactagggtgctcttattacagattcttcccaagatctttgctggtcatattataatgccattgcctttacctttctctgtccacccattcctttggcttctcccactgagagatttccgtcttgcagttgtaataatacattttgcctgaaagcaatccaatattatagtttggagcctggagaagaataagctgtcatggggggactcacctgatgagctgacatgctcgctccagtcgccataacgcgccgtccgttcgccgcgatcgctgcgctctcgtttgtctaacaaaaaaaaaaacaaaagccacagagtatgtttagtaaataaggggagatgtggggtaaatgggcgcttggacctacctgcgtacttgtccttcttgtacatgtccctgtcgcgatcggaaccgcggtcccgcttgtcgcgcaagtcgcgcagatctcgatcccgatctcgatcgcgatcgtcggacccggatcgtttgtcgttctcccgcgaggagcagagcttgccgctgccgcctccgctgcctcctccgccacgacgatccctatcatggttggtgcgatacgacgactccgaatcgcgatcgttgccacgccgatcacgtttatctatgaagaatagaataatgtattgttatggtatacaactccaacttgcagctgcgctaactcacctgaatatttatccttcttgtagacatcccgatctcgatctcgcatcttctgcataaagctgtaccgctcgccactgccgccacgcccattgccgccacctccgccccgatgatcgctgcggtcgcgcagatcgtgcgaacgggacgacggcgaatcaatgtccggcgactgggagcggtagctgttgccattgttcaatggtccgccgccatttccgctaccgccgccacctcctccagcggatccgccgcctcctccaccgccagcgcctggcgacaggtcacgatcgcgataattggaggaacgatcgcgttcgtagtcgcgctttgaactgctgtactttgagctctgcacgggtaaataaaagcgcacacagtttttagtcgatttacattcccaaaatcaattgcacagtgctacaaaatacaatgtttgtcgagtactctctaagaaatcgcagtaaggattcaagatgtggtcaatataatcagtacatcaagtaatgtagccaatatatgagtttttcgtgttccaacaaatgggattaatttaggaaatccttactgaatctcttggatagtaccaacccactggtatatttagtattgcattcttaatagcggttgatttaagtctcggtttagttgtaacttttgaagttgggtggttggttagttgaactaaatctactcaataggaaaatcataagttaatgcataatgccagctacttttgccaattttctcgcttgtgattattgccaatggaaacgaaaggatacaaaaagaaagttgggtgaaatgaaactcccgatggtttgagaaatcaaatgtgtaatcgagaagaattttgaaatgtgtcgtgtgtttggtgtgtgttttggtttatcgtctcctgagtaaattatatattaattgaaactaattatttaggatttttttaagtgatactttcgtttttggttcatattggtcgttgtcttcaggttatccaaactgaaaatctaattgtccagtttaatattaatcaaaattaaaatccttgtttgttgtccatcgtaaattttgggatcatccataaaattccaatcttgtgtttatcaaaaaattttataataattaataaagaatccttcataattgagtggtgtttcattgtttaagagatatagaataataactctttgggtgtttggtatgtaaatcataatttgttgatgttttttattagcggcgatttgtgtgtcgttttagtcagatttttgtttaaaatatacgagtttggatggaagatttattcctgctgcatgtttcatgttctgttgccttcttttgatttttattattcattattaagtaattttatttgttccttaatttgaatgttttttgtttattccttatcaggattgcttttcctgcgcacagcacgatgttcgtggcactttattggtttttgatcactttatttgcgtttttatattttactattgtttttaaccattattttctgggatctttgggttacttacttctaggcgacagagacccactgctgaaggcgttgaattcgctgccagcgtcgctgctgatgcgctgtttttgttattgttgttattgtggttgctaatgttgctgttgcaattggcaattgttgttgtcgaaagggagagatcaacagccatgttgttgctgttgttgttgctgctgccgtaggagtttttgttgctcctcatagataattaattgaagtgtatttggttttaatttgaattaaaagtccaattggtcgcttgttttcgagggcacactttatttggctttggtttatttcctatttgttttgcattagttatttgttggtgtcttaattgattgttgttgctttatgtatgaggcacatttgtgtttttgttgttgtcgttgattatttcgttagacaatttggaaattggtttgttcttccgttccgcacattcatgttatttttaatattggtgtataattgtttactacgtcgtttttaaggctattttaatttgattaggttcctattccttaggcagagtttagaaattggttatgcattcgatttctaattaatatagtttgataaatttgtatacttttaaccatatatatcattcgatttaaaacatttgttggtgctgttcggttagatgttgtaattgattaaatgatcgaattcggattgggtttgttttttgtttgttttttttttttagcagtgatgcgtacagattcgtttctcaagttaagatcagttcaggctgcaatgccgcgtttttgaatgggttaaaatgaaacacgattcggtcagttcaaaaatggatgaggttacgggaacgtaagatctgggatgcacaacaaagacagcgattgacaaagaaggagaaatatgaaccaaaaataatccaaaatccaggctatacaatttgcaaattttgttaatttttctctttaccaaaatatcagcaaatgacactagggaaatcgacggttcgataaaaatacgatttacattggcttttacattcttttttttgtggctttgggtgcactacgggctaatgagctaaactacaaaattaaaaatgtccactaaaagctggcatgtaaatgtgattaattgcggtgttcgaggagaattttcggatcggtctgcttacctggtatgatgtgtgactggtatgcttctcaaagtacctggaaaac

SEQ ID NO: 19097 - DNA, 3192 bp, DROSOPHILA
atgaggagcaacaaaaactcctacggcagcagcaacaacaacagcaacaacatggctgttgatctctccctttcgacaacaacaattgccaattgcaacagcaacattagcaaccacaataacaacaataacaaaaacagcgcatcagcagcgacgctggcagcgaattcaacgccttcagcagtgggtctctgtcgcctagaaagctcaaagtacagcagttcaaagcgcgactacgaacgcgatcgttcctccaattatcgcgatcgtgacctgtcgccaggcgctggcggtggaggaggcggcggatccgctggaggaggtggcggcggtagcggaaatggcggcggaccattgaacaatggcaacagctaccgctcccagtcgccggacattgattcgccgtcgtcccgttcgcacgatctgcgcgaccgcagcgatcatcggggcggaggtggcggcaatgggcgtggcggcagtggcgagcggtacagctttatgcagaagatgcgagatcgagatcgggatgtctacaagaaggataaatattcagataaacgtgatcggcgtggcaacgatcgcgattcggagtcgtcgtatcgcaccaaccatgatagggatcgtcgtggcggaggaggcagcggaggcggcagcggcaagctctgctcctcgcgggagaacgacaaacgatccgggtccgacgatcgcgatcgagatcgggatcgagatctgcgcgacttgcgcgacaagcgggaccgcggttccgatcgcgacagggacatgtacaagaaggacaagtacgcagacaaacgagagcgcagcgatcgcggcgaacggacggcgcgttatggcgactggagcgagcatgtcagctcatcaggcaaaatgtattattacaactgcaagacggaaatctctcagtgggagaagccaaaggaatgggtggacagagaaagaaatttgccgcgcgatcagcatcgtgagaaggattatcgtgacaaggatcgcgatcgcgaccgcgatgatcgtttctccagatcaacatacaaacattccaattcttcgcgggacaattcacgactgagatggaattacgacaacgatggcggtccgcccagtcatcgaaggcgtttggatggtcgacacaacgacaatgctgacatggatataagcggcgactcgacgcctacctcggaagccagttactcgctaagcggcacgcccaccacacacggcggcggtccgggcggaggcggtcccggaggcggcggcggtagcaacagcgatcagccaatgggcaatgccctgcctcgtttgtcctcccacccaactgccaactcctccgcatccgtggcgacgggcacaggtgcgacggggggactgcactacggcagcggaacgggcggtggcccggtgacgggcgccacaatgctgcccaccatgtcgggaatgctgaacagcaacagcagcaacagtgccggcggcagcagcagcaatgccagcagcagcagtctgaggaactccgttgtcggtcacattggctccacatctggcacgactgtgcccacactgggaagtcaggatccgcaccagcatcatctgaactcgaatgctccactgccaccgggtgccaagggcaaggatcaggcgctgctgatgcgccagaagatgcacctgggcctgggcgtcctcgatgtacaatcacatcacggcgttaactcggttggttcggtgtcagatgggaccaatcacgcctacaattcggtcaataactcggtctccggcagcttacgggacaacagcgtaaactcgccgttgtatatgcaccacagcatgtcgccctcgttgaacttcaccaagagtcccataccgacgattgtgggccacacgaacaacatgagcatcgcctacacctgcaatccaccctttggcctcaaggctaccctcgatggcggagtgatggtggcgaatgcctcaccggccacgcccggtggcaacgcctcctccggctccagtggagcgaatagcagccaaagcatcgtgcccggcatgggccccgtctgcggaatcagtgtgatcacctcgatgggcagcaacagcggcacgctatgcgaaggaccgcctacgcccacccaggagctggatttgagcggctcggcgttggagcagcaacagttggccgccgcagcggcagccgcgacagcgtcaagcctccagctacaggcggcgcaacaggcccagcagcagcggaaattggatgggacgtcgtcggccacgctgagctcactgcagagctgcgtgagttcctcaggacaggcggcaaacctacgtggtcccgagatttcgccaaagctggccaaatacttccgcgccgatctgatcgcgcatgtgaccaattggcacgcggaggtgctggagcgtcaggcgcagaagtgctgtgaggatacgcacctgtttggcgacataacgtgcacgaggatatgcgcggaattgaagtgcgcccgcagcctggtgcgaagcaccgaaatcaatgccaccctgcaggaacaaaaaattatgtatttacgccaccagatccgccgtatcgaggagtcgaagactcagaacgcgttcatgtcagacgatacttaggatcaggagcaggttaggctgcgcgtacatcgcaagctgtctgttaggctcaaaaagagcttcttctggcgcagctgatgatgattgcgatgatgattggtcgattgtggccgccgtcagcagcttgtcctcgtttagcaggcccggatccaaccctatttattgagggcatctggaaatggcttagatgatgacgacgactggcggtggcccacgacaatgactgagaaaccgcgtgcatcctgctccatcctcttacttctctcctctgggcgacgcatctctccccaccaccacaaccagcccgcgattcacttgtgttcggatcgagttccagtccccaaccgactatatagtggcagtatgtaactggctgagcggactgcatggacttggcacaggacaaatcaggataaatcaaccaacagctgcaacaagaacttcaacaagaaacacaaaaactaaaacataatttataattagcaaagcgtaaattaaaagcaaaaataaactaaaataagcattgcattaagcaagacggaggaaaagccagagaaatag

SEQ ID NO: 19098 - protein, 876 aa, DROSOPHILA
MRSNKNSYGSSNNNSNNMAVDLSLSTTTIANCNSNISNHNNNNNKNSASAATLAANSTPSAVGLCRLESSKYSSSKRDYERDRSSNYRDRDLSPGAGGGGGGGSAGGGGGGSGNGGGPLNNGNSYRSQSPDIDSPSSRSHDLRDRSDHRGGGGGNGRGGSGERYSFMQKMRDRDRDVYKKDKYSDKRDRRGNDRDSESSYRTNHDRDRRGGGGSGGGSGKLCSSRENDKRSGSDDRDRDRDRDLRDLRDKRDRGSDRDRDMYKKDKYADKRERSDRGERTARYGDWSEHVSSSGKMYYYNCKTEISQWEKPKEWVDRERNLPRDQHREKDYRDKDRDRDRDDRFSRSTYKHSNSSRDNSRLRWNYDNDGGPPSHRRRLDGRHNDNADMDISGDSTPTSEASYSLSGTPTTHGGGPGGGGPGGGGGSNSDQPMGNALPRLSSHPTANSSASVATGTGATGGLHYGSGTGGGPVTGATMLPTMSGMLNSNSSNSAGGSSSNASSSSLRNSVVGHIGSTSGTTVPTLGSQDPHQHHLNSNAPLPPGAKGKDQALLMRQKMHLGLGVLDVQSHHGVNSVGSVSDGTNHAYNSVNNSVSGSLRDNSVNSPLYMHHSMSPSLNFTKSPIPTIVGHTNNMSIAYTCNPPFGLKATLDGGVMVANASPATPGGNASSGSSGANSSQSIVPGMGPVCGISVITSMGSNSGTLCEGPPTPTQELDLSGSALEQQQLAAAAAAATASSLQLQAAQQAQQQRKLDGTSSATLSSLQSCVSSSGQAANLRGPEISPKLAKYFRADLIAHVTNWHAEVLERQAQKCCEDTHLFGDITCTRICAELKCARSLVRSTEINATLQEQKIMYLRHQIRRIEESKTQNAFMSDDT

SEQ ID NO: 19099 - DNA, 4683 bp, DROSOPHILA
ttgaagtaaacaaatgctaaatagccctaaacttaattgattccatccatcaaaaaacaaacatgatcagaagcttttttttgcagtttgaaagttgatattttggtatttgatgaggaaaaacccggcacagttcgttcacttgtcgtaaaaagttgaaaaccagcattaaatatcaagtgactactcctgtttcttacgcatgtggctaaatgttactccgaaatttatgagcgacttttaaatgaactcaactgacgttgacttgaaaatggatggcagtgaagaagtgcacgtcatctttggctacaaacagctccggtcgaccttgtgcgtgtcttgtctcaatctgatcggagatcatcttggtctttaacatcacgtggcccgtaatcaatgggcctatgagcttgtctcctggtggcatccacaactggaaatctttttccgtctcaatgcaaatgcattgccaatttgggtcatgtcatctcagctgactgactggtgagaggattttcgggtttaaggatcaggaaggcgtcaagacatctgtttttattgtgactgagtattattgatttattacaacttaagctgtacttaattacaggtatgcataattcgcatctcttggcttgaaataattactggtatcctacttgttaccttgcaagattaaagggtcttcgtataactttttattaaagtgatcggaacataaagtttttgaaccattccgtctatttaataaatattattagagagctgtaaatattccagaaaatgatcctcaaaaagtctagtaaaaatacattttttaaatattatttatgttgagtagccaccaaatcaaaaacgacagctgtttaataacaacatactctttatttacaaaatatatttacaagatatacaattacaaagaaccctatgacaaactatttccagcagctaaccagtgataaagacagtgaaatttattttatacattttattttatttgtccttaatagattttcacatagatatttctgttcttattatccattcaattcattgtgcgccgaaacctttcactgataaacttggccagctaaactgttcataaatggcgaaatttacaaacagttagctggtatttatcctaaacctggagttcttggcccagcacaatggcttccattggatggctggattggaaataatttacaaaaggcattgcttgtttcatcttgggggttcttatcagctacagagagtgtggcagggcggaagtttgacttccagggggtattttaagagtttgcttctgcgctcggttttggaaaggaaggccgacaggtggagagagtggggaagataattgaaaatgttgctagatatccttcggctcatttccattaagtccgctcgctccaatagattcgcctgcttccggtccattccgtccgcttacttgtggtaaccatggtggtcggagtagacggtggcatcgtggccaatggcgctaacagggtagctgctgacggcaacggtgggtgcgtgcttgaccacggagtgggacaccacgggcaccttcacgtagacggggtagggacgatccacatgcacgggcacctggacattgacggccttctccacgtagacagggtagggcttggccactggcacggggtagggcctgggcacctcaacgggcactgggcgatcgacgggcacatggacgggcaccttctcgtgacggatcacttcgtagggctggggcactggcacgggcaccttgacgtactccttaacggtcacgggcaccttgcggatgacttcgtagggctggggcacgggcaccttaacttcgacgggcacgcgcttctcatggacgacgggataggggcggtccacatgcacgggcactgggattcccttggtgatggtgatggtcttgtgcacatcggcctgcttgctgatcacatagggggcgggagcgtggtggacagcgacggcgggagcagtgtgtccaacggcgatcgcgggaccactgtggcccacggcgacggcagcgggtgcggagtatccggtcagtccgtagccatgtccgtagcttccgtggccggagatggaaccatgtcccaggtagccggtgtccagaccagcatgaccgtagccgtagcccagatcgagcaggccgcgcttgtccagcttcttctccagcggcaccttctcaccctcggttttgctggcgcaggcggaggccaccagcagagcggctaagcagatctgcaaagaattgagttggtgcgattggttatgaaactatgcattttagagacttttaaataataataatatattaattttctagcaaaattctagatatttgtgatttcttaatagtttatttcacaataactaagttagtaagtagaacttgattccttgcaaatatagtttaaatctatttcaaaatgaaatgaaataaaatttagtcatactatcttcgaattctcaactgtgcaaactcatctatcatgaaattcgtatagtctattctttaagtatttgaagcttctctatgataaaacaattcaagatatgcaacctacataaattgcctaacgaaaacgttgacttttatcacccattgcctagtttgatcgattacctaatcgcaatagaaagcgaaggcgataggcgatatgtggcccgattcgcattgtgtcgtccgttgtctcatcgccctctttcgcgattcaaatggtcaagtgaaatttgtgcgtgcctggcataaatgatgcagtgcagtcatcgcccactgccacgcccagtttccgcaatacgcctcaaccgactggcgtcacgttacgcatacgcagtgggcaactcagcgaatgcatttggagctggctttaattgagcacatgaacccagttgattacggcctggtaataaacgtggctggcactccaattatgatcgttcagttaataaacgcttattagccatgtcgttcaagttgaatttggtcgtttgcgagcatttcacctttgattaaggaaatttatcggattgaattgtttcaggaagttgtttgttgttgaagatggccaggtaaacaatgtgaggcatttgcaatgcaaaaggctatattgttccaattagttcatgtcagcattgttctgtatgcaattctttgaattattacttgatttctcacactaaaatatgctaccaacagcgatagttcacatactcgtacccatttacatatcaaactaaattctatatgtctaattactatatgtctgttgtacttacgaatactttcattgtggagtctaatgggacttgccaaggctgtaagtaaacaaagaaaacaataagattatttatacgaaatgcagcatagatatttttttttttataagatcagcactttaattggtattaacaatctgttctttgggaaaatgttccttggaaaattgaagttatttagagcacacggctcgcacagttattagtttataacttttagatcacagcttaaactttatttccgtttcacatagactacacgcattttagaaacaaacaaaaattaacttggcatttggcttcacttacaagcaactcagtaacagcgaaatagactgtggaaggattgtagaatcactagcgattccaaacctttgactggatgctgtctgtggtcagtggcgcgcttttatacccccaaagagtttttgtgtcaaaacgaaactgaaaacaccgccaaaccaagtcgctcagcggtttccaaaagcttttcccaccacaaaccagcctaattgctctcttcaaagctctgagttcggcttggtttgcgcttgtattggttatatttgtgtgtattagtgcggcacggaaagttgcaagcggaagcgctcaccaatacactggcatgccaccaatactcacgcaattgcggcttttctctgtgtgtattggtgactttagccgccaacttgaaagtggcttataaaatatgggtgcaaatgtgatcaaatcaatttgggaacataaaaagcaaataaaataaattaactaaatcttgaattgaaatttatattgggaaaatcccgcagaacgtactagcaatcctttcttgttttttttttgttttatttggataaaaagtcttcgggcttcttagcaagttgttcccaaaaatatagatttcaacgaaaggtcatatgtctatcaaagtcgttatgttttgtttgtcaagtttcagaagtcagcagttttggtcgaacctgattcctaatatcaataattctgagtctacctaatggaaattcaactagattttgttttgattccattaattaaaaaaaaaaaaaaacttgcttattagtatcatatttatacgttcggctcgcattttaaacaaagggtctataaatctggaattgttcaaaggggtaatctggttttaatcttgtataatttcaatataaaatttatttcgaaacattttgtggcccaataaacaaaagtgtaacaaagcaatttctttcatttgagtttaataaatctcaaattcacttagcagatctaatatcgtagaacttgatttaacggtaacttgatttataacttaattaatgtttcttataattttgtatgcatttggcgaaccgaatg

SEQ ID NO: 19100 - DNA, 1375 bp, DROSOPHILA
tttggaatcgctagtgattctacaatccttccacagtctatttcgctgttactgagttgcttccttggcaagtcccattagactccacaatgaaagtattcatctgcttagccgctctgctggtggcctccgcctgcgccagcaaaaccgagggtgagaaggtgccgctggagaagaagctggacaagcgcggcctgctcgatctgggctacggctacggtcatgctggtctggacaccggctacctgggacatggttccatctccggccacggaagctacggacatggctacggactgaccggatactccgcacccgctgccgtcgccgtgggccacagtggtcccgcgatcgccgttggacacactgctcccgccgtcgctgtccaccacgctcccgccccctatgtgatcagcaagcaggccgatgtgcacaagaccatcaccatcaccaagggaatcccagtgcccgtgcatgtggaccgcccctatcccgtcgtccatgagaagcgcgtgcccgtcgaagttaaggtgcccgtgccccagccctacgaagtcatccgcaaggtgcccgtgaccgttaaggagtacgtcaaggtgcccgtgccagtgccccagccctacgaagtgatccgtcacgagaaggtgcccgtccatgtgcccgtcgatcgcccagtgcccgttgaggtgcccaggccctaccccgtgccagtggccaagccctaccctgtctacgtggagaaggccgtcaatgtccaggtgcccgtgcatgtggatcgtccctaccccgtctacgtgaaggtgcccgtggtgtcccactccgtggtcaagcacgcacccaccgttgccgtcagcagctaccctgttagcgccattggccacgatgccaccgtctactccgaccaccatggttaccacaagtaagcggacggaatggaccggaagcaggcgaatctattggagcgagcggacttaatggaaatgagccgaaggatatctagcaacattttcaattatcttccccactctctccacctgtcggccttcctttccaaaaccgagcgcagaagcaaactcttaaaataccccctggaagtcaaacttccgccctgccacactctctgtagctgataagaacccccaagatgaaacaagcaatgccttttgtaaattatttccaatccagccatccaatggaagccattgtgctgggccaagaactccaggtttaggataaataccagctaactgtttgtaaatttcgccatttatgaacagtttagctggccaagtttatcagtgaaaggtttcggcgcacaatgaattgaatggataataagaacagaaatatctatgtgaaaatctattaaggacaa

SEQ ID NO: 19101 - protein, 277 aa, DROSOPHILA
MKVFICLAALLVASACASKTEGEKVPLEKKLDKRGLLDLGYGYGHAGLDTGYLGHGSISGHGSYGHGYGLTGYSAPAAVAVGHSGPAIAVGHTAPAVAVHHAPAPYVISKQADVHKTITITKGIPVPVHVDRPYPVVHEKRVPVEVKVPVPQPYEVIRKVPVTVKEYVKVPVPVPQPYEVIRHEKVPVHVPVDRPVPVEVPRPYPVPVAKPYPVYVEKAVNVQVPVHVDRPYPVYVKVPVVSHSVVKHAPTVAVSSYPVSAIGHDATVYSDHHGYHK

SEQ ID NO: 19102 - DNA, 3529 bp, DROSOPHILA
gtgtggccctggtttttgttgtggagcagatgggctcccatgtaatgcagctttccatgaccgttggatcggtggtacagggtcccttgctggctcttttcgttatgggccttctgtgcccaagcatcaactcaaaggtatcagttctagaatatctttatcttattagtttaaaatgtttaactaattttagagcgccatagtgggatccctttgctccttcttcttcatgggttggctgtgcctatctgcacaattggccattaattccggcgaaatgcaattcgaaagcaaaccagttagcgtagaaggctgtgattatgagtttgatcgcgacctggtgactcctgccaacgtgaccattcccttgactgaatctgggtaagtttttctaaatgcaagtttagtataaaggtgaactcctaatgttatttccacagatcgctcagtttcgcgcaggagctgtaccacgtctcctttatgttctatagcgttatgggagccgcggtgggcgtgattaccgcccacctggctggcttcgtctttggtcgcaatacggccgatgatgtggatattgagttgttgtcaccttgcattcgcagattccaaaagagcagctattccagcgttaagctggacgagaataccttgaagagtttcaatgcgaagacgtagaaagtagttccatgccatgtactttcaaataaaatacattaataagcagcacttcaagttttgtttagttaagttaggaatttcccttgcaaggcctgtaaataccagctaccactgctcattttagcatgaatacaaattctttgttaattttataattaatatgtaaattctaaccaactaactcattttgaacctttagtactttcaattgcgctatggcgctggcatacgcaatttgggctcggttctatttattgtgggcacggtgagtggaaaagcatttagcttaagtatattcacatttatttggtacatcccacagatgctctggcttcctgttgcgctttatgtaccggccatcacctacaatcaaggtgagtttgattttcgattaagcataataattttcattaactggttgcttatacatgcactaaggaaaatgggagtataccaatactatataacacgcattgaataactatcttcatttctctagtttaaattataacttaatctaagtttgttgaggtgtatatcttccaaatattaacatatttcagtgactggcactggcatccatgtaattacgcccattgtgtgcactatctgcactttctacacgtgtgtggtgaggcttaattaaatttggctaacattttgaggcctatctgaaagactttcttcatttcagggcggacttaaggccgtcgtttggacagatgtcattcagagctttgttatgtttggttccattttggcggtttgcgtcaagggcaccttcgatgtgggcggactgggcgtggttctgcaacgcaatgaagatggcggacgtcttaatgcaccggagtatgtctacggatgattaattttcttattttttttttatatttccaaccgacaggttgacttgggaccccacagtgcgattgtccatgttgtccgtgattttgggtggcactctgcataagatccagtcctcggatgtcaaccaagtgtccattcagcgattcctatccctcccgagttatgagcatgccaagcgatgtatgctggttttcacagtgctcctcatcttcctactcagctgctgcagttacatgggcctggtgtcctatgccgtctatcacgactgtgatcccataagtactaaggtaattaaaaaatattaaaaacattttgtcagtcgtcaaatttagtccatactaatatttacttacaatatttatgtgtcagttagcggctgccgtcgaccaactgccatctctgctaatgatgcgaacgctgggctctttacctggattaccaggactctttgtgtctggcgtattcagcgctgccctgagctcactttccacgggtctcaactcgctggcatgtgtcattactcaggatatcgtaagacccttgctgaaagtaccgatgaccgagcgccagacggctttttggttgcgggcaattgtcgttgtttgcggattttgctgcctgggaatggtcaacgtcgtggagaagctgggacaagtggttccactggctacgagcacagcggcggtttcgatgggtcctttattgggcatttattgcatgggcgtgggtttgccttgggtaaaaggaaaggtaagtcttatgatttcttatatttaatttatttaataatgtttaataactttgcagagcgttctcctgggcagtgtagtgtcctttttggtattgtcgtggatttgtatcaaggcgcagttggctcaaatgcatggagagattcgttatcccaaacttcccgtatcggtggatggctgtgactatgatttcgataatcaaacagttcacgaaacaatccacgagtacaggtaagtatgggaaatcttagttcagctaattaatataattgtattgtatattttagaccttcggagcgaaacatctatcacttgtcattcctgtggtatacagcattgggcgggtttatttgcactgtggtttcagtgttggctggattcgttttcggttgggaggatctcaataaaatggatccagccttgattacgccctgtatgcggcgttttttgcccaataaaaactatgaggctgttaaaatgcaggatctctttaagcgcaaggacgaaattgagtcccaataagcgttgtcaataaaacatgtactctctgttctgcaaatctgtttttaaattaattatttatgaatgtgtccaagcatgtttcatttattaaatgcatcctgtaaataaccatgaatcatatgtataaaatttcgttcttgtttctgtttgaattcgtttatcttagtacttcgaaagacgtttcgatcgacgagttcggatctttggttcctgcctctttgtggtgatgaatgtgagttaattagcaagaaaatagtggtagattattttaaaataatattttaagatcttgtggcaacccatttgcatatatgtcccggctctgacgctaaatcaaggtaactataattcttgagatatcattttattctattttatatatattatacttgttggctagtttccgggataagtgtcagcaagattgtgcccgtgacaagttttatttgtattctatacaccagcgtggtaagtaatatcgtcaaggaagtcccatattacaaagtgtgattacttacatcttttccagggtggaattaagggtgttgtgtggacggatgtcattcagggcaccgtaatgatcggatccatgctcatagtcatcataaagggcactttggatttgggtggcttgagcgttgttctggatcataatcgtcagtacgatcgcctggtgggtccagagtaagtacttctcatatagtacttaaata

SEQ ID NO: 19103 - DNA, 1089 bp, DROSOPHILA
atgctctggcttcctgttgcgctttatgtaccggccatcacctacaatcaaggtgagtttgattttcgattaagcataataattttcattaactggttgcttatacatgcactaaggaaaatgggaggcggacttaaggccgtcgtttggacagatgtcattcagagctttgttatgtttggttccattttggcggtttgcgtcaagggcaccttcgatgtgggcggactgggcgtggttctgcaacgcaatgaagatggcggacgtcttaatgcaccggagttgacttgggaccccacagtgcgattgtccatgttgtccgtgattttgggtggcactctgcataagatccagtcctcggatgtcaaccaagtgtccattcagcgattcctatccctcccgagttatgagcatgccaagcgatgtatgctggttttcacagtgctcctcatcttcctactcagctgctgcagttacatgggcctggtgtcctatgccgtctatcacgactgtgatcccataagtactaagttagcggctgccgtcgaccaactgccatctctgctaatgatgcgaacgctgggctctttacctggattaccaggactctttgtgtctggcgtattcagcgctgccctgagctcactttccacgggtctcaactcgctggcatgtgtcattactcaggatatcgtaagacccttgctgaaagtaccgatgaccgagcgccagacggctttttggttgcgggcaattgtcgttgtttgcggattttgctgcctgggaatggtcaacgtcgtggagaagctgggacaagtggttccactggctacgagcacagcggcggtttcgatgggtcctttattgggcatttattgcatgggcgtgggtttgccttgggtaaaaggaaagagcgttctcctgggcagtgtagtgtcctttttggtattgtcgtggatttgtatcaaggcgcagttggctcaaatgcatggagagattcgttatcccaaacttcccgtatcggtggatggctgtgactatgatttcgataatcaaacagttcacgaaacaatccacgagtacaggtaa

SEQ ID NO: 19104 - protein, 362 aa, DROSOPHILA
MLWLPVALYVPAITYNQGEFDFRLSIIIFINWLLIHALRKMGGGLKAVVWTDVIQSFVMFGSILAVCVKGTFDVGGLGVVLQRNEDGGRLNAPELTWDPTVRLSMLSVILGGTLHKIQSSDVNQVSIQRFLSLPSYEHAKRCMLVFTVLLIFLLSCCSYMGLVSYAVYHDCDPISTKLAAAVDQLPSLLMMRTLGSLPGLPGLFVSGVFSAALSSLSTGLNSLACVITQDIVRPLLKVPMTERQTAFWLRAIVVVCGFCCLGMVNVVEKLGQVVPLATSTAAVSMGPLLGIYCMGVGLPWVKGKSVLLGSVVSFLVLSWICIKAQLAQMHGEIRYPKLPVSVDGCDYDFDNQTVHETIHEYR

SEQ ID NO: 19105 - DNA, 7065 bp, DROSOPHILA
aattctttgctatataaattccaaacagaaataactcgttttagatattatactgcggaaaaaattggattctgattgtatgacggaatctgggtagacaaaaatttaattgaaagtatttcaaaactattatacaaaatagttataaatcaatctaaatattactatatgtatacacccctatgtattgtgtacgctatttgtacgaattacaaaccacaaaacgtgacaaactcaatctaattggaaggaaaagtagcacacaaaaaccacaaaagaaaaaaaccccttcaataaaaatctattaaacattttaaactgtgtgtttgatttcacgaggaaagtgaagagtatataccattaaatgtcctgtttttccagttctgatatgtcaaccaaaagctgttttaatgaaaaccataataaaacaacatttttttgtggttgggcgctttattattcaaacaaaatgtaacataactttcaattttggaaacatttagaatgacgtagaattttgttgacatatgtgcggcactttcctttattttgtaatgggaaattgcattggtgaaccacaagagagagtttttagggactgcattaaaatgtaagttttatatatatatatatgtataccatatactttgttcttgcgaagaggatcacgcggattgcctagtcagaagcgtgaaaatttaaataaactctgtctgcaaaaccgagaacgaaacacaactgcaggaaagatcaagagtttttggatccatagtccagcccgacacaggaaatgcgaaatcttgaatacgacatggtacatcaagcaaataaccgattagaaggtcgatccgtcctggtcgccgtcattccgctctcccaactgttccacgaagatcttctgtccgtgaaccgctcaggtcatgcctgtcgttatcttgaaaagttgttcgattgattgatattttttttttacgatttttttctcttaagaatttttgttgatgattgtgcgtttgccattgtccacttaacatttgctgggaggtcgtcatcattgtagccatcgagttgaaagtgaacgattttgattggtattttgttttagtttggtctaaacacaacaagcaaattcgcaatgctgctgctgcacaggctaggctggcggaatcttgctccggctgatggtaacagtttcagtttcagtttttttttggggaaaacacggccacaaccgaagctgcagcagcgattgctggtttggttttgccgtcgtccacggccatcgttaactttggaactccatgtcgatttgtggttgtacagagagaacacgctcgcaccctttttagctcgcattgcatttggtctgcagttgcctttgccgccttagcgcccgctaccgttgccgctccacttgggcccgttcattttttgttggccttaaattttgcgtagaagctctggatttgggcatagcgtacgggtatcgagtcaaggatgccggtgtagctgaagttctgttgctggcggttcttctcgtgcaaattatcgccggacaagtacgtgacgacgctcttctgcagttcgctgacgtgcggatcggcatggttggccaccaagtgattgcagaactgggcaatttgaaggaaaactgaggcgtcacgatctataagtagcaataaaaaaaaacaacacaacaccattagctggctaattctcgtgcgataaatatttgctaaactcacccatcttgcgtgatatcttcagcagggatagcggctgactttcgttatcgcgctgggcacgcaagtgcctattgccctgtttaaactcctgctccagccaacggatgacatggcgcacattctcgctgcgtttcttcaagtcatccaactcattgagcactaaatgagaaatgataatagattagcatggggtctttctccttgggtacaggttaagtacattcttaattgtaaatacactttactataaaaacaattggaaagaaaacaacaggcaaatcaaatgagctaccgtcatatcagaagtgttaagaatctaatctgttctactataaaagctcactggatttcagggaataccacaaagtaataagcttgttgatatgagattgtatagattatttaaattttgaagttctaaagtcgtcattctatgtcattgttactttccactttgttatcaacccacgcggaggtatgcgcactcacctgcatttggaatgaggacaatgcacttcttggtcctcaccagcgacttgactatgccattgtattcggtcaatgccttcgaatcgaccaccacaaatggggacatcaccacatgagcgggactgtcccgcagctcctcctccaaagtctccacctcgttttgcagccacagcttgcccatgagctcacacttcttcgacttggcctccgagcgctcttcgtcggcccccgagctggactgcaaattcagtttctcgatgacactgtttgtggttgtggaggcggaggttccgccggcgacagaggttcccgtggcactggttataacagcagccgccttctcggcattgcgattccttaggtaacccttgcgtggcatcttgcggcactcctccacggtgtccttttcctcgttactggtgtagctcttgcggacgatgccgttcttgcgatcggagtagcgacgtgtgcgtccttcgttccgctttgttcggttggtcttcggagcggtacgacgctcgcggcgacgtgatccgcctcccttcttctcctcgcgctgtttcttcttttgggtctcggtgaaacgacgcgtcttgacgcagaatctgtagttaaacttcttctgcttgcaaatgaaaaagccaaagtcgaccattttgaaaatacggagaatggactcttcctggggagtgacacgctcccggataatggtctcccagtccagtgtaatctgggtgctctggaagatgtcaaagttcttgaaagcaaagtcctcggtgagcggaacgttggcgcgcacatcgaataactcgaccagagaatcacgcacgttggcagtggtcagaaggtcgcgctcgaagtaaaccttcctggtgaagatgtcgatgttgcagtagttgagaagcttcatgatcttgtgcacaaactccggattcgagtggtagcagccgatgagaatctctgggttgattcgcagccagtcaaaaagcattttcagggctctaatggtcggttcattgtgcagacagtcaatgactatgttgggattgatcttggtgtacttgttgcgataaaccagcttctttggtggctctgaaaagctgacgggcggaggtgccaccggcttgctttgagcatcctctgcgctcttaaagttcagctgcagtacctcaaagctgcgcagcaactcctcagagtccgcctcctgtgagttggatctgcgctctacttcgttgggatacacgattttctcctcctcaataacaacgtcttcgttgtcggagtacaccacgccaccgactcctcctccgccgccgccgccagctttgcgctcctttttgctgtaattagctgttaggatttgtaagattttagaaaaaagtgtaaaaaggttttccaacttaagccttttgcttagatggaaattgggtttcaaagactcacctgctgcatagcgctcttcgccgcatggctccccaggatcagctgcatcaatgtcgctgaaatcggtgtcaaagttagaacttagatctgtgtaatcctcctcgtcgctgtaaaagtctgtgtccagttcgctttcgctgtcatagcaggagctgtcgtccgactgggcgatcttgcggcgtcggcggcgtagacgcattccccgtcgcttgctcttgcaggagagcggggtcttaaggtcggactccttggcctcgtcactggagcgcgtggaaacggcctcaccgatcttgtcgccgtcagcagcctcctgggtctttgcctcctcgccagagtgctggctgtcccgcgaatccgaactgcaatcctttagagagtgcgggcgtggcatcaacttcttgtccttgcgctcacattcgcctactgcagctagccagttcttgtactcattccgggacttgcgcaccacagtatcgaactcctgaaagcgttcctcgtactccgcctggaagcgctcgttgtcttgggcgcgagccaggattgtctgctcgatgctgacgatgcaggcgtccatcagatcggaacaggcagcaaccagaaaggcgtgcagcgagtaaacctttggtgagttgatcatcttaagcttggacagacagaagaacagaatggagacaatcttgaagatgcttggctccggaacgcgcagctgctgggagcacaggatcttgcgtagatcaatcagcacacagtggcacagagcgttaaagtccggcacttccttgtcgaagaaaaatatgtccacaatcagatagaaacgggcaaagaagtcctcgatgttgaagtctagtttttctggatccatacgctctaggtattcggtgtgcttggcgaacagcttgttaagattattttcgcttagttcgaatggtatgatgcacacaagggagtacaagtagtggtaagtggagtccaggtcatgattctgtccgtagtgcagtgtacccaactggttctgggccatgccaatggccggattaagcttgaaggcctccagataatacttggccacctgctccttgcttatgcttagtttgctgtcgatgcgaaagtctagaaagtagcgatgaagatcgcccagactgagcagcgatgagtgtatggtgtcgagtgcaaaggacacggcctccagactcttgtccaccgcgtgggtgcccgagtgcgatgactccatggtgtctccgatcatgtcgcttatgtagccatcactgattatggagaaatcaatcaaatactttagatccagatcatagatctcttccatgcgtgccgacaatcgtttgtagttgaagatgccagcgcagaggaatcgctccagcttttgcatgttctcttgggccgtggccgcatcctggcactgcttgtgccagttcttcttcacgaaggcaatgaactcgtagtatccacgtcgccacatcacctcgcgcaccttcttgcccaccgactggtagtccttgaagatgatctgcttgcacagctgcactaggagcgagcgtttctcttcgatttcgtgctggaacagctgtcccaccgactgcacattcctcttggcatcgtccagttgcttggaggcggtgtagagggatctgtatggacgatttgatgcgatttatagtaatccacctgtaacactcactttaacaccttacctgtaaagatcctttacctcctggctgaggatgcaggttccattgttgggctccaagccgcgacagcgattcgtgccgccgtctatggcgcactcgctggaggcgttcgatgatccgcccgagctgaatgtcacctccattgttcgaggtactgaaacatacaaattaccaagcatatcatatgagagttctgaaaagctacagtaaacacagctgccaactgaggagatacagtaaacacccactagatagttgaatgttccagctgttccttgactttcgtttttctgctgacgaattgtttttcgaaataaaatagcgtactttattgttgttattgtattgtttttgtttcaactggtgacgcacacaaacacatgcgcattgcgtagtttcgttttattgaataatcaattgaacacacacacagatactttttgcttttgcctttttgcttttctctgctctggtattttcgatactgcagcaattgcgattgcgaaaaaaaactatgcgatgcgctgctgcgctgcgttatttggatgcacttttgccagcagcgctcaggtagaatcaaatgacgtccatcaactgtttacctgcgcgatttgcattaccttttatgcggatttagttgctctgtttggtgtgtcgttctgcaaatttcacgttttcgctcttcctttgttaaacaacaagatggcgcatgcacggtcagactgcgcagtccgcaatgctcatgcaatgttcgatttttttctttggcgggtaattcagaagggctggaacaatggctgctaaatagcaggcaacaatatgtggaatgtgttaggtaaaattggtcgcatttagtgtaaatttgttgatttcaatgcctaaatagcatcatgcagagctgtttcgcctcagtcttttcagtgctggaaaactcgctgtcggtatcgctgtaggtatcgattgttgtctcatcggcgggttattcgaattactcgacattttacatttcgaatgtaaaaagggtataagttttgtctgtaatttacaatggcaataaaatagaatcaaaattaattcctcttatacttaaatattgacaatattaattctcttgcttgaattttggtgctttatttgggtcacatataaacgaaagaaataaaaaagtaaaaaatgcaatatttagcaaataaataaaatgtgtgaaaggagcaatggccaccaacttatgtttttttctgtacccaaagggagataagtgcccattagtttattttcatcacaagttttatcaccttttattgacttagtctttttttcgttgcgtcttcaataatatttgccaaatgtgaggaaatgtgtcaggcatattaatgatcttccaaacatcggcttatcttcgcgcctacctggccgagaaccccagacggattggaaacatcagacgcgactaagccgatctcgcattaaaaataaataatgctcgagtttatcgaccatttctctcggcgacattaagtcgtttggtcactcgattagcgttgggcacgtcgaggggcagatagcccaagtcactctaaaaaaaatgccgagaagttttatatgattcatagcttattacttattttttatagtttaaatatatttatatttcattatcgtttgctcgtatgtctccagagatt

SEQ ID NO: 19106 - DNA, 4034 bp, DROSOPHILA
gaagagcgaaaacgtgaaatttgcagaacgacacaccaaacagagcaactaaatccgcataaaagtacctcgaacaatggaggtgacattcagctcgggcggatcatcgaacgcctccagcgagtgcgccatagacggcggcacgaatcgctgtcgcggcttggagcccaacaatggaacctgcatcctcagccaggaggtaaaggatctttacagatccctctacaccgcctccaagcaactggacgatgccaagaggaatgtgcagtcggtgggacagctgttccagcacgaaatcgaagagaaacgctcgctcctagtgcagctgtgcaagcagatcatcttcaaggactaccagtcggtgggcaagaaggtgcgcgaggtgatgtggcgacgtggatactacgagttcattgccttcgtgaagaagaactggcacaagcagtgccaggatgcggccacggcccaagagaacatgcaaaagctggagcgattcctctgcgctggcatcttcaactacaaacgattgtcggcacgcatggaagagatctatgatctggatctaaagtatttgattgatttctccataatcagtgatggctacataagcgacatgatcggagacaccatggagtcatcgcactcgggcacccacgcggtggacaagagtctggaggccgtgtcctttgcactcgacaccatacactcatcgctgctcagtctgggcgatcttcatcgctactttctagactttcgcatcgacagcaaactaagcataagcaaggagcaggtggccaagtattatctggaggccttcaagcttaatccggccattggcatggcccagaaccagttgggtacactgcactacggacagaatcatgacctggactccacttaccactacttgtactcccttgtgtgcatcataccattcgaactaagcgaaaataatcttaacaagctgttcgccaagcacaccgaatacctagagcgtatggatccagaaaaactagacttcaacatcgaggacttctttgcccgtttctatctgattgtggacatatttttcttcgacaaggaagtgccggactttaacgctctgtgccactgtgtgctgattgatctacgcaagatcctgtgctcccagcagctgcgcgttccggagccaagcatcttcaagattgtctccattctgttcttctgtctgtccaagcttaagatgatcaactcaccaaaggtttactcgctgcacgcctttctggttgctgcctgttccgatctgatggacgcctgcatcgtcagcatcgagcagacaatcctggctcgcgcccaagacaacgagcgcttccaggcggagtacgaggaacgctttcaggagttcgatactgtggtgcgcaagtcccggaatgagtacaagaactggctagctgcagtaggcgaatgtgagcgcaaggacaagaagttgatgccacgcccgcactctctaaaggattgcagttcggattcgcgggacagccagcactctggcgaggaggcaaagacccaggaggctgctgacggcgacaagatcggtgaggccgtttccacgcgctccagtgacgaggccaaggagtccgaccttaagaccccgctctcctgcaagagcaagcgacggggaatgcgtctacgccgccgacgccgcaagatcgcccagtcggacgacagctcctgctatgacagcgaaagcgaactggacacagacttttacagcgacgaggaggattacacagatctaagttctaactttgacaccgatttcagcgacattgatgcagctgatcctggggagccatgcggcgaagagcgctatgcagcagctaattacagcaaaaaggagcgcaaagctggcggcggcggcggaggaggagtcggtggcgtggtgtactccgacaacgaagacgttgttattgaggaggagaaaatcgtgtatcccaacgaagtagagcgcagatccaactcacaggaggcggactctgaggagttgctgcgcagctttgaggtactgcagctgaactttaagagcgcagaggatgctcaaagcaagccggtggcacctccgcccgtcagcttttcagagccaccaaagaagctggtttatcgcaacaagtacaccaagatcaatcccaacatagtcattgactgtctgcacaatgaaccgaccattagagccctgaaaatgctttttgactggctgcgaatcaacccagagattctcatcggctgctaccactcgaatccggagtttgtgcacaagatcatgaagcttctcaactactgcaacatcgacatcttcaccaggaaggtttacttcgagcgcgaccttctgaccactgccaacgtgcgtgattctctggtcgagttattcgatgtgcgcgccaacgttccgctcaccgaggactttgctttcaagaactttgacatcttccagagcacccagattacactggactgggagaccattatccgggagcgtgtcactccccaggaagagtccattctccgtattttcaaaatggtcgactttggctttttcatttgcaagcagaagaagtttaactacagattctgcgtcaagacgcgtcgtttcaccgagacccaaaagaagaaacagcgcgaggagaagaagggaggcggatcacgtcgccgcgagcgtcgtaccgctccgaagaccaaccgaacaaagcggaacgaaggacgcacacgtcgctactccgatcgcaagaacggcatcgtccgcaagagctacaccagtaacgaggaaaaggacaccgtggaggagtgccgcaagatgccacgcaagggttacctaaggaatcgcaatgccgagaaggcggctgctgttataaccagtgccacgggaacctctgtcgccggcggaacctccgcctccacaaccacaaacagtgtcatcgagaaactgaatttgcagtccagctcgggggccgacgaagagcgctcggaggccaagtcgaagaagtgtgagctcatgggcaagctgtggctgcaaaacgaggtggagactttggaggaggagctgcgggacagtcccgctcatgtggtgatgtccccatttgtggtggtcgattcgaaggcattgaccgaatacaatggcatagtcaagtcgctggtgaggaccaagaagtgcattgtcctcattccaaatgcagtgctcaatgagttggatgacttgaagaaacgcagcgagaatgtgcgccatgtcatccgttggctggagcaggagtttaaacagggcaataggcacttgcgtgcccagcgcgataacgaaagtcagccgctatccctgctgaagatatcacgcaagatggatcgtgacgcctcagttttccttcaaattgcccagttctgcaatcacttggtggccaaccatgccgatccgcacgtcagcgaactgcagaagagcgtcgtcacgtacttgtccggcgataatttgcacgagaagaaccgccagcaacagaacttcagctacaccggcatccttgactcgatacccgtacgctatgcccaaatccagagcttctacgcaaaatttaaggccaacaaaaaatgaacgggcccaagtggagcggcaacggtagcgggcgctaaggcggcaaaggcaactgcagaccaaatgcaatgcgagctaaaaagggtgcgagcgtgttctctctgtacaaccacaaatcgacatggagttccaaagttaacgatggccgtggacgacggcaaaaccaaaccagcaatcgctgctgcagcttcggttgtggccgtgttttccccaaaaaaaaactgaaactgaaactgttaccatcagccggagcaagattccgccagcctagcctgtgcagcagcagcattgcgaatttgcttgttgtgtttagaccaaactaaaacaaaataccaatcaaaatcgttcactttcaactcgatggctacaatgatgacgacctcccagcaaatgttaagtggacaatggcaaacgcacaatcatc

SEQ ID NO: 19107 - protein, 1177 aa, DROSOPHILA
MEVTFSSGGSSNASSECAIDGGTNRCRGLEPNNGTCILSQEVKDLYRSLYTASKQLDDAKRNVQSVGQLFQHEIEEKRSLLVQLCKQIIFKDYQSVGKKVREVMWRRGYYEFIAFVKKNWHKQCQDAATAQENMQKLERFLCAGIFNYKRLSARMEEIYDLDLKYLIDFSIISDGYISDMIGDTMESSHSGTHAVDKSLEAVSFALDTIHSSLLSLGDLHRYFLDFRIDSKLSISKEQVAKYYLEAFKLNPAIGMAQNQLGTLHYGQNHDLDSTYHYLYSLVCIIPFELSENNLNKLFAKHTEYLERMDPEKLDFNIEDFFARFYLIVDIFFFDKEVPDFNALCHCVLIDLRKILCSQQLRVPEPSIFKIVSILFFCLSKLKMINSPKVYSLHAFLVAACSDLMDACIVSIEQTILARAQDNERFQAEYEERFQEFDTVVRKSRNEYKNWLAAVGECERKDKKLMPRPHSLKDCSSDSRDSQHSGEEAKTQEAADGDKIGEAVSTRSSDEAKESDLKTPLSCKSKRRGMRLRRRRRKIAQSDDSSCYDSESELDTDFYSDEEDYTDLSSNFDTDFSDIDAADPGEPCGEERYAAANYSKKERKAGGGGGGGVGGVVYSDNEDVVIEEEKIVYPNEVERRSNSQEADSEELLRSFEVLQLNFKSAEDAQSKPVAPPPVSFSEPPKKLVYRNKYTKINPNIVIDCLHNEPTIRALKMLFDWLRINPEILIGCYHSNPEFVHKIMKLLNYCNIDIFTRKVYFERDLLTTANVRDSLVELFDVRANVPLTEDFAFKNFDIFQSTQITLDWETIIRERVTPQEESILRIFKMVDFGFFICKQKKFNYRFCVKTRRFTETQKKKQREEKKGGGSRRRERRTAPKTNRTKRNEGRTRRYSDRKNGIVRKSYTSNEEKDTVEECRKMPRKGYLRNRNAEKAAAVITSATGTSVAGGTSASTTTNSVIEKLNLQSSSGADEERSEAKSKKCELMGKLWLQNEVETLEEELRDSPAHVVMSPFVVVDSKALTEYNGIVKSLVRTKKCIVLIPNAVLNELDDLKKRSENVRHVIRWLEQEFKQGNRHLRAQRDNESQPLSLLKISRKMDRDASVFLQIAQFCNHLVANHADPHVSELQKSVVTYLSGDNLHEKNRQQQNFSYTGILDSIPVRYAQIQSFYAKFKANKK

SEQ ID NO: 19108 - DNA, 4691 bp, DROSOPHILA
tggtgctgctgaccttgtccacactagccacatggcgaagcattggatcgcccggctccaaatcttcatgaggatgcggaagcaaggccagcaccaattgtttaggtagtggagatgccagaaggctagccttgggcaccagcaccacttggtctagattgggagcaacaaagtcctctgcattcacgggcgtgctcttgaaagttattttatatgtcagcttggagacgcgctgcacaggcacatcagattggatcagttgggcgtatagctccatattggacagatcgtcgatggttaacagcgtttgcatcacggagcacacattgtaaaactccaagcgtttggtcttcataaaatcgccgaacacactattatttgcgctcaaatcctggtttgtgttcgcctctatcatctcgttacttggcggataatatggcaattcccgcatcatggataaaagtctggaggggattttcattggtttggtgatgtatgtgtgtacatacatgcaaactaaatactcactgctgttgtttttcctctgggttgcattgtttgactttgtcgtcgtcgttgaccattccatgtgtgcataaaacaaacgtagttttattcttttcctgccatttatatcttttacgagctattttcgatagctgccgatctatctgaaatcttcagtaatatagtctcctatttactagcttttcactttaaatacttactaatttcaaatcctctgtttggtgcattttttggttccttaaggtaaggtaagtgtaaatgggaaaaaaatcgaggaaaacggcgcggcttttcagataataacaaatttgcagaatttccagttccgttagttttttaaggcgcacaaatctcattaaagctcgcgcactttcatattgatcttcattcatcgatatatgccggcgatagttattctgctgggcagcattgttcaagcgaaaactgggtgagtaccatcgctaatccagagatttgtttacaaaataaaattggcggaaatggccgattcagattcgaatgaggtcctaattgaggaaatagacagcaacgatgtgccggaaaacgaattggagcagttccaggagacagagccgctgcgcgtggtagacatcatcgactgcgatacagacggcgaacggcgctgcatcgctgatgacgaggaggagggtgcgctgattaagcgctacgtgcagggtgttcagtgcctagagttcccggacttctgcaccaagctggaggccagcgacgaggatgaggagggcaatgatgaggagcccagtgaggcggccggcagcatcgagaagccgaacacttcggcgcaagcgaaaacgtcacaggaacagtcgacgggaagtggtcgttctggaggaggtggctttcggaaaagccaactaagcaccgccctgcaaggactgatgggcgaggccaatctgagctttgtgtacggccgctatgaaacagccgagcgcatctgcatggagatcatccgacagaatccactggccagtgaaccgttttacacgctggccgagatttatgagaaccgtgatgaggtcaagttcctgaacttctccacattggcggcccacttgaatccccaggaccgagacatgtggatacgtgtctccgatctgctggtgcagcagggcaacttggcccgtgcgcgtctcatctacacgaaggccatcaaaatgctgcccaaagtgtaccagcttcggctgcgtaaggcgcagctgttgcaaaaaatgggcgaaaccaatgcctccatgtttacgtacttgaaaatgctgccactgatgcccccagatgagtggaaaatgtgcctgaatacggccaagaacgtagcccgatactttcatgtgctggagaagcactcgcttgccctagaggccatggagggggcgtacagtgtgtgtggtgcgcgattcaccctggaggatataaacatctacttggaactgctgatcctaaataaacagtatgccaaggttctgcggtgcctgcgagagcgcaccaattttgagctggagaacgaccaagaggagagtctggaacttatatacttctgcgagatcccagatgactatgtccccgagctgcgggccaagctctgcgtcagtctcatccacatgcgggcccaccatttgctgggctatcttatccagaatgtccaagagcacatcacattgacggcggatagagtcgagctatacatggacatcaccgaggctttgatgcaggagcacaagtatgccgaagccattgcgctgatgagtcccataaccgatggcgacaccgtagagtgtccggcattcgtgtggctgcggcaggccgagtgtcttcgccagctgaaccgaaccaacgaggccattcagagctacgagaaggtagtgcaactggcgcccttctgctacgacgcgcggttcaccctctccgctctgctaaaacagcaaggccggcacgaggaggctgtccaggcattggagcaaccgggagaggctgagggccagcctcttattgcccgcctgctgtatgagagatgtgtaatgctacagcagattgggcgcattgaggagttcttggatgtgggatatgccctgctcagtcggcactccatcaagttgtacaaccgcgaggagatgatggcggccgcaaatggaggcagtgcttacaattcggagagcctcaagaccatcatccaaatgaggagcaaggcggttgacaactctgcggagcaggatcttcaggtgagaaatgcgcacaataattaatatttgttaaatgtaaaccaatttccttgaaggatcctgctaaaaatgccgccagcgaaacctccgatctgaccgtcaaagatgaatttgagctctttcgggagcttgtgcgtacggctttcaagcatggcatgcacagcgccgctgagaagatctgctttgccatggttacaacaaaaagattcacctactaccatcacgagatcgagagaattatggtactaacctgctactacaacgacgactgtgccatagccttctcgtatctgcgtgagctgatcgccaaacagcccagccagacaacgctgtggaacatgctatctctgatgattcaaaagggtgacgaagtgcgttattatcgctatatgcgccgcctgatgcaacgacatccggtcgataccaagccgatgcgaatattccagggccattatcacctcaactgcgcatcttttaagtatgctctaaacatctacatgcccattctgcgcgagaatcccgatcccctggtggccctctgcatagccgttgcctttaaccagctgtcgctgcagaagaaggtgctccgcaagtcggcttctgtggcccaagccgtggcctttggccagcgctacaaggagttacgatctgccggccatgagttagcagattgcgccgcacagcaggagatcttttacaacatcggacgtatctatcaccaagccaacatccttcacctggccgtggactactatgaaaaggcactggccgtgcccgtgcatccacttatcgcagagcatgaatctacgcttggtctgcagcatgaagtggcattcaacctgcacctcatctaccgagccaatggaaacaagtggaaggcacggcaatatttaatgcgatactgtgtggtttaatcagcggcgtgaattatttgttactcgactgttagttttaattattgtaaatatatttctttattttcacgttaaacacaagtgccatttcgctttcgacagctaaatttttttctaaaacagaaagcacaaattgattttattgaaattttacattcttgtaaatcccgcgatcccatttccatgaatttaggaaacacaatcgattttaaaaactggacgcgatgtacgcgactaaagtgactgtttagtaatgaaatcaagcggtggtcatgtgccatatttataacgctaacaatataatgaaggggaattccattatattattatatttcaattgcagccgatttcaagcttgtaaaagttgtcattacattgacttctgttaaggtatataaccaatagattaacgatgatagtagtacattaccacttatctaatggctagaatggagcttactcatcccaaggtgtttgttgatctttgggaagcggactagaaagctttaagtgatcaaggggaaattcatcgaaagatccctaatcaattattgaagtaagcacaatgtgttgtaatttcttgtttaagtacttacatatgaataattataaatatacagtctcaaaaaaaaaaaaacatgattacagtttctcaaacgaactttattaagaaagaggagtaagattgtagtaaggagtaaggattgtgatgaacaattgtaacagcaccttagcaagccggcatggcgcaagagcgtgatttgaccaggcgcttggagcacggctgtccaccattctggggctcggtgacaacgtagcgccggctttcagagactccgacaccacagctaacgctgcagggcgaccagacggaccaatctgacaggacgcaggccctgggctgatccactcttgaggaatacggcgacctaagcacattgcacgtattcaggcagtcgttctccgtgaggaagttgtttcggttgccacggcatcctcc

SEQ ID NO: 19109 - DNA, 2635 bp, DROSOPHILA
atttgtttacaaaataaaattggcggaaatggccgattcagattcgaatgaggtcctaattgaggaaatagacagcaacgatgtgccggaaaacgaattggagcagttccaggagacagagccgctgcgcgtggtagacatcatcgactgcgatacagacggcgaacggcgctgcatcgctgatgacgaggaggagggtgcgctgattaagcgctacgtgcagggtgttcagtgcctagagttcccggacttctgcaccaagctggaggccagcgacgaggatgaggagggcaatgatgaggagcccagtgaggcggccggcagcatcgagaagccgaacacttcggcgcaagcgaaaacgtcacaggaacagtcgacgggaagtggtcgttctggaggaggtggctttcggaaaagccaactaagcaccgccctgcaaggactgatgggcgaggccaatctgagctttgtgtacggccgctatgaaacagccgagcgcatctgcatggagatcatccgacagaatccactggccagtgaaccgttttacacgctggccgagatttatgagaaccgtgatgaggtcaagttcctgaacttctccacattggcggcccacttgaatccccaggaccgagacatgtggatacgtgtctccgatctgctggtgcagcagggcaacttggcccgtgcgcgtctcatctacacgaaggccatcaaaatgctgcccaaagtgtaccagcttcggctgcgtaaggcgcagctgttgcaaaaaatgggcgaaaccaatgcctccatgtttacgtacttgaaaatgctgccactgatgcccccagatgagtggaaaatgtgcctgaatacggccaagaacgtagcccgatactttcatgtgctggagaagcactcgcttgccctagaggccatggagggggcgtacagtgtgtgtggtgcgcgattcaccctggaggatataaacatctacttggaactgctgatcctaaataaacagtatgccaaggttctgcggtgcctgcgagagcgcaccaattttgagctggagaacgaccaagaggagagtctggaacttatatacttctgcgagatcccagatgactatgtccccgagctgcgggccaagctctgcgtcagtctcatccacatgcgggcccaccatttgctgggctatcttatccagaatgtccaagagcacatcacattgacggcggatagagtcgagctatacatggacatcaccgaggctttgatgcaggagcacaagtatgccgaagccattgcgctgatgagtcccataaccgatggcgacaccgtagagtgtccggcattcgtgtggctgcggcaggccgagtgtcttcgccagctgaaccgaaccaacgaggccattcagagctacgagaaggtagtgcaactggcgcccttctgctacgacgcgcggttcaccctctccgctctgctaaaacagcaaggccggcacgaggaggctgtccaggcattggagcaaccgggagaggctgagggccagcctcttattgcccgcctgctgtatgagagatgtgtaatgctacagcagattgggcgcattgaggagttcttggatgtgggatatgccctgctcagtcggcactccatcaagttgtacaaccgcgaggagatgatggcggccgcaaatggaggcagtgcttacaattcggagagcctcaagaccatcatccaaatgaggagcaaggcggttgacaactctgcggagcaggatcttcaggatcctgctaaaaatgccgccagcgaaacctccgatctgaccgtcaaagatgaatttgagctctttcgggagcttgtgcgtacggctttcaagcatggcatgcacagcgccgctgagaagatctgctttgccatggttacaacaaaaagattcacctactaccatcacgagatcgagagaattatggtactaacctgctactacaacgacgactgtgccatagccttctcgtatctgcgtgagctgatcgccaaacagcccagccagacaacgctgtggaacatgctatctctgatgattcaaaagggtgacgaagtgcgttattatcgctatatgcgccgcctgatgcaacgacatccggtcgataccaagccgatgcgaatattccagggccattatcacctcaactgcgcatcttttaagtatgctctaaacatctacatgcccattctgcgcgagaatcccgatcccctggtggccctctgcatagccgttgcctttaaccagctgtcgctgcagaagaaggtgctccgcaagtcggcttctgtggcccaagccgtggcctttggccagcgctacaaggagttacgatctgccggccatgagttagcagattgcgccgcacagcaggagatcttttacaacatcggacgtatctatcaccaagccaacatccttcacctggccgtggactactatgaaaaggcactggccgtgcccgtgcatccacttatcgcagagcatgaatctacgcttggtctgcagcatgaagtggcattcaacctgcacctcatctaccgagccaatggaaacaagtggaaggcacggcaatatttaatgcgatactgtgtggtttaa

SEQ ID NO: 19110 - protein, 868 aa, DROSOPHILA
MADSDSNEVLIEEIDSNDVPENELEQFQETEPLRVVDIIDCDTDGERRCIADDEEEGALIKRYVQGVQCLEFPDFCTKLEASDEDEEGNDEEPSEAAGSIEKPNTSAQAKTSQEQSTGSGRSGGGGFRKSQLSTALQGLMGEANLSFVYGRYETAERICMEIIRQNPLASEPFYTLAEIYENRDEVKFLNFSTLAAHLNPQDRDMWIRVSDLLVQQGNLARARLIYTKAIKMLPKVYQLRLRKAQLLQKMGETNASMFTYLKMLPLMPPDEWKMCLNTAKNVARYFHVLEKHSLALEAMEGAYSVCGARFTLEDINIYLELLILNKQYAKVLRCLRERTNFELENDQEESLELIYFCEIPDDYVPELRAKLCVSLIHMRAHHLLGYLIQNVQEHITLTADRVELYMDITEALMQEHKYAEAIALMSPITDGDTVECPAFVWLRQAECLRQLNRTNEAIQSYEKVVQLAPFCYDARFTLSALLKQQGRHEEAVQALEQPGEAEGQPLIARLLYERCVMLQQIGRIEEFLDVGYALLSRHSIKLYNREEMMAAANGGSAYNSESLKTIIQMRSKAVDNSAEQDLQDPAKNAASETSDLTVKDEFELFRELVRTAFKHGMHSAAEKICFAMVTTKRFTYYHHEIERIMVLTCYYNDDCAIAFSYLRELIAKQPSQTTLWNMLSLMIQKGDEVRYYRYMRRLMQRHPVDTKPMRIFQGHYHLNCASFKYALNIYMPILRENPDPLVALCIAVAFNQLSLQKKVLRKSASVAQAVAFGQRYKELRSAGHELADCAAQQEIFYNIGRIYHQANILHLAVDYYEKALAVPVHPLIAEHESTLGLQHEVAFNLHLIYRANGNKWKARQYLMRYCVV

SEQ ID NO: 19111 - DNA, 6962 bp, DROSOPHILA
aattctttgctatataaattccaaacagaaataactcgttttagatattatactgcggaaaaaattggattctgattgtatgacggaatctgggtagacaaaaatttaattgaaagtatttcaaaactattatacaaaatagttataaatcaatctaaatattactatatgtatacacccctatgtattgtgtacgctatttgtacgaattacaaaccacaaaacgtgacaaactcaatctaattggaaggaaaagtagcacacaaaaaccacaaaagaaaaaaaccccttcaataaaaatctattaaacattttaaactgtgtgtttgatttcacgaggaaagtgaagagtatataccattaaatgtcctgtttttccagttctgatatgtcaaccaaaagctgttttaatgaaaaccataataaaacaacatttttttgtggttgggcgctttattattcaaacaaaatgtaacataactttcaattttggaaacatttagaatgacgtagaattttgttgacatatgtgcggcactttcctttattttgtaatgggaaattgcattggtgaaccacaagagagagtttttagggactgcattaaaatgtaagttttatatatatatatatgtataccatatactttgttcttgcgaagaggatcacgcggattgcctagtcagaagcgtgaaaatttaaataaactctgtctgcaaaaccgagaacgaaacacaactgcaggaaagatcaagagtttttggatccatagtccagcccgacacaggaaatgcgaaatcttgaatacgacatggtacatcaagcaaataaccgattagaaggtcgatccgtcctggtcgccgtcattccgctctcccaactgttccacgaagatcttctgtccgtgaaccgctcaggtcatgcctgtcgttatcttgaaaagttgttcgattgattgatattttttttttacgatttttttctcttaagaatttttgttgatgattgtgcgtttgccattgtccacttaacatttgctgggaggtcgtcatcattgtagccatcgagttgaaagtgaacgattttgattggtattttgttttagtttggtctaaacacaacaagcaaattcgcaatgctgctgctgcacaggctaggctggcggaatcttgctccggctgatggtaacagtttcagtttcagtttttttttggggaaaacacggccacaaccgaagctgcagcagcgattgctggtttggttttgccgtcgtccacggccatcgttaactttggaactccatgtcgatttgtggttgtacagagagaacacgctcgcaccctttttagctcgcattgcatttggtctgcagttgcctttgccgccttagcgcccgctaccgttgccgctccacttgggcccgttcattttttgttggccttaaattttgcgtagaagctctggatttgggcatagcgtacgggtatcgagtcaaggatgccggtgtagctgaagttctgttgctggcggttcttctcgtgcaaattatcgccggacaagtacgtgacgacgctcttctgcagttcgctgacgtgcggatcggcatggttggccaccaagtgattgcagaactgggcaatttgaaggaaaactgaggcgtcacgatctataagtagcaataaaaaaaaacaacacaacaccattagctggctaattctcgtgcgataaatatttgctaaactcacccatcttgcgtgatatcttcagcagggatagcggctgactttcgttatcgcgctgggcacgcaagtgcctattgccctgtttaaactcctgctccagccaacggatgacatggcgcacattctcgctgcgtttcttcaagtcatccaactcattgagcactaaatgagaaatgataatagattagcatggggtctttctccttgggtacaggttaagtacattcttaattgtaaatacactttactataaaaacaattggaaagaaaacaacaggcaaatcaaatgagctaccgtcatatcagaagtgttaagaatctaatctgttctactataaaagctcactggatttcagggaataccacaaagtaataagcttgttgatatgagattgtatagattatttaaattttgaagttctaaagtcgtcattctatgtcattgttactttccactttgttatcaacccacgcggaggtatgcgcactcacctgcatttggaatgaggacaatgcacttcttggtcctcaccagcgacttgactatgccattgtattcggtcaatgccttcgaatcgaccaccacaaatggggacatcaccacatgagcgggactgtcccgcagctcctcctccaaagtctccacctcgttttgcagccacagcttgcccatgagctcacacttcttcgacttggcctccgagcgctcttcgtcggcccccgagctggactgcaaattcagtttctcgatgacactgtttgtggttgtggaggcggaggttccgccggcgacagaggttcccgtggcactggttataacagcagccgccttctcggcattgcgattccttaggtaacccttgcgtggcatcttgcggcactcctccacggtgtccttttcctcgttactggtgtagctcttgcggacgatgccgttcttgcgatcggagtagcgacgtgtgcgtccttcgttccgctttgttcggttggtcttcggagcggtacgacgctcgcggcgacgtgatccgcctcccttcttctcctcgcgctgtttcttcttttgggtctcggtgaaacgacgcgtcttgacgcagaatctgtagttaaacttcttctgcttgcaaatgaaaaagccaaagtcgaccattttgaaaatacggagaatggactcttcctggggagtgacacgctcccggataatggtctcccagtccagtgtaatctgggtgctctggaagatgtcaaagttcttgaaagcaaagtcctcggtgagcggaacgttggcgcgcacatcgaataactcgaccagagaatcacgcacgttggcagtggtcagaaggtcgcgctcgaagtaaaccttcctggtgaagatgtcgatgttgcagtagttgagaagcttcatgatcttgtgcacaaactccggattcgagtggtagcagccgatgagaatctctgggttgattcgcagccagtcaaaaagcattttcagggctctaatggtcggttcattgtgcagacagtcaatgactatgttgggattgatcttggtgtacttgttgcgataaaccagcttctttggtggctctgaaaagctgacgggcggaggtgccaccggcttgctttgagcatcctctgcgctcttaaagttcagctgcagtacctcaaagctgcgcagcaactcctcagagtccgcctcctgtgagttggatctgcgctctacttcgttgggatacacgattttctcctcctcaataacaacgtcttcgttgtcggagtacaccacgccaccgactcctcctccgccgccgccgccagctttgcgctcctttttgctgtaattagctgttaggatttgtaagattttagaaaaaagtgtaaaaaggttttccaacttaagccttttgcttagatggaaattgggtttcaaagactcacctgctgcatagcgctcttcgccgcatggctccccaggatcagctgcatcaatgtcgctgaaatcggtgtcaaagttagaacttagatctgtgtaatcctcctcgtcgctgtaaaagtctgtgtccagttcgctttcgctgtcatagcaggagctgtcgtccgactgggcgatcttgcggcgtcggcggcgtagacgcattccccgtcgcttgctcttgcaggagagcggggtcttaaggtcggactccttggcctcgtcactggagcgcgtggaaacggcctcaccgatcttgtcgccgtcagcagcctcctgggtctttgcctcctcgccagagtgctggctgtcccgcgaatccgaactgcaatcctttagagagtgcgggcgtggcatcaacttcttgtccttgcgctcacattcgcctactgcagctagccagttcttgtactcattccgggacttgcgcaccacagtatcgaactcctgaaagcgttcctcgtactccgcctggaagcgctcgttgtcttgggcgcgagccaggattgtctgctcgatgctgacgatgcaggcgtccatcagatcggaacaggcagcaaccagaaaggcgtgcagcgagtaaacctttggtgagttgatcatcttaagcttggacagacagaagaacagaatggagacaatcttgaagatgcttggctccggaacgcgcagctgctgggagcacaggatcttgcgtagatcaatcagcacacagtggcacagagcgttaaagtccggcacttccttgtcgaagaaaaatatgtccacaatcagatagaaacgggcaaagaagtcctcgatgttgaagtctagtttttctggatccatacgctctaggtattcggtgtgcttggcgaacagcttgttaagattattttcgcttagttcgaatggtatgatgcacacaagggagtacaagtagtggtaagtggagtccaggtcatgattctgtccgtagtgcagtgtacccaactggttctgggccatgccaatggccggattaagcttgaaggcctccagataatacttggccacctgctccttgcttatgcttagtttgctgtcgatgcgaaagtctagaaagtagcgatgaagatcgcccagactgagcagcgatgagtgtatggtgtcgagtgcaaaggacacggcctccagactcttgtccaccgcgtgggtgcccgagtgcgatgactccatggtgtctccgatcatgtcgcttatgtagccatcactgattatggagaaatcaatcaaatactttagatccagatcatagatctcttccatgcgtgccgacaatcgtttgtagttgaagatgccagcgcagaggaatcgctccagcttttgcatgttctcttgggccgtggccgcatcctggcactgcttgtgccagttcttcttcacgaaggcaatgaactcgtagtatccacgtcgccacatcacctcgcgcaccttcttgcccaccgactggtagtccttgaagatgatctgcttgcacagctgcactaggagcgagcgtttctcttcgatttcgtgctggaacagctgtcccaccgactgcacattcctcttggcatcgtccagttgcttggaggcggtgtagagggatctgtatggacgatttgatgcgatttatagtaatccacctgtaacactcactttaacaccttacctgtaaagatcctttacctcctggctgaggatgcaggttccattgttgggctccaagccgcgacagcgattcgtgccgccgtctatggcgcactcgctggaggcgttcgatgatccgcccgagctgaatgtcacctccattgttcgaggtactgaaacatacaaattaccaagcatatcatatgagagttctgaaaagctacagtaaacacagctgccaactgaggagatacagtaaacacccactagatagttgaatgttccagctgttccttgactttcgtttttctgctgacgaattgtttttcgaaataaaatagcgtactttattgttgttattgtattgtttttgtttcaactggtgacgcacacaaacacatgcgcattgcgtagtttcgttttattgaataatcaattgaacacacacacagatactttttgcttttgcctttttgcttttctctgctctggtattttcgatactgcagcaattgcgattgcgaaaaaaaactatgcgatgcgctgctgcgctgcgttatttggatgcacttttgccagcagcgctcaggtagaatcaaatgacgtccatcaactgtttacctgcgcgatttgcattaccttttatgcggatttagttgctctgtttggtgtgtcgttctgcaaatttcacgttttcgctcttcctttgttaaacaacaagatggcgcatgcacggtcagactgcgcagtccgcaatgctcatgcaatgttcgatttttttctttggcgggtaattcagaagggctggaacaatggctgctaaatagcaggcaacaatatgtggaatgtgttaggtaaaattggtcgcatttagtgtaaatttgttgatttcaatgcctaaatagcatcatgcagagctgtttcgcctcagtcttttcagtgctggaaaactcgctgtcggtatcgctgtaggtatcgattgttgtctcatcggcgggttattcgaattactcgacattttacatttcgaatgtaaaaagggtataagttttgtctgtaatttacaatggcaataaaatagaatcaaaattaattcctcttatacttaaatattgacaatattaattctcttgcttgaattttggtgctttatttgggtcacatataaacgaaagaaataaaaaagtaaaaaatgcaatatttagcaaataaataaaatgtgtgaaaggagcaatggccaccaacttatgtttttttctgtacccaaagggagataagtgcccattagtttattttcatcacaagttttatcaccttttattgacttagtctttttttcgttgcgtcttcaataatatttgccaaatgtgaggaaatgtgtcaggcatattaatgatcttccaaacatcggcttatcttcgcgcctacctggccgagaaccccagacggattggaaacatcagacgcgactaagccgatctcgcattaaaaataaataatgctcgagtttatcgaccatttctctcggcgacattaagtcgtttggtcactcgattagcgttgggcacgtcgaggggcagatagcccaagtcactctaaaa

SEQ ID NO: 19112 - DNA, 4122 bp, DROSOPHILA
atttgattctacctgagcgctgctggcaaaagtgcatccaaataacgcagcgcagcagcgcatcgcatagttttttttcgcaatcgcaattgctgcagtatcgaaaataccagagcagagaaaagcaaaaaggcaaaagcaaaaagtatctgttacctcgaacaatggaggtgacattcagctcgggcggatcatcgaacgcctccagcgagtgcgccatagacggcggcacgaatcgctgtcgcggcttggagcccaacaatggaacctgcatcctcagccaggaggtaaaggatctttacagatccctctacaccgcctccaagcaactggacgatgccaagaggaatgtgcagtcggtgggacagctgttccagcacgaaatcgaagagaaacgctcgctcctagtgcagctgtgcaagcagatcatcttcaaggactaccagtcggtgggcaagaaggtgcgcgaggtgatgtggcgacgtggatactacgagttcattgccttcgtgaagaagaactggcacaagcagtgccaggatgcggccacggcccaagagaacatgcaaaagctggagcgattcctctgcgctggcatcttcaactacaaacgattgtcggcacgcatggaagagatctatgatctggatctaaagtatttgattgatttctccataatcagtgatggctacataagcgacatgatcggagacaccatggagtcatcgcactcgggcacccacgcggtggacaagagtctggaggccgtgtcctttgcactcgacaccatacactcatcgctgctcagtctgggcgatcttcatcgctactttctagactttcgcatcgacagcaaactaagcataagcaaggagcaggtggccaagtattatctggaggccttcaagcttaatccggccattggcatggcccagaaccagttgggtacactgcactacggacagaatcatgacctggactccacttaccactacttgtactcccttgtgtgcatcataccattcgaactaagcgaaaataatcttaacaagctgttcgccaagcacaccgaatacctagagcgtatggatccagaaaaactagacttcaacatcgaggacttctttgcccgtttctatctgattgtggacatatttttcttcgacaaggaagtgccggactttaacgctctgtgccactgtgtgctgattgatctacgcaagatcctgtgctcccagcagctgcgcgttccggagccaagcatcttcaagattgtctccattctgttcttctgtctgtccaagcttaagatgatcaactcaccaaaggtttactcgctgcacgcctttctggttgctgcctgttccgatctgatggacgcctgcatcgtcagcatcgagcagacaatcctggctcgcgcccaagacaacgagcgcttccaggcggagtacgaggaacgctttcaggagttcgatactgtggtgcgcaagtcccggaatgagtacaagaactggctagctgcagtaggcgaatgtgagcgcaaggacaagaagttgatgccacgcccgcactctctaaaggattgcagttcggattcgcgggacagccagcactctggcgaggaggcaaagacccaggaggctgctgacggcgacaagatcggtgaggccgtttccacgcgctccagtgacgaggccaaggagtccgaccttaagaccccgctctcctgcaagagcaagcgacggggaatgcgtctacgccgccgacgccgcaagatcgcccagtcggacgacagctcctgctatgacagcgaaagcgaactggacacagacttttacagcgacgaggaggattacacagatctaagttctaactttgacaccgatttcagcgacattgatgcagctgatcctggggagccatgcggcgaagagcgctatgcagcagctaattacagcaaaaaggagcgcaaagctggcggcggcggcggaggaggagtcggtggcgtggtgtactccgacaacgaagacgttgttattgaggaggagaaaatcgtgtatcccaacgaagtagagcgcagatccaactcacaggaggcggactctgaggagttgctgcgcagctttgaggtactgcagctgaactttaagagcgcagaggatgctcaaagcaagccggtggcacctccgcccgtcagcttttcagagccaccaaagaagctggtttatcgcaacaagtacaccaagatcaatcccaacatagtcattgactgtctgcacaatgaaccgaccattagagccctgaaaatgctttttgactggctgcgaatcaacccagagattctcatcggctgctaccactcgaatccggagtttgtgcacaagatcatgaagcttctcaactactgcaacatcgacatcttcaccaggaaggtttacttcgagcgcgaccttctgaccactgccaacgtgcgtgattctctggtcgagttattcgatgtgcgcgccaacgttccgctcaccgaggactttgctttcaagaactttgacatcttccagagcacccagattacactggactgggagaccattatccgggagcgtgtcactccccaggaagagtccattctccgtattttcaaaatggtcgactttggctttttcatttgcaagcagaagaagtttaactacagattctgcgtcaagacgcgtcgtttcaccgagacccaaaagaagaaacagcgcgaggagaagaagggaggcggatcacgtcgccgcgagcgtcgtaccgctccgaagaccaaccgaacaaagcggaacgaaggacgcacacgtcgctactccgatcgcaagaacggcatcgtccgcaagagctacaccagtaacgaggaaaaggacaccgtggaggagtgccgcaagatgccacgcaagggttacctaaggaatcgcaatgccgagaaggcggctgctgttataaccagtgccacgggaacctctgtcgccggcggaacctccgcctccacaaccacaaacagtgtcatcgagaaactgaatttgcagtccagctcgggggccgacgaagagcgctcggaggccaagtcgaagaagtgtgagctcatgggcaagctgtggctgcaaaacgaggtggagactttggaggaggagctgcgggacagtcccgctcatgtggtgatgtccccatttgtggtggtcgattcgaaggcattgaccgaatacaatggcatagtcaagtcgctggtgaggaccaagaagtgcattgtcctcattccaaatgcagtgctcaatgagttggatgacttgaagaaacgcagcgagaatgtgcgccatgtcatccgttggctggagcaggagtttaaacagggcaataggcacttgcgtgcccagcgcgataacgaaagtcagccgctatccctgctgaagatatcacgcaagatggatcgtgacgcctcagttttccttcaaattgcccagttctgcaatcacttggtggccaaccatgccgatccgcacgtcagcgaactgcagaagagcgtcgtcacgtacttgtccggcgataatttgcacgagaagaaccgccagcaacagaacttcagctacaccggcatccttgactcgatacccgtacgctatgcccaaatccagagcttctacgcaaaatttaaggccaacaaaaaatgaacgggcccaagtggagcggcaacggtagcgggcgctaaggcggcaaaggcaactgcagaccaaatgcaatgcgagctaaaaagggtgcgagcgtgttctctctgtacaaccacaaatcgacatggagttccaaagttaacgatggccgtggacgacggcaaaaccaaaccagcaatcgctgctgcagcttcggttgtggccgtgttttccccaaaaaaaaactgaaactgaaactgttaccatcagccggagcaagattccgccagcctagcctgtgcagcagcagcattgcgaatttgcttgttgtgtttagaccaaactaaaacaaaataccaatcaaaatcgttcactttcaactcgatggctacaatgatgacgacctcccagcaaatgttaagtggacaatggcaaacgcacaatcatc

SEQ ID NO: 19113 - protein, 1177 aa, DROSOPHILA; identical to SEQ ID NO: 19107

SEQ ID NO: 19114 - DNA, 2923 bp, DROSOPHILA
tattgtgctgtttaatcgccagccgtcgctgcacaagatgtccattatgtgccatcgggccaaagtgcagccgcagaggacatttcgctttaatgagtgtgcatgtacgccatataacgccgatttcgacggcgatgaaatgaatctacacttgccacaaacggaggaggccagagccgaggcactcattctgatgggcaaccagtcgaatctggtgacgccaaagaacggtgagattctaattgccgccacacaggacttcattaccggcggctatttgctcacgcaaaaggaggtctttctgaccaaggaggaggccatgcagttggccgcctgctttttggccaacgaagactcgacaatgcacataaagctgccaccacccgctcttctcaagccgcgtcgtctgtggacgggcaagcaaatgttcagcctgctaatgcgtcccaatgacgactcccaagtgcgtctcaatatggtcaacaagggtcggaactacacgcgcaacaaggatctctgcagcaatgattcctgtgagtagttgattatcaaattatcaaattacaaattacaattgcatgctaaattgtatttgctctatggacagggattcatatacgaaactcggagctgatgtgcggtgtcatggataaggccacaatgggttcgggcaccaaacagtgcatcttttacttgctgctaagagactttggcgaatcgcatgccaccaaggccatgtggcgactggcgagggttcgtatgacacgtttattttgtctgtttgtttaccttgtttttacttatttggtgtcatttgatggatttaaggggtcatagctaattgtttgaatgatttcctgaattccgaaacatgttcgaactcgatatttcattgtctacttaaactttctcacgaatttgatcgattctataatcgaattgacatagatatacatgtgctttggtttagtaaatgcttttattagtgtccgtgtcgatttcatacagcaatgcccgttttgtctgcaatgaagccgaggaaggacgagacccgtgcgtatccagatggtagccggtatgtgcattgatcctcagcgacgaatgagttgatgccaatttgttgccattgttggatggttttgttgtacagaatgagaggaccgccagagtcgccggtgcaagtggacatgtcgctaccatcgaatcctttggcacacatggtcgagtccactacaacatatttaccatagatggccacacaatccgcattgtcaatgatctcgacttgggcatacaaaagggtttccgagtagtccaggtactcatcttccgtataaccgaatccagcgattgtggccacgctgcccacataatcgatcgagtccccgtactggccgaccagttgtatggcctgaatgttggccgagaatgtcagtggttctggcagttggatcagcgagacatcgttattcaatttgtcattgtagtccggatggattatgatattgttggacgtcatgttcagggcattcgcgttaaacagatccacagtgccgaacatcaggaagatggagctcaggccatttgtacaatgggccgccgtgagcacccaggtgtccgatatgatcgatcctccgcaaagtagatcatcccaggcatctctcttcagtatgacctgccagggaaactggcccaatttcgcatcgctaccggacactatgcgattatcctgttgaaacgcaactattgaagtttacacactcaaatactgggcattggccagcgacgcggcgcaccactcactatttttatcggtgaactgttggcaggatcaaagggttggccaacaacggagatggcagccaataggactagcatcaaggatcgctcgctattcagcgccatgtcttgtctccgtctttgtgctctgtcggaagttgactttaatttcacgcttctctgttaaatgagtcaagggactcgatcgagttatcttttatctctgtattttgcgcgaatttttctttaacattgagactttctgataagattaagagctaacttagtaatttccacgtaggtcgcgctctaacactagggaatagtatctcgctaattccattgttattaataccgatttttaattacttctacgaacatgggtatttgaaaaagtaatttgtgactattgttccctcgaaacatttacttctccgcacttttttctttttgtaagtatttattgaactttgcattgccgagttttcggccattgaggagtactctttccaagggtattataatatctggctactcaataacgtattcaacgctgatttctatggacagttttcttatctgaagggagaacactaattaacttttgctgttatttcaagggtcaatcaaaattcgtgaaaagtatttcgttcgcctgcgacagatattgattgcccaaagattaaagataatttgcacgcgtattatttggaaagctatattatatatactttactttcattgggcattggataagcgcactgatagcaacctactttccagatcgcatcctactttctgcagaatcgcggcttctcatttggcatcagcgacgtaacgccgagcaagaaactgttgcagcacaaggaattgctcttgaacaatggttacgcaaagtgtaatgagtatattgaattgctcaaggcgggaaccttgcagtgccagcctggttgcacgcccgaagagaccctggagtccgtcatgctgcgggaattgtcggccatccgagagcaggctgccaagacatgcttcgccgagctgcatcccacgaacagcgcactgataatggcgctcagtggctcgaagggttcgaacatcaacatatcgcagatgattgcgtgcgtgggacagcaagccattagtg

SEQ ID NO: 19115 - DNA, 849 bp, DROSOPHILA
caaagacggagacaagacatggcgctgaatagcgagcgatccttgatgctagtcctattggctgccatctccgttgttggccaaccctttgatcctgccaacagttcaccgataaaaatagataatcgcatagtgtccggtagcgatgcgaaattgggccagtttccctggcaggtcatactgaagagagatgcctgggatgatctactttgcggaggatcgatcatatcggacacctgggtgctcacggcggcccattgtacaaatggcctgagctccatcttcctgatgttcggcactgtggatctgtttaacgcgaatgccctgaacatgacgtccaacaatatcataatccatccggactacaatgacaaattgaataacgatgtctcgctgatccaactgccagaaccactgacattctcggccaacattcaggccatacaactggtcggccagtacggggactcgatcgattatgtgggcagcgtggccacaatcgctggattcggttatacggaagatgagtacctggactactcggaaacccttttgtatgcccaagtcgagatcattgacaatgcggattgtgtggccatctatggtaaatatgttgtagtggactcgaccatgtgtgccaaaggattcgatggtagcgacatgtccacttgcaccggcgactctggcggtcctctcattctgtacaacaaaaccatccaacaatggcaacaaattggcatcaactcattcgtcgctgaggatcaatgcacataccggctaccatctggatacgcacgggtctcgtccttcctcggcttcattgcagacaaaacgggcattgctgtatga

SEQ ID NO: 19116 - protein, 276 aa, DROSOPHILA
MALNSERSLMLVLLAAISVVGQPFDPANSSPIKIDNRIVSGSDAKLGQFPWQVILKRDAWDDLLCGGSIISDTWVLTAAHCTNGLSSIFLMFGTVDLFNANALNMTSNNIIIHPDYNDKLNNDVSLIQLPEPLTFSANIQAIQLVGQYGDSIDYVGSVATIAGFGYTEDEYLDYSETLLYAQVEIIDNADCVAIYGKYVVVDSTMCAKGFDGSDMSTCTGDSGGPLILYNKTIQQWQQIGINSFVAEDQCTYRLPSGYARVSSFLGFIADKTGIAV

SEQ ID NO: 19117 - DNA, 4431 bp, DROSOPHILA
tcactttcgcttcacggactccggctcggaatccggttatgttagccgatctgtttccggatcgctgcctgtcgttggggagtgcagtttatggcgatatcctactgattaagagcgttcaaagacggtttctgtagatcatcaacacattgacggcaatttggaaaagtgggcttttgtgccctttatgcgttcgtttagttttgtttagtatatatatatatattattattattttttttttggtttttttcttgtttttgtggtttagcttccttctgttacatttatgtataaattgttttacgtggtttaaggtttttggtggggggagttgtttctgtttggttagagttttagtgttccactgtgttgtgattatctgtatttgtggaagttaaccgagtggagtgagagtcgtgtttgtttgttattcgaaaagatgtgttttctcctgcctgtctagctgtcgtattaagcgtagttgcctagattctaaatatttatgtcgtatttacaaggcatatccaaatattaaattatgtacatttgtgtgtatttatgtgtctttattccttgtcgacttttatttggccacggtttttggttgtttttcgtattatttggtggtgcatctgtcgattctctttgatttggcaacccgagcacgcttttttttttaaaacatttccattaatcagggaaatgtttgggcttgcactttaaccaaatgtctgtcaactcctgaaagatggatgtaaaatagatggttaattaaaattgaaacaatatagaacaatatagcgctgtttactgccccaatgaaagcaatgtttcagttttcaaagtgcattgtactttatttattgagttttgtgcaacttaaacataaagactgtgtgtaaaaaacaaacacacaattccccaacccaagtcacctacctacataggtgtctatatacacatacagaaataaaaaaacaacaaaaaaatacatactgccaataacaaaccacaaataaatataaataataacacacaataacacaaaatggcggccaagcgaaaccgcgatgcggatatcgtcaaacacaagttggacctacgggtgcgatttaaaaaattggttcgggctgtcattatgaatcagacttggctatccgatgaagaggagcaaggcatctcgatgaatgtgaaaaagaacgtggcattgatgcgacaaaaacgaaagcccggcatgttgaccgtagcggtacgaataacttaatttaaactgccatttagaatgataaaaatatgcaaaatcccaggacaaggcactattgcgttcaaatcccgcttacaggacgattgaggaacggaaaaagttgtgcatattaatagcaggactaaattgtttctctagaattccaccggtaaggggaaaactatgtaaaatgtatataattcaccaagatattctgtattgagcttagaaaattagagcacgcatggtgccagtactaaagtttatgtccatcaatgaaccacgtgtgataatcaaaaatggtgatatgcctatctccgtctatttcatattgaatggtgaagtcgagatgaaaaagaacacaaacaataaggtaagtttcaagaataataaagggtaaattaaatctgcataaaccatttatggttaggcagtaaaactagaagacgccgttgcggaagctatttttggtccaggagattgtttcggagacgtagaaatggttgaggaatgcccaagaatgaacacatatctagccctgtgtaagaactgaattttagttatatttgagtataggaaccaataatttcctctagctagttgtgaagttttatcgatatacgatattgactatgagcgcatcctgaagccacatatgttgaaacaatggaacgaaaagaagcttgcgctaaaagcatttgattattttgattttttaactccggatcaggttagtctagttgtacgaaatcgtataatgcttaacgtttttcgtacatcgatagataattctagcttgcaagtactcgtacttggttcaatatgagcccctagagaccatttatatgggggatacggactctttgggttacgtgcgatttgttcttagcggagagtgtgtaattttacagtgtttaagtatgaaggtgagtacaacattgcaatttaaactgctagatatatacaggattaattcctttttcacctaggtcaccaataccgaaggagaggttaactacgagctgaccgaaataaataaggatgatggtcttgaaatgtttcagtcttggaaagacgttacaagtcgtaactcgttcctggacatacaggacattttggcctcgtccacctcctctgaggaagttgaaggtggtacaaagaagaaacaagcggtacctagcactttataattgttcattcatatctcgtcactaatgatcattgcatagatgcgcaaaatgggtctagctgaaattcaaaagttttgtggccttcggacctctaacacaccatctcgaaaaaaaacaaagccgagaagaaccttgtcaacggcggcacaggctagaaaaactcaattaatacaatcgctgcgacgcggaactccttggatgccaagtgtaatgcctaatgatgacgatgacgatgacgacgacgacgacggtcatattgatgaagattatatgggctatggcgaagatctctatgatgaagttgacacagacgatagctcatatgattccaattcctcgagttcctctgtctccatggatcgtacacttgtgcaagtgcagcttaaaccgcacagcgcaggaagctcgccgtccgagaagaaagtgtccagttcatcgtcagaaatatttacggcgagttcggtgatcaatgaaaagagtttagtagacgagagtcccaaaccaattaaagtaggtatttagtttagcatgtgtaagtttgctaaagtattcgaacaatattccacgtagatgttttatcaaaagctctgcattatatttatcaactttaacctttgcaggagcccgttgagactcattttatagacgtaggctcgctgacctacggtagtgtttttggcctaggcgaaaagatggagcatcgtgtgataatggcacgtactgttgttcaatgcctgctccttccgcgcttttggctcctcgaagaggaacagaatccgggtaacatttggcaccgccgtcgtttctacttcgagtgcaatgtgccgtcgcgtcaggacttgtttaccaactttctgaagacccggcagtggaacaaattccgtcacgactacattgaaagcctgctagatcgcgaggagaagggtaacattaccaaggaggaagatataccaattatgtgccgtatcgtggagactagcgatgatgctacataattaggtggagaacgtaggttctaatcaaaattctccgtttcttgattgctttaactaaataaagctgacctttaaattgtgtgtaatacaaaagaaactgttgattttatttcgattggcacagcaattattgtagaatttattttactcattgtagtaagttgtttatcaatgcactttctgcaacgggcttaccagccaatttgtgttcttatagtatgtgcatgcgctctttctatgtcattctaagaatttaggttaactgtttatccgaatcgggagctctgcctcgaaacgggactgccgagtagtcggtggcactgcattcgggaatgaaactggagcacagctgagcgctaggccgaagtgggacgaaacacccacataaaggtaatgggcgctatcgagagagcgggagagtaagaccacgttctaatccgctctccacgctccacgctctacgcagctgatccgaggacacacgaagcgcatttcttggccttcggatgtggaatcattgcaagctgagccttttaataggaattgagagtgaaaaacattggcgaaagcagatgataagccgtgaggcaatacactggaaaaaacgagtgcaatttgtgtgctaacttctgcttagacggtgcctcaacaaggattctatatgcaaatatgaaaaggctttcaatattaatctaaaaataatcaaggcagagtttggttatgttacatttgaaatctttgtccttaacatgaaatagtattggatcccccagcttagcataattttattttgaattttagtagaagagaaagccatttctcttttctttctctgattttcactcacttttctccagagtgagtgggtctcagtgcgcagtaacataacatacatacgtcacagagacctcagcgcccgcccacacacatattttttagcaccagtgcagttgtgttgatgcagcggggtcatgcgtgctagtatgcgtatctattgcat

SEQ ID NO: 19118 - DNA, 1443 bp, DROSOPHILA
gccaataacaaaccacaaataaatataaataataacacacaataacacaaaatggcggccaagcgaaaccgcgatgcggatatcgtcaaacacaagttggacctacgggtgcgatttaaaaaattggttcgggctgtcattatgaatcagacttggctatccgatgaagaggagcaaggcatctcgatgaatgtgaaaaagaacgtggcattgatgcgacaaaaacgaaagcccggcatgttgaccgtagcggacaaggcactattgcgttcaaatcccgcttacaggacgattgaggaacggaaaaagttgtgcatattaatagcaggactaaattgtttctctagaattccaccgaaaattagagcacgcatggtgccagtactaaagtttatgtccatcaatgaaccacgtgcagtaaaactagaagacgccgttgcggaagctatttttggtccaggagattgtttcggagacgtagaaatggttgaggaatgcccaagaatgaacacatatctagccctgtctagttgtgaagttttatcgatatacgatattgactatgagcgcatcctgaagccacatatgttgaaacaatggaacgaaaagaagcttgcgctaaaagcatttgattattttgattttttaactccggatcaggtcaccaataccgaaggagaggttaactacgagctgaccgaaataaataaggatgatggtcttgaaatgtttcagtcttggaaagacgttacaagtcgtaactcgttcctggacatacaggacattttggcctcgtccacctcctctgaggaagttgaaggtgattatatgggctatggcgaagatctctatgatgaagttgacacagacgatagctcatatgattccaattcctcgagttcctctgtctccatggatcgtacacttgtgcaagtgcagcttaaaccgcacagcgcaggaagctcgccgtccgagaagaaagtgtccagttcatcgtcagaaatatttacggcgagttcggtgatcaatgaaaagagtttagtagacgagagtcccaaaccaattaaagagcccgttgagactcattttatagacgtaggctcgctgacctacggtagtgtttttggcctaggcgaaaagatggagcatcgtgtgataatggcacgtactgttgttcaatgcctgctccttccgcgcttttggctcctcgaagaggaacagaatccgggtaacatttggcaccgccgtcgtttctacttcgagtgcaatgtgccgtcgcgtcaggacttgtttaccaactttctgaagacccggcagtggaacaaattccgtcacgactacattgaaagcctgctagatcgcgaggagaagggtaacattaccaaggaggaagatataccaattatgtgccgtatcgtggagactagcgatgatgctacataa

SEQ ID NO: 19119 - protein, 463 aa, DROSOPHILA
MAAKRNRDADIVKHKLDLRVRFKKLVRAVIMNQTWLSDEEEQGISMNVKKNVALMRQKRKPGMLTVADKALLRSNPAYRTIEERKKLCILIAGLNCFSRIPPKIRARMVPVLKFMSINEPRAVKLEDAVAEAIFGPGDCFGDVEMVEECPRMNTYLALSSCEVLSIYDIDYERILKPHMLKQWNEKKLALKAFDYFDFLTPDQVTNTEGEVNYELTEINKDDGLEMFQSWKDVTSRNSFLDIQDILASSTSSEEVEGDYMGYGEDLYDEVDTDDSSYDSNSSSSSVSMDRTLVQVQLKPHSAGSSPSEKKVSSSSSEIFTASSVINEKSLVDESPKPIKEPVETHFIDVGSLTYGSVFGLGEKMEHRVIMARTVVQCLLLPRFWLLEEEQNPGNIWHRRRFYFECNVPSRQDLFTNFLKTRQWNKFRHDYIESLLDREEKGNITKEEDIPIMCRIVETSDDAT

SEQ ID NO: 19120 - DNA, 3584 bp, DROSOPHILA
aagtgtccattcagcgattcctatccctcccgagttatgagcatgccaagcgatgtatgctggttttcacagtgctcctcatcttcctactcagctgctgcagttacatgggcctggtgtcctatgccgtctatcacgactgtgatcccataagtactaaggtaattaaaaaatattaaaaacattttgtcagtcgtcaaatttagtccatactaatatttacttacaatatttatgtgtcagttagcggctgccgtcgaccaactgccatctctgctaatgatgcgaacgctgggctctttacctggattaccaggactctttgtgtctggcgtattcagcgctgccctgagctcactttccacgggtctcaactcgctggcatgtgtcattactcaggatatcgtaagacccttgctgaaagtaccgatgaccgagcgccagacggctttttggttgcgggcaattgtcgttgtttgcggattttgctgcctgggaatggtcaacgtcgtggagaagctgggacaagtggttccactggctacgagcacagcggcggtttcgatgggtcctttattgggcatttattgcatgggcgtgggtttgccttgggtaaaaggaaaggtaagtcttatgatttcttatatttaatttatttaataatgtttaataactttgcagagcgttctcctgggcagtgtagtgtcctttttggtattgtcgtggatttgtatcaaggcgcagttggctcaaatgcatggagagattcgttatcccaaacttcccgtatcggtggatggctgtgactatgatttcgataatcaaacagttcacgaaacaatccacgagtacaggtaagtatgggaaatcttagttcagctaattaatataattgtattgtatattttagaccttcggagcgaaacatctatcacttgtcattcctgtggtatacagcattgggcgggtttatttgcactgtggtttcagtgttggctggattcgttttcggttgggaggatctcaataaaatggatccagccttgattacgccctgtatgcggcgttttttgcccaataaaaactatgaggctgttaaaatgcaggatctctttaagcgcaaggacgaaattgagtcccaataagcgttgtcaataaaacatgtactctctgttctgcaaatctgtttttaaattaattatttatgaatgtgtccaagcatgtttcatttattaaatgcatcctgtaaataaccatgaatcatatgtataaaatttcgttcttgtttctgtttgaattcgtttatcttagtacttcgaaagacgtttcgatcgacgagttcggatctttggttcctgcctctttgtggtgatgaatgtgagttaattagcaagaaaatagtggtagattattttaaaataatattttaagatcttgtggcaacccatttgcatatatgtcccggctctgacgctaaatcaaggtaactataattcttgagatatcattttattctattttatatatattatacttgttggctagtttccgggataagtgtcagcaagattgtgcccgtgacaagttttatttgtattctatacaccagcgtggtaagtaatatcgtcaaggaagtcccatattacaaagtgtgattacttacatcttttccagggtggaattaagggtgttgtgtggacggatgtcattcagggcaccgtaatgatcggatccatgctcatagtcatcataaagggcactttggatttgggtggcttgagcgttgttctggatcataatcgtcagtacgatcgcctggtgggtccagagtaagtacttctcatatagtacttaaatatatattttaattaaataaataaactttagcatgacctttgatccaactgcaagaatgggcgtatttgccttgtttgttggtggcgccctgttcaaattgcaggcaaatggtataaatcaggctattgtccagcgttacttaactttgcccaacaataaggacgtaaagaaggctttagttctatcactaattggctttatgtttgtgatgttgatgtgcgtttatatcggattgctggcatttgctgagttctatcattgcgatcccattacaacgggggtaagataaaataaaatcccaatgtgtcgattatattactatcttatgttctcattgcagttagctcgtgccaaggatcaagtcatacccctctatgtggtcaaaaacgttggccatattcccggtctggttggactatttgtagctggagttttcagtgccgccctaagttcactttctacggctctgaactctctttccggagtgatactcacagactttgtggaaccctttaggaagaagccgttgaccgaacggcaaaccgcctatttgttgagaggagtggtcatatcttttggcctgatctcgatggccagtgtaccgattgtccagagacttggcctggtcatgcagctatcctcaacagtggcggccataacttgtggcccactccttggagcctttagtgtgggcatgctactgccatttgttaagacagaggtttgattgaacttaaattaattgaagggaaaatactaaagaaaatatgtacatatatttttagagtcttctcacaggaatctcctgcgcctctagttttactgcctacattgtggtgcgggctcaaattgccattttcacaggatctctcacttttccagcaaaaccagtttccatacaagactgtgactatacttttgatctacctgcgaattggaatgccacaaccacggcgtatgtacttgttccacgtggttaaattgtattggacctttgtttacctaaagtatttctttctatacagaaccccaactgaatctaccagtcatggcattcatgagatctcatttttgtggtacaccgcagttggttctgtgggtactgtacttggatctctgctggccactctctatttcggacgacaagatccgcgagtggtggataaggaacttatcagccctgtcctgcggaaattctggtatggaaaatacgaaagtgtggccagtgaagagaaaaacaattttaatcttcacgagtcggaaactcagctcaaattggagcagccttgaaaaggcttagggataataattatattttactataatcccgtaaatacatttaccgcctttgcaaaaccaaaacatcgtagtttctttttagttatatgaatctgttttgtacctaatcttaatcgaatgcttaagtttgattttttttagctaactattataatcagccttcaactgggtctgttctatgatcagcaattcttgacgaatccttacttatacacactcactctttcagtattttgagaggcgttttagccggcgaatgcgattgtttggagctagcttatttgttctcaaagcggtaagtacaagtaaaaaacacaaaaaaaatcttaacttatatgattttactatcttagattatttggcttcccattgccgtttatgttcccgctttgaccttcaatcaagtgtccggaattggtattcatatc

SEQ ID NO: 19121 - DNA, 1019 bp, DROSOPHILA
attcgttttcggttgggaggatctcaataaaatggatccagccttgattacgccctgtatgcggcgttttttgcccaataaaaactatgaggctgttaaaatgcaggatctctttaagcgcaaggacgaaattgagtcccaataagcgttgtcaataaaacatgtactctctacgtttcgatcgacgagttcggatctttggttcctgcctctttgtggtgatgaatggtggaattaagggtgttgtgtggacggatgtcattcagggcaccgtaatgatcggatccatgctcatagtcatcataaagggcactttggatttgggtggcttgagcgttgttctggatcataatcgtcagtacgatcgcctggtgggtccagacatgacctttgatccaactgcaagaatgggcgtatttgccttgtttgttggtggcgccctgttcaaattgcaggcaaatggtataaatcaggctattgtccagcgttacttaactttgcccaacaataaggacgtaaagaaggctttagttctatcactaattggctttatgtttgtgatgttgatgtgcgtttatatcggattgctggcatttgctgagttctatcattgcgatcccattacaacggggttagctcgtgccaaggatcaagtcatacccctctatgtggtcaaaaacgttggccatattcccggtctggttggactatttgtagctggagttttcagtgccgccctaagttcactttctacggctctgaactctctttccggagtgatactcacagactttgtggaaccctttaggaagaagccgttgaccgaacggcaaaccgcctatttgttgagaggagtggtcatatcttttggcctgatctcgatggccagtgtaccgattgtccagagacttggcctggtcatgcagctatcctcaacagtggcggccataacttgtggcccactccttggagcctttagtgtgggcatgctactgccatttgttaagacagaggtttga

SEQ ID NO: 19122 - protein, 285 aa, DROSOPHILA
MYSLRFDRRVRIFGSCLFVVMNGGIKGVVWTDVIQGTVMIGSMLIVIIKGTLDLGGLSVVLDHNRQYDRLVGPDMTFDPTARMGVFALFVGGALFKLQANGINQAIVQRYLTLPNNKDVKKALVLSLIGFMFVMLMCVYIGLLAFAEFYHCDPITTGLARAKDQVIPLYVVKNVGHIPGLVGLFVAGVFSAALSSLSTALNSLSGVILTDFVEPFRKKPLTERQTAYLLRGVVISFGLISMASVPIVQRLGLVMQLSSTVAAITCGPLLGAFSVGMLLPFVKTEV

SEQ ID NO: 19123 - DNA, 4156 bp, DROSOPHILA
catggaaacaaatcaaagtccattgactccttccagctgcaatcctcagtgcagagatccagaccactaatgcccaccacccaatcgggagaaggaccaaacatggacaccagcgataccttagggtgcttgcgatccacccggaacttggatgaggtgttctggttgacattcgggtaccacaacccagcggccttaatcagggtgcgcaacttgggcccgttcgcgcgcagctccgtttctagagcagccggagaaccccactccgccagagagcggaatccggcggtggctatgtggttctcgccccagaaggagaagttggactcgtgcgaagcaccaatcacgtcagagaagtgtgttaaccagatggcgaacggataatccttgggatgggtttcgtttgaccagattccctcgaaaacgaactgaaattggaatgacagtaaggtggagctcggaaaaatacgcggtcttctctgacttacgctgtatttggcttcatcgcaggcgcagcattccttttgagcagcagctgcatcaggctttcgttcgcaaatcacagtggataggttgccatcgtcggcgaaccaggctctcggaccctcgtagaccattgctgacaaagagacacagccagaacccgactccggagccacccacattacctggacttctgttttgggcaggtcgtccgcctcggaaaccgtgttcacgcatctgtcgttgaactgggtcagggagtcactaaacagctggaagcggcccactcgccggggactagctgcctgtggacgacgggcgccagtgtgtgcctccgcagtaatggtaaagtgggtgaaatgctgaactttcaagtgagtccgggatccaagtagaagtactaccaaatttttttaaattcaaaattcgattaaaaaaactacgtatcgattaaagggaatcgatgccatcactggcactagcactgttatcgacaaatttatgtacctatagttgtctcgctctttcagccctctttttaagacgacgcgcgattgtaatttgttaatattattaagtctttagtcctgtgatttttataatgtctaagtttctggacatgctatcggggagccagtgcgtcagcctggaaaagtgcggcgatgtggtggtctcaaccaacgactgtatgattgcactttactgccacttctgccgtgacctcttcacacaactgccggagttcttaagacacctccaaagcaaccattcggatgtgctgcacttcaccaaggagcacaacgtttacagcgtggaggagctgttgtccggtgagcagggtaaagcccacgaggacgcccagtcggcggggcacaacagcagcagcggtgactctagttcactgatgaattcagaggattctagggccatcgaaggctcagaagataactcagacaatagcccaatgaaacgtaagaatgtgatggcatatcgttataaagtattattattaatattatcattattatcccacagctgaacaaatagggaaacagagtgaaataaacctgctagcggaagtgacaaacattttattgcaaaccaacgacaaggaattaaaacccgaaaatggcgtattcaacagaccacgcaaaaaggctaataacgagagcagttctttgaagatatgcgatctgaagagtcacactattgcaaggacttcgcgaaagcgaatgagcatggtaaagaaccgcatcctgcgagtccttgacagcgatttgtctgcaaagcttgaaattaaacctccagagcccaactccaaactttctataactgagcccatccaagaagacaacatacctggaacatgttttgacactcctacaaagcccataccgagctcatctcaattaagtgtaagaaagtcttctttaacagaggcaaaccaaatatgtaccaaatatgccgagaagaaaacggcgcctaccatgcctaagctactgaactgtgtaccaaagcccatattaactagtcaacaagctcatactaatgccgagataagtgagataaatgaaacctatcacctagcagctagtcaagtgacaaaaaccacgaaaacatttcccgtaaaaataacacaaatagatattttacaaccagttaagttacctaaaactttaataacaccaatcaatgaagagggtgtcagtgaccaagtggagaatagcacgaataatataaacaatgcccaaagtctgccgaaagaaaacacaaaaaagttttttaaaaagcgtagcgaattagggataaaagctcaaggcagtcccaacaaattttttaaaataataaagtccaaggcaaaccccattattgtaaaacgggtgcagaccaccagtgccaaagctagtacaaacaaaatccaaatacgatctaatgacaaaactaattgttttgcttctgagtttaacagcacaaagatccgcaagttaaagatggaaaattgcgtcgacctaaaatcggaagatccctgcgccaatacaaatacgcgtttaaacaaattggcaacaataagcagttgcgaaatattaaaagcggttggagtaagcacttgatacgaatcattgcacatttcacatctcatatcttaatccattttagttgccggcaatcacagataacccgatcgaggatacattattgccagacgagttagaaacgatccgaaaaaaggcagatcaattcatcaaaatctacaggaagtacgattctatttggaattatagaaaaatttgtccgccagcgaaaccggactttatttctcaacagatatttgctttaaccagagaagttaacaagacaatgttatgcaacctggcgaacagcgatataaaaggcattattaatcagatttcagtttggcattacaatatatatacccaatatattgacttggataccatttcggaaaatgcccgatatactttaaagctattctcgtttttacctgttagttttgcttacttttgcaaatgttgcgacgatattttcatcttaaagaaagagtacttaaagcatttgatttctcaccaagttcggtttcagtgcacaaaatgcattaaagtattcaagtacaagggatactatgaaaagcatttgcgaaacgctcattcttaagccacaatgtgtcatttagtcatggttacatatattttttctaaccctacataaagttatgtatttattaaataaaaaggaattccgaaaagctaatgctaaccaatttgtcaataaatgttatattttgattttaataaatttttctaataaatcaaaacgttttataaactaaatgctttaaagtttctttatcactacaaaaagattaggtacaaattaacacagaaagcgttatcaaaatagcaactggactgacaagatggacaacatcaccatctgctctggattctcttatcatttcgatggcttttgtttttagttctcgaatgaccccgatgattacaaaaccaactagctaccttcccgacttacaattatacgtcttgccgggcacatagccgttgggtccatcggccacaattaatttgtatccattgtcgccgcgtgtgcgtcgaccgtggttcaagtgggtgggcgcccggggacatgcggtgaccatactaattgtcagccagatcacaacgatgaggcggatgagcagcggcagcgattgccccatctccagtgctttatttcccgcgttatcacttgactcgattacaaagctcaactgcagcaacgaccgtttccagcgaggctcaaaaacagactaatcaagccggagaggcgatagagctatcttcaagtcgagcgaccgacccgatgccggatgcttcgggaactctgattacaagcattactcgcgagatggtcttgactttcatccattggctcctccaataattcctctttactctcgtgtcttttctattccgtatatatttcatggtataaattttgccgtacaatttacaaataatattacaattatatatttccatatcatcggtaacagagctcactatcgtagtttgtagttcataaatttgtaggtttgctttccgctcccgaaatagtgtgaatcgtgaggattcgccttaggaaactcaacattggt

SEQ ID NO: 19124 - DNA, 2034 bp, DROSOPHILA
ctcgctctttcagccctctttttaagacgacgcgcgattgtaatttgttaatattattaagtctttagtcctgtgatttttataatgtctaagtttctggacatgctatcggggagccagtgcgtcagcctggaaaagtgcggcgatgtggtggtctcaaccaacgactgtatgattgcactttactgccacttctgccgtgacctcttcacacaactgccggagttcttaagacacctccaaagcaaccattcggatgtgctgcacttcaccaaggagcacaacgtttacagcgtggaggagctgttgtccggtgagcagggtaaagcccacgaggacgcccagtcggcggggcacaacagcagcagcggtgactctagttcactgatgaattcagaggattctagggccatcgaaggctcagaagataactcagacaatagcccaatgaaacctgaacaaatagggaaacagagtgaaataaacctgctagcggaagtgacaaacattttattgcaaaccaacgacaaggaattaaaacccgaaaatggcgtattcaacagaccacgcaaaaaggctaataacgagagcagttctttgaagatatgcgatctgaagagtcacactattgcaaggacttcgcgaaagcgaatgagcatggtaaagaaccgcatcctgcgagtccttgacagcgatttgtctgcaaagcttgaaattaaacctccagagcccaactccaaactttctataactgagcccatccaagaagacaacatacctggaacatgttttgacactcctacaaagcccataccgagctcatctcaattaagtgtaagaaagtcttctttaacagaggcaaaccaaatatgtaccaaatatgccgagaagaaaacggcgcctaccatgcctaagctactgaactgtgtaccaaagcccatattaactagtcaacaagctcatactaatgccgagataagtgagataaatgaaacctatcacctagcagctagtcaagtgacaaaaaccacgaaaacatttcccgtaaaaataacacaaatagatattttacaaccagttaagttacctaaaactttaataacaccaatcaatgaagagggtgtcagtgaccaagtggagaatagcacgaataatataaacaatgcccaaagtctgccgaaagaaaacacaaaaaagttttttaaaaagcgtagcgaattagggataaaagctcaaggcagtcccaacaaattttttaaaataataaagtccaaggcaaaccccattattgtaaaacgggtgcagaccaccagtgccaaagctagtacaaacaaaatccaaatacgatctaatgacaaaactaattgttttgcttctgagtttaacagcacaaagatccgcaagttaaagatggaaaattgcgtcgacctaaaatcggaagatccctgcgccaatacaaatacgcgtttaaacaaattggcaacaataagcagttgcgaaatattaaaagcggttggattgccggcaatcacagataacccgatcgaggatacattattgccagacgagttagaaacgatccgaaaaaaggcagatcaattcatcaaaatctacaggaagtacgattctatttggaattatagaaaaatttgtccgccagcgaaaccggactttatttctcaacagatatttgctttaaccagagaagttaacaagacaatgttatgcaacctggcgaacagcgatataaaaggcattattaatcagatttcagtttggcattacaatatatatacccaatatattgacttggataccatttcggaaaatgcccgatatactttaaagctattctcgtttttacctgttagttttgcttacttttgcaaatgttgcgacgatattttcatcttaaagaaagagtacttaaagcatttgatttctcaccaagttcggtttcagtgcacaaaatgcattaaagtattcaagtacaagggatactatgaaaagcatttgcgaaacgctcattcttaa

SEQ ID NO: 19125 - protein, 649 aa, DROSOPHILA
MSKFLDMLSGSQCVSLEKCGDVVVSTNDCMIALYCHFCRDLFTQLPEFLRHLQSNHSDVLHFTKEHNVYSVEELLSGEQGKAHEDAQSAGHNSSSGDSSSLMNSEDSRAIEGSEDNSDNSPMKPEQIGKQSEINLLAEVTNILLQTNDKELKPENGVFNRPRKKANNESSSLKICDLKSHTIARTSRKRMSMVKNRILRVLDSDLSAKLEIKPPEPNSKLSITEPIQEDNIPGTCFDTPTKPIPSSSQLSVRKSSLTEANQICTKYAEKKTAPTMPKLLNCVPKPILTSQQAHTNAEISEINETYHLAASQVTKTTKTFPVKITQIDILQPVKLPKTLITPINEEGVSDQVENSTNNINNAQSLPKENTKKFFKKRSELGIKAQGSPNKFFKIIKSKANPIIVKRVQTTSAKASTNKIQIRSNDKTNCFASEFNSTKIRKLKMENCVDLKSEDPCANTNTRLNKLATISSCEILKAVGLPAITDNPIEDTLLPDELETIRKKADQFIKIYRKYDSIWNYRKICPPAKPDFISQQIFALTREVNKTMLCNLANSDIKGIINQISVWHYNIYTQYIDLDTISENARYTLKLFSFLPVSFAYFCKCCDDIFILKKEYLKHLISHQVRFQCTKCIKVFKYKGYYEKHLRNAHS

SEQ ID NO: 19126 - DNA, 2872 bp, DROSOPHILA
acaaatgatggcaaattgctggggccgcagctggtgccggacttttgggatgcactgtgtgcggaaaatcgaagccagaaagcaaaaagtcgccgcagcggccaatgaggttgtttcaactgaggtctttctcaaaactttgctcagcttctcctcggggattcccctttttaccagagttttttttttttttttgtgacagcagcagagcgcattttaagcaggtgaaaagcgaaagaaaacttttagttttcttaatgagtgtggtactttggctattgattaaatggaggttgctgccagctgttctcccatcttctttttctgctgtccaacatattttagccatttttatggcccagcctgctttttggttcacattcaaattcaattgactgggcgtggcacgtgctacagggtacatatctatccatctatatctatatctactagtgagtgtgtggatgcctcctacggcatatttattccctttttttggttcgattgcctggcaggaaatttatttatattcaatttgtgaatttatgccactttttctgccggggaagatggcgacaatgccgggggaaattcactttggtgcagttgcatcaatggggcaggaagcaggctatgtgagaagtgcactaggcgaaaatgtgtcggggattcggggctcgggggcaaacttgatgggcttactgagagctaaacgagtggatattctgataagaggatttcgaagagattctaaggagcagattgttgaaaaatatatttaaaaatgatttagataatattatgccaatgaaatattggtagatggaaggatgaatagtaaagcataagaacccaaaagactaacttcttgattatatgcacgaattttgatattaagatgaagtgaaacttattgacatgcaataagaatgaagatacttttacttgcaatatttgtttatggaagagaagcagttacaatgtagcattggaagtatagtcatacaaatgtggacttcattttagcttgaaatttctcgctgtgccgcacaggacctttgttagcatcttgctcagacttgccgttccgtggaaggaaacttaatgctgtatttacggccacagatgcagatacttctgctgatggtccgttcgttgcctgtcgttgaggtcgataccgaatggatatattttccgcaaaatcataaacacatttggtcgctgccgttctggctgattacctaatctgaaggactaaatgctaaatgtaccattacctggtagtttcctaaggtacagttctatcccgtgaaaaaccagcggtacctactggtctacctagccatccaacagaaggtacttaggtagaggaaggttatctgggtatagtatatatagtgcgatttggctgggaatccttcattccgtcgatgtacttccacagcgatagtcagccccgaatcgtcgtccgttgagagcgtgagtttttgagtctgtgatagttagacccagtgccaagtgcccaggatgttattcctagcgccgcgcaaacatctgtttgccaccaacctgatcatcctgctgatgatctacttgatgcgcaagtgcctgcagctcttctgcatcatcgagaaccgcgccgttcatccggccgaggaagaggagaaggaggtcaagttgccggaaagggagatcctccagaagcgccgcggcggcttcaccatcatcccagctgccatgcaccagagcatgcacggcttcggctacggcgagggtcactaccagatctttgtggagaagaaggagcgtaacctcccaaccaaatcgcgccttaacgcggccactgctgaagtcaagctgaatcccaattagttagttgcccgcgaccaaagggaaccactgacatcccagcatgtcaatgacaatgtgccaattgagcccagcaaagcaaaatcaaacccaatccacaaatatccctctacatccaagtcttcttcaatagtctaaataatatctaatgcatggaacaacaaacacttattttgtacagtcatcaaagcgcattattggccataataaaaaatgaaaaaaaatagtttttatagtttcgttaaattccttctcttggatgtgattatgcacaaaattttcgcttagttcttattaaaatgttttacttgtagtcaattttgattgactttaaggtgatctgcaactgttctgcttacttcgatttttactttgaggcagatttctatagcgactgaaacggattttattccacttgaaaaatgatatcctgcggaggagacgtcctcgctgatcgcgtgggtgttgcagcaacattaaatggccccaaatttatcacaaagtagcagaacgcccatggagcagaagaggatgggaattggggataggcggagctggagttggaagatgggactgactggcagcagcagcaacaatgtcagacaatatgctgaagtaatttgcaaatactcttgccaaaaggggcgcaagtaaggtatatgtattaatatgccctaaattattgaattagtttaatgtggcactatatttaaattatgagcgcaattaattattagtagtacatagtttgtatttatcgtaaagctaatttacatttaataatggacgcaataacattttatatatttctcgctgtatttattattgatgtcatctattacgttaattggcattaagcgtatgttaattaggttattcattaattgtgcaactatgattggttgaattttcaatttatttggacggtgaagttcggcacctgttctatttaccttccctgagttttctgttactctatggtaataatatggctcagcattac

SEQ ID NO: 19127 - DNA, 811 bp, DROSOPHILA
tcatacaaatgtggacttcattttagcttgaaatttctcgctgtgccgcacaggacctttgttagcatcttgctcagacttgccgttccgtggaaggaaacttaatgctgtatttacggccacagatgcagatacttctgctgatggtccgttcgttgcctgtcgttgaggtcgataccgaatggatatattttccgcaaaatcataaacacatttggtcgctgccgttctggctgattacctaatctgaaggactaaatgctaaatgtaccattacctggtagtttcctaaggtacagttctatcccgtgaaaaaccagcggtacctactggtctacctagccatccaacagaaggtacttaggtagaggaaggttatctggcgatagtcagccccgaatcgtcgtccgttgagagcgtgagtttttgagtctgtgatagttagacccagtgccaagtgcccaggatgttattcctagcgccgcgcaaacatctgtttgccaccaacctgatcatcctgctgatgatctacttgatgcgcaagtgcctgcagctcttctgcatcatcgagaaccgcgccgttcatccggccgaggaagaggagaaggaggtcaagttgccggaaagggagatcctccagaagcgccgcggcggcttcaccatcatcccagctgccatgcaccagagcatgcacggcttcggctacggcgagggtcactaccagatctttgtggagaagaaggagcgtaacctcccaaccaaatcgcgccttaacgcggccactgctgaagtcaagctgaatcccaattag

SEQ ID NO: 19128 - protein, 114 aa, DROSOPHILA
MLFLAPRKHLFATNLIILLMIYLMRKCLQLFCIIENRAVHPAEEEEKEVKLPEREILQKRRGGFTIIPAAMHQSMHGFGYGEGHYQIFVEKKERNLPTKSRLNAATAEVKLNPN

SEQ ID NO: 19129 - DNA, 2498 bp, DROSOPHILA
tttagagtttggccagcccggactacaaacacttctggcaagcagacaacagtccgcaaagcggagattcatcataccgaccatgtatttgctggaggagctgcgtcagctgctgatcgccgacacgcgcaactggtttctgccaattctaaaattgactctgccatcgcttgtcgtcgtctggacactgagtatgccatatttctggcacaactgccggcaaccgggacacataacgtttccgatgtccgatcatggcgatggcattatactcatgcaaaaggatacgctagatagcgaactactagtggccagtgagatgtatgccaaagtaggggtcacagaggtggacaagactgtggatatcacgaccttcatctataactacgagtacaaaaacagtctgttatcggatgcggatattatggaggcggtcatattctcaaatgtccagatcgaggtgctcttcaacacgaagtggcctcacacagctccggatagcttggctcaggctttgaactcgctggcagtgtatgtttccatgattgttatatatcgtataaaatcctcacatgcgtctccattttcagtgccttcatcgatggcgatgcgggcatcaaggtggaactggaagtgctgcccttctcgaccatccacacgctgcaactgcatctgaatatcgatggatacgacttgatcttcgccagctgcctgagtttctgcttctgcttcatctggagcatacccctgctccacatgacgctcagtagggacggtcgctacaactacgtggaactgattgccggcatgccgactatcgtgctcatcgtggccttcctgatctacgaactattggtggtgctcctcgccctgttccccattaacatagccgtcatattctttcactgggacttgctaatggattcgaatatacacagtacgttgatcatcgtacacatataccatatgcttattactaatatgatctgcagtatactccgtctatgtcatgttcatcattgctgcgtgtgtgtttagcttgaatattttgataaccatcatgccgatctcggatatgccctttgtgtatctaaaggtactcctcgcctactcactgggcattttggtttacatagcagtgaaggaactgcggccatttacgaatcccaacacagcccacttcctattgctggacttccatccgttctatgccctgctgcacaatctaatgcgcatcgccagcatttcggagaagatctggctctgcagcgatcggcaaatttacgagaccagtgtttatgcggatcagtgcaacacgattcccaactgttgtggtgaggcatccatcaagtgtttagctagtgaccacctagtgtttctttataatcttaactattttaactatccgccgtagatgacgatgcacaggagttctaccacctgcgatacctgtgctgtgtataccttctgctcgtcgtggtttggatctcgattttcatattcctcaaatcgcatatggtgaagcgaaggccacgacaaccgaagtacttttgggatagtgagtgagttgctgtgcaggagcacatttcaaaaatcagtatataaccgacgtgtttccaaagtccggatagcaaatacgatcagaacattctgcatatcatggagcccagcgagctggagaacacctggatccatgaaaaatcgcgtgtgagcactttggaacgcaaccacattgaatcaaaagccctgcatgtggagcatttgagcgtcttttttggcctaaaagcggcaatcaagcacattgacttcatggtcaatcggtaatgataaccatatgcgaaatatccatatacattcatatatatatccatcatgttagctatcaagtcatgagcgttttcggcgccaatggaactggaaaaagtgtgctgctgaagacgattctcggcatttacacacctagttcgggacggataatcagctccaagacggttccattcaagtcgaaggatttggattcctgccatatggtgggctacagtgctcaggagtttcaaacgatgcaattgatgaccatactggagacatgggatctgatactgcgtattcgacgctccaaacagatttccttcagggcggaggccacaaagttgtgcaaaatcttcgggctgtacaaatatcgcttcaactcgctgtccatctgcagtcagggcgtactgaaaagactgagtctcggcattgccctgatgagcgatgccgagctcatcctgctggacgatcccttcacccatttggatatcgtgtcgcagcgcagcatgctgcacataatccacgatttgcgcaggcgtggtcatagcattatctatacctgcagcgacaccgcgtactccacgcccgctctacgtatggctacgctgagctatccaggaatcgcggtgattggggagcgcgaggagatgcaacagaactactactcatcgtactacatggtggagacg

SEQ ID NO: 19130 - DNA, 498 bp, DROSOPHILA
tgaaaatcgagatccaaaccacgacgagcagaaggtatacacagcacaggtatcgcaggtggtagaactcctgtgcatcgtcatctacggcggatagttaaaatagttaagattataaagaaacactaggtggtcactagctaaacacttgatggatgcctcaccacaacagttgggaatcgtgttgcactgatccgcataaacactggtctcgtaaatttgccgatcgctgcagagccagatcttctccgaaatgctggcgatgcgcattagattgtgcagcagggcatagaacggatggaagtccagcaataggaagtgggctgtgttgggattcgtaaatggccgcagttccttcactgctatgtaaaccaaaatgcccagtgagtaggcgaggagtacctttagatacacaaagggcatatccgagatcggcatgatggttatcaaaatattcaagctaaacacacacgcagcaatgatgaacatgacatagac

SEQ ID NO: 19131 - protein, 61 aa, DROSOPHILA
MPHHNSWESCCTDPHKHWSRKFADRCRARSSPKCWRCALDCAAGHRTDGSPAIGSGLCWDS

SEQ ID NO: 19132 - DNA, 5136 bp, DROSOPHILA
agttgctccagcttctttgtgtgccagcgtggtaatgccgttcggcgcgagtgctccaatggcctgtattacgatccaaagatccagacctgcaatctacccggactagtcaaatgtttcaacggggatcgcggcggttctgtgctgggagacgtcaaagcaaacgtcactttggtgcccaatggaaaggccaatggggaggtcaccacgacgccaccacaaacaaccacctgtccaccgacgacgacagtgacacccgcagtgaccaccaaaaaatcgaaacttattctcgataccgaggatgcagatgatgcccattccatcttccaagttactccgcatccactcactaacagaattgatgtgctgagatcccagcgcgattgccgtggaataaacgatggcgagtatttgacagatcccaaacattgccgtcgtttctatatgtgccataagaatcgggtcaagcgccataattgcccacggaatcagtggttcgatcgggagacgaaatcctgccaagatcgcgagttggtactgaattgcccagtcaatcggaattagacgtgttttccaatagcacatacaatatacaatggttgccatagtagcatatgtggatatcgtaaatactgttgaatgatcttggttcctggatcacaaaatatcagttaaagatatataaatcaattataaaaccattggtgaaataaaccaaagcaacattcgaaacaatgcatcatgaaaatcattttttttttttaattctaaattagaaactatctatatatgtaagtacgaaatatactaagttttgctattgcaaaatattgttattaaaaattagcaattaggctatgcatcctatctgccaatcctagtaaagaaaatcgatttttcaaaatatatatttttttttgacgattcaagataatggaaggaattacaacaaataatttggaacgaaatatgtgtgtgcactgcaagatacgtgtctcaatcaagccatgtgctgtgcgtcgtcctcattcgccttgtgggcatcggtatcgggcatggccgatggtggcattatccttccaccctctgcaatcgcatcgttgttcttctcgccgccggctggcaagttgaggggcagattaagttccctcaggaagcaagtgaagttcaccacacgacccttgttcaggaacgggatcttggggcagagctcgaaggcgtggttcacgggcagcatgtcgcagcccttgccgcatgatacgtcgatgaagttcattaggtcgcacacctcgatgtcgtcgcactcgttgcgattcagaatcgagagtatattgtcgatcagttccaaggagaatggcaggcgacatccccgcagtgccgatctcaccttaacttcgggcaggaatggctggttggtcggattgatgtgatggaagtgctccatcagatcatcccgagcattccacagggttctcttaagctcgagatgagccgccgcccgcaccgtggaccgatcgcaggcatttggttgactcttctccgccgaaaagtgccggcagaggctgatgatctcgtgatcgctgatctggttacccataatgctgatcagggcgcccttgaaactctcgaaggacacaaagacatcacgcttcttctcaagatccgtacagtccggaacacacgatcccacaaactccgccatgcgattctgcagggcactcttcaccttctccatgatcacacccacattcgcatggggaaagatctccggatggtgctccatgtacataagcgtgtactcgtccgccgagactatgtgaaaaatgaagtccttcagcgacatagtcgatccgacaaagaagttccatggcatatagtactgcggctgcttgcatgagaacctctcctggccaggcaactccaagcgtgtgcgcttcatgaactcaccaccgaggaatccggagttccgcacggcgatctcctggatttgcagcgtatcatcgcatagatagtagctaatcacaaagattcgctcgcaattcgccttgatggtcgagagcattttggcgccaaagcggagcacataacgatcgtatttgatgaactttttgaaatcggactttggcggcttcggttcgaccgatatgcaattgcccaccgaatcctcgtagctaccccatccattgtacggtggcaattgtcgttccgatctatggtcagcacaatcatcggatctggcggggatcggcagtggggtaaaatcctgtatgccatatcgctggcggtaatagttctgggtgaagggatccagttcggttatcaccaccgcacggccatacacgtttatcacactgcctatctggagatccttttccctatagtaatgaatctccttgtttccagtgttcagcggatccacgcagtagcgcacgttgcgcatgttggtgcccaggacgttcagtagcgtcatcggggtcatctgtcctggcagctggagtccttcgaactcctaccaaaaacagatatatagtattaatcataaaatatgatatttgcgaacagattttccatcataactaaaagaaagaactgttttatgcggctaataaacggatcttactacatgtgtaattttcatgttgagttttaaaaatccatttttttacaaatttttgaatcagcaaaatatgtgaaaatggcaaaaagttaaaatttgcaattttgaaaacagatcgatggtgaatttggttacgaattcaacgaggtatgacattccactttttttattgctaatgtaaaaaaacggatagtttttccttaaaaatatgtataaatatggcaaaaatacgatattatgacatgaatacgatataacttggtcaatattacagttttgcacagctaattaggttaattacctacactcttaattatatctacaggtttatagggaaattggaagatttcaaatatcaagagatccgaaactacaaaagttcaatagaaggaatcccaagaagatatcatgtaaaccaacctatctcaaacatcttgggatctgggctacaacatcccaatttactttgctaatatcgtattgtaagtcgttatggtaaataccagtaccatctatacttatttttacttactcgagctaagcgcccgcgtttaagaaaaacggttgggccgtcgcgacctgagttgcgaatgtgctgctccttgatttcgatggtatcgtcggagagatagtagcacagctccagcttgcgtacgtctccgaactcggttctatcgtcccagtacgcctggaacttgagtatttgcctatcgtacttgaggaactgggcaaacggatgattctttgggattaaattaccagatcgcggttggttttcacgctttcgttgctcctcggtgggatcgctatatgagaatggacattataaatgggtaatttccgagattcaaatatcgtttaccatggcgatttgaccggatcgggaacggttatgccgcgtttgtttaagaaagttcttgtgaacggatcgcaatcggtgatatgatactgacgatcaaatatctgaacagtctgatccacgttcagatcgatgagggacatgaactcattatcgcacggcggcgccttctggacccgctgcctatgaactacacatccctgcacaattcccgagttgtccacccggggctcgtagatctctaaagtaccatcttccagatagtagtagatcttaaccttgcgcaccagatagggcgcatggtagacctcctgaagggtttgcttgaagtaggcatggaagcacagcaccttcttgtcatacgccagccatggaggcatacggggacccgaacgtggcggatatatggaggacgccccaactgggggacagcttatgtccaccgtaacgctgcccgattccacaggagccggttgctggcgatcactcagcatgctcagaccttggacattggccagcgattgcggtttggggtaatgtcccttggatacctgttactcgcatagatgtatatctaatcccaattgatgttcaatccgaagtacttacatcgcgaaagagagtccccggaagaaggggcattccaggaatgcgcagcattgtatatattttatgtgaattattgacccgttttcgaccttttctctttggaaatattttgtatatttggtgtacgctctaaatgtaatacagagcactattgaagaaaatttaagtccagatcctgcggagcctactcttttttttatttctccaggtccgcatacttcctatttatagatttggcctcttttaaaaaatccactacgtgtacacttatcaaacgtctcccacggtttgcattaaactttacttcttattgtcaatgcataaaatagtaataaaatacaagaatactgtcaatatatcaaacaaaagttaatttgtgggtgatcaaacggaaaacgtaaaaaaaaacgaatgctagcgaaaatccatgaatgtctgatgcttgaagataacttctattttacccaatgacagtcatttcggttttttttcttttcttataaatacaatgtaaaataatatcataatgcaatggtatatgcgatggtttactattcgatacgaaaaatgtatgcttaattgtgagttagtctcgcagctctatagcttatgagatttcaaaaaatacatttctggttttaagttatattctgggaattgtttgtggtatatgtatgtgtgtatgtatgcatgtatgtatatatataatggatagctgctggatattccttttattcggagggggtgagatcgttttcaggttcgttttcgttgagaatttgagaaagcagatcgtagagtggttctaatatctttttcgctccagcattggttagatttttatagtcgaacatatcgtgatgactgatactgccgtcggtctggaccaaacccttgtcaatggccaccgtctggacgcgatacaagcccttggtcaatccattgaccacctcgttgattttggcattcttttcgcgcaacttattgggctgctggccacgcggcagtagcgactgcaagggagagatgggaatgtcgatgatttactgcg

SEQ ID NO: 19133 - DNA, 2247 bp, DROSOPHILA
atgctgcgcattcctggaatgccccttcttccggggactctctttcgcgatgtatccaagggacattaccccaaaccgcaatcgctggccaatgtccaaggtctgagcatgctgagtgatcgccagcaaccggctcctgtggaatcgggcagcgttacggtggacataagctgtcccccagttggggcgtcctccatatatccgccacgttcgggtccccgtatgcctccatggctggcgtatgacaagaaggtgctgtgcttccatgcctacttcaagcaaacccttcaggaggtctaccatgcgccctatctggtgcgcaaggttaagatctactactatctggaagatggtactttagagatctacgagccccgggtggacaactcgggaattgtgcagggatgtgtagttcataggcagcgggtccagaaggcgccgccgtgcgataatgagttcatgtccctcatcgatctgaacgtggatcagactgttcagatatttgatcgtcagtatcatatcaccgattgcgatccgttcacaagaactttcttaaacaaacgcggcataaccgttcccgatccggtcaaatcgccatgcgatcccaccgaggagcaacgaaagcgtgaaaaccaaccgcgatctggtaatttaatcccaaagaatcatccgtttgcccagttcctcaagtacgataggcaaatactcaagttccaggcgtactgggacgatagaaccgagttcggagacgtacgcaagctggagctgtgctactatctctccgacgataccatcgaaatcaaggagcagcacattcgcaactcaggtcgcgacggcccaaccgtttttcttaaacgcgggcgcttagctcgagagttcgaaggactccagctgccaggacagatgaccccgatgacgctactgaacgtcctgggcaccaacatgcgcaacgtgcgctactgcgtggatccgctgaacactggaaacaaggagattcattactatagggaaaaggatctccagataggcagtgtgataaacgtgtatggccgtgcggtggtgataaccgaactggatcccttcacccagaactattaccgccagcgatatggcatacaggattttaccccactgccgatccccgccagatccgatgattgtgctgaccatagatcggaacgacaattgccaccgtacaatggatggggtagctacgaggattcggtgggcaattgcatatcggtcgaaccgaagccgccaaagtccgatttcaaaaagttcatcaaatacgatcgttatgtgctccgctttggcgccaaaatgctctcgaccatcaaggcgaattgcgagcgaatctttgtgattagctactatctatgcgatgatacgctgcaaatccaggagatcgccgtgcggaactccggattcctcggtgtctcggcggacgagtacacgcttatgtacatggagcaccatccggagatctttccccatgcgaatgtgggtgtgatcatggagaaggtgaagagtgccctgcagaatcgcatggcggagtttgtgggatcgtgtgttccggactgtacggatcttgagaagaagcgtgatgtctttgtgtccttcgagagtttcaagggcgccctgatcagcattatgggtaaccagatcagcgatcacgagatcatcagcctctgccggcacttttcggcggagaagagtcaaccaaatgcctgcgatcggtccacggtgcgggcggcggctcatctcgagcttaagagaaccctgtggaatgctcgggatgatctgatggagcacttccatcacatcaatccgaccaaccagccattcctgcccgaagttaaggtgagatcggcactgcggggatgtcgcctgccattctccttggaactgatcgacaatatactctcgattctgaatcgcaacgagtgcgacgacatcgaggtgtgcgacctaatgaacttcatcgacgtatcatgcggcaagggctgcgacatgctgcccgtgaaccacgccttcgagctctgccccaagatcccgttcctgaacaagggtcgtgtggtgaacttcacttgcttcctgagggaacttaatctgcccctcaacttgccagccggcggcgagaagaacaacgatgcgattgcagagggtggaaggataatgccaccatcggccatgcccgataccgatgcccacaaggcgaatgaggacgacgcacagcacatggcttga

SEQ ID NO: 19134 - protein, 748 aa, DROSOPHILA
MLRIPGMPLLPGTLFRDVSKGHYPKPQSLANVQGLSMLSDRQQPAPVESGSVTVDISCPPVGASSIYPPRSGPRMPPWLAYDKKVLCFHAYFKQTLQEVYHAPYLVRKVKIYYYLEDGTLEIYEPRVDNSGIVQGCVVHRQRVQKAPPCDNEFMSLIDLNVDQTVQIFDRQYHITDCDPFTRTFLNKRGITVPDPVKSPCDPTEEQRKRENQPRSGNLIPKNHPFAQFLKYDRQILKFQAYWDDRTEFGDVRKLELCYYLSDDTIEIKEQHIRNSGRDGPTVFLKRGRLAREFEGLQLPGQMTPMTLLNVLGTNMRNVRYCVDPLNTGNKEIHYYREKDLQIGSVINVYGRAVVITELDPFTQNYYRQRYGIQDFTPLPIPARSDDCADHRSERQLPPYNGWGSYEDSVGNCISVEPKPPKSDFKKFIKYDRYVLRFGAKMLSTIKANCERIFVISYYLCDDTLQIQEIAVRNSGFLGVSADEYTLMYMEHHPEIFPHANVGVIMEKVKSALQNRMAEFVGSCVPDCTDLEKKRDVFVSFESFKGALISIMGNQISDHEIISLCRHFSAEKSQPNACDRSTVRAAAHLELKRTLWNARDDLMEHFHHINPTNQPFLPEVKVRSALRGCRLPFSLELIDNILSILNRNECDDIEVCDLMNFIDVSCGKGCDMLPVNHAFELCPKIPFLNKGRVVNFTCFLRELNLPLNLPAGGEKNNDAIAEGGRIMPPSAMPDTDAHKANEDDAQHMA

SEQ ID NO: 19135 - DNA, 3366 bp, DROSOPHILA
gagaggagtggtcatatcttttggcctgatctcgatggccagtgtaccgattgtccagagacttggcctggtcatgcagctatcctcaacagtggcggccataacttgtggcccactccttggagcctttagtgtgggcatgctactgccatttgttaagacagaggtttgattgaacttaaattaattgaagggaaaatactaaagaaaatatgtacatatatttttagagtcttctcacaggaatctcctgcgcctctagttttactgcctacattgtggtgcgggctcaaattgccattttcacaggatctctcacttttccagcaaaaccagtttccatacaagactgtgactatacttttgatctacctgcgaattggaatgccacaaccacggcgtatgtacttgttccacgtggttaaattgtattggacctttgtttacctaaagtatttctttctatacagaaccccaactgaatctaccagtcatggcattcatgagatctcatttttgtggtacaccgcagttggttctgtgggtactgtacttggatctctgctggccactctctatttcggacgacaagatccgcgagtggtggataaggaacttatcagccctgtcctgcggaaattctggtatggaaaatacgaaagtgtggccagtgaagagaaaaacaattttaatcttcacgagtcggaaactcagctcaaattggagcagccttgaaaaggcttagggataataattatattttactataatcccgtaaatacatttaccgcctttgcaaaaccaaaacatcgtagtttctttttagttatatgaatctgttttgtacctaatcttaatcgaatgcttaagtttgattttttttagctaactattataatcagccttcaactgggtctgttctatgatcagcaattcttgacgaatccttacttatacacactcactctttcagtattttgagaggcgttttagccggcgaatgcgattgtttggagctagcttatttgttctcaaagcggtaagtacaagtaaaaaacacaaaaaaaatcttaacttatatgattttactatcttagattatttggcttcccattgccgtttatgttcccgctttgaccttcaatcaagtgtccggaattggtattcatatcatcactccaatagtggtcatcatttgtactttctacacctgcgtgggcggaattaagggcgtggtctacacagatgtggttcagagcgttattatgtatggatccttgattgtgatcatgatcaagggaaccttggatttaggtggatttggaactgtgtggaggattaatcaagagggcggacgcctaaataccccggagtaagtggaaaatgagaaatatttaacatcctctaatgcatttgcatatgccctagatggagtttggatcccacagttcgactgagtgttttctccgtgtttgttggtggaactttctttaagttgcaaagcacctcgatcaaccaggcaacagttcaacgttttatgtccttgccatccctgaaagccatcaaacagaccctcttcacattctccattggactggtactgctctacatgggatgcgtctatgtgggattggtgtgctatgccacctattatgattgcgatcccatgtctacaggagtaagttcatagtttgtatattggttcggcatttcatatgacagttttcgtttagcttgcaggacgtcgggaccagctggttcccctgctagtgatgcgggtgctgggggttgtgcctggtctgccaggactctttgtctcagctgtgtttagcgcggccttgagctcgttatccaccctcctcaactctctggccgctgttatcctggaggactttgttaggccgcgcatgggaaaatcgatgaaggagaaccacgtggctctgaccatgcgagtggtggtggtaacctttggcataagctcaatttttatggtctacgtggttgaaaagctgggcatggtactgcaattgtcggcgacacttcagtcaagtttatatggaccgatgttgggcattttcacggtgggaatgctaatgccatgggtgggcgaaaaggtaagaatacacctttaaatattatgatatttaacataacatttttttatttgcagtgcgttttcataggcagcgttgcctcctttttgaccatggcctggatagcggttaatgctcaaattgccaacataacaggttccttccgacacaccaagctgccagtttccgtggacaattgtgactatgatttcgatatgaatcgttacttaaactccactttagaatagtaagtacatttcgtgtttccggtaaaaacttttatatttattaaacatcttttttaatagcgaacctcacagtggatcatctatatatcacatgtcattcctgttatacgctatgttgggagccctacttacaattataacttcaaacttggctactttcgtctacggacgtcaggatatcaagaacgttgatgagaatcttctggcaccagttgttcaacgctacttgcgaaaaaacaattactatcagagcgtggagctcaagaaagttgaggtaccaaaactcagtgaaagttccgattaagcgatttgttgagcaatgcagttgctgttaccattgcttaacagttttgttcctattgataagtatgaattagttcatacatcaacatatttcctaataattcgatagagattttgtttgttcctaaaaggtaaataaaagcttaagaggcttaaaaaagtgtaaataaatacagcagtagcttgcattcattttagattaattaaaactgtttgtttttattaaaatttttactataaaattgatgtctcaatttgctttggctgctaagactaccaattgcaaaacacgaaaagggttcccaattcatttgattcctatatacgtgcaatgcaattgggagtcttaacagatttttgtttcaggggctgcataaaagactacttctatttgcctttattctgaccagttttgcgaattaacttttgccggggaattggacaattgcggacgtaaggtggataggtcatggccggaaggcagacaatattatcctgtctgtggttagaagatctagatgagctgcttctagagacttttgaagcatgttggttctgattaaaccgcgtaggattgggggaagtacggccggaaaggtctggcatgctgtaagaagtggattgtcttgggagatcaggagcagttgcatgccttgaagacgaccgggacacctgattgctcctggcggtagactcctgatccgtactggaattgtacaaat

SEQ ID NO: 19136 - DNA, 1141 bp, DROSOPHILA
atgcgattgtttggagctagcttatttgttctcaaagcgattatttggcttcccattgccgtttatgttcccgctttgaccttcaatcaagtgtccggaattggtattcatatcatcactccaatagtggtcatcatttgtactttctacacctgcgtgggcggaattaagggcgtggtctacacagatgtggttcagagcgttattatgtatggatccttgattgtgatcatgatcaagggaaccttggatttaggtggatttggaactgtgtggaggattaatcaagagggcggacgcctaaataccccggaatggagtttggatcccacagttcgactgagtgttttctccgtgtttgttggtggaactttctttaagttgcaaagcacctcgatcaaccaggcaacagttcaacgttttatgtccttgccatccctgaaagccatcaaacagaccctcttcacattctccattggactggtactgctctacatgggatgcgtctatgtgggattggtgtgctatgccacctattatgattgcgatcccatgtctacaggacttgcaggacgtcgggaccagctggttcccctgctagtgatgcgggtgctgggggttgtgcctggtctgccaggactctttgtctcagctgtgtttagcgcggccttgagctcgttatccaccctcctcaactctctggccgctgttatcctggaggactttgttaggccgcgcatgggaaaatcgatgaaggagaaccacgtggctctgaccatgcgagtggtggtggtaacctttggcataagctcaatttttatggtctacgtggttgaaaagctgggcatggtactgcaattgtcggcgacacttcagtcaagtttatatggaccgatgttgggcattttcacggtgggaatgctaatgccatgggtgggcgaaaagtgcgttttcataggcagcgttgcctcctttttgaccatggcctggatagcggttaatgctcaaattgccaacataacaggttccttccgacacaccaagctgccagtttccgtggacaattgtgactatgatttcgatatgaatcgttacttaaactccactttagaatagtaagtacatttcgtgtttccggtaa

SEQ ID NO: 19137 - protein, 371 aa, DROSOPHILA
MRLFGASLFVLKAIIWLPIAVYVPALTFNQVSGIGIHIITPIVVIICTFYTCVGGIKGVVYTDVVQSVIMYGSLIVIMIKGTLDLGGFGTVWRINQEGGRLNTPEWSLDPTVRLSVFSVFVGGTFFKLQSTSINQATVQRFMSLPSLKAIKQTLFTFSIGLVLLYMGCVYVGLVCYATYYDCDPMSTGLAGRRDQLVPLLVMRVLGVVPGLPGLFVSAVFSAALSSLSTLLNSLAAVILEDFVRPRMGKSMKENHVALTMRVVVVTFGISSIFMVYVVEKLGMVLQLSATLQSSLYGPMLGIFTVGMLMPWVGEKCVFIGSVASFLTMAWIAVNAQIANITGSFRHTKLPVSVDNCDYDFDMNRYLNSTLE

SEQ ID NO: 19138 - DNA, 3446 bp, DROSOPHILA
gatatgatactgacgatcaaatatctgaacagtctgatccacgttcagatcgatgagggacatgaactcattatcgcacggcggcgccttctggacccgctgcctatgaactacacatccctgcacaattcccgagttgtccacccggggctcgtagatctctaaagtaccatcttccagatagtagtagatcttaaccttgcgcaccagatagggcgcatggtagacctcctgaagggtttgcttgaagtaggcatggaagcacagcaccttcttgtcatacgccagccatggaggcatacggggacccgaacgtggcggatatatggaggacgccccaactgggggacagcttatgtccaccgtaacgctgcccgattccacaggagccggttgctggcgatcactcagcatgctcagaccttggacattggccagcgattgcggtttggggtaatgtcccttggatacctgttactcgcatagatgtatatctaatcccaattgatgttcaatccgaagtacttacatcgcgaaagagagtccccggaagaaggggcattccaggaatgcgcagcattgtatatattttatgtgaattattgacccgttttcgaccttttctctttggaaatattttgtatatttggtgtacgctctaaatgtaatacagagcactattgaagaaaatttaagtccagatcctgcggagcctactcttttttttatttctccaggtccgcatacttcctatttatagatttggcctcttttaaaaaatccactacgtgtacacttatcaaacgtctcccacggtttgcattaaactttacttcttattgtcaatgcataaaatagtaataaaatacaagaatactgtcaatatatcaaacaaaagttaatttgtgggtgatcaaacggaaaacgtaaaaaaaaacgaatgctagcgaaaatccatgaatgtctgatgcttgaagataacttctattttacccaatgacagtcatttcggttttttttcttttcttataaatacaatgtaaaataatatcataatgcaatggtatatgcgatggtttactattcgatacgaaaaatgtatgcttaattgtgagttagtctcgcagctctatagcttatgagatttcaaaaaatacatttctggttttaagttatattctgggaattgtttgtggtatatgtatgtgtgtatgtatgcatgtatgtatatatataatggatagctgctggatattccttttattcggagggggtgagatcgttttcaggttcgttttcgttgagaatttgagaaagcagatcgtagagtggttctaatatctttttcgctccagcattggttagatttttatagtcgaacatatcgtgatgactgatactgccgtcggtctggaccaaacccttgtcaatggccaccgtctggacgcgatacaagcccttggtcaatccattgaccacctcgttgattttggcattcttttcgcgcaacttattgggctgctggccacgcggcagtagcgactgcaagggagagatgggaatgtcgatgatttactgcggctggctaataccacaactattgtacttacgggcaaaacgatataggcgttgggcagcttttgccggattttcgttacgttcgcgagcacaccctcggccacttcctccgcgctgttccgcacattattggtgcccacatggaggacgacgattttgggattcacattgtccagcgcaccgttttcgatgcgccacagtacgtgctcggtgcagtcgtcgcgaatgctgaagttaaggcagtgcagcggcgcaaagtacttattccaggcctccgtgtcctggacggtctcgaagatgcagtcgccgaggaatatcacatccggatccttttcgcggcaatcggagatgaaccggcgatgtatgctgtgccaacgcttgtcgccatccagatcgggcaatggggtgggcagcacacagggattcatttcgtcggcgtgctcagactcagttgcagaccaatattgagttttagttaaagattccgattcctattcctatttcgatttcgattcagttgcagtttcagcatgcggatgaatgaggcatcgtctgcggcttagtcttaccggatacttgggcgttctgctcggcttgcagtgacagcgttgcagtcgtggacaaacaattgaactgatagtcgctagcataaacaactccgtaccgttgtttactttaataaatcgtttttatggcgaagattttttttttgtttttttttttttgtgttttaggttacctcaacattaacatccgtaaatgtcgtagaattatgtggccaccctcgtgtacatggaaattgccaaggatttaaggttgaaaatttttataagtttattttaatttggtgtagaaaatctacgattttcttggtaagcgtttatgttttcgtttttagagagatggtagatgtcttggtatttttccagggctggaaagtgttgtctagcaatgttgcacttggcacagctgaaaaagatgtgggatacgttatcgaaaacgttacacggtcacatatgttactgtttgtaacgtgcattttattcaaaattgtcaaaagcgttatcgcagagaagtctgttaattattttgatctctgttgatttaagtttacaattgtgatttttaaggcatgtgcctttaagccatatgccattatttcaaggggaaaatataccaaatgaaacaagactattttttagctttttctagacagcttaaaaaatattacgatgatttataactgatttcagaaataaaaagatttgaaacataagcaagttaaattttgtacccctacacgttaaatagtaaaggactatgattcattatgaattattattgaactgcataaatagaaattataccattactttcactggcatcgcaaaactttccgtcgctaccttggcgcaacctattctgaatccagcgtgcggtcacactgcagcaatgacataacctagttattgtcaaaaaactgaagtcaattctattccttcgaaaacataaatcgtaacttgcgttaggttcgacggcatgttgaagcttaaccgtgttcgccatctgcgaacgacgtacaagcgctgtttgtccggccagtcgcagctgcagctgaatagtacggacgcagagccggcatatccggagattcaggatctgtccttcaaggcgcgcaagcagaaggatgcggccaactggcacgaggaaatccggcaggtgccgacggtggaggagaagatgatcaagatcaatatgccccgctattacggcttcaaggtggtcgacttcaacgactcgaaaatcccctacaatgcactgccgctcacgcaacattatacgcgcacagtgctcgaggatttgccatc

SEQ ID NO: 19139 - DNA, 1378 bp, DROSOPHILA
aaaatcgtagattttctacaccaaattaaaataaacttataaaaattttcaaccttaaatccttggcaatttccatgtacacgagggtggccacataattctacgacatttacggatgttaatgttgaggtaacctaaaacacaaaaaaaaaaaaacaaaaaaaaaatcttcgccataaaaacgatttattaaagtaaacaacggtacggagttgtttatgctagcgactatcagttcaattgtttgtccacgactgcaacgctgtcactgcaagccgagcagaacgcccaagtatccggtaagactaagccgcagacgatgcctcattcatccgcatgctgaaactgcaactgaatcgaaatcgaaataggaataggaatcggaatctttaactaaaactcaatattggtctgcaactgagtctgagcacgccgacgaaatgaatccctgtgtgctgcccaccccattgcccgatctggatggcgacaagcgttggcacagcatacatcgccggttcatctccgattgccgcgaaaaggatccggatgtgatattcctcggcgactgcatcttcgagaccgtccaggacacggaggcctggaataagtactttgcgccgctgcactgccttaacttcagcattcgcgacgactgcaccgagcacgtactgtggcgcatcgaaaacggtgcgctggacaatgtgaatcccaaaatcgtcgtcctccatgtgggcaccaataatgtgcggaacagcgcggaggaagtggccgagggtgtgctcgcgaacgtaacgaaaatccggcaaaagctgcccaacgcctatatcgttttgccctcgctactgccgcgtggccagcagcccaataagttgcgcgaaaagaatgccaaaatcaacgaggtggtcaatggattgaccaagggcttgtatcgcgtccagacggtggccattgacaagggtttggtccagaccgacggcagtatcagtcatcacgatatgttcgactataaaaatctaaccaatgctggagcgaaaaagatattagaaccactctacgatctgctttctcaaattctcaacgaaaacgaacctgaaaacgatctcaccccctccgaataaaaggaatatccagcagctatccattatatatatacatacatgcatacatacacacatacatataccacaaacaattcccagaatataacttaaaaccagaaatgtattttttgaaatctcataagctatagagctgcgagactaactcacaattaagcatacatttttcgtatcgaatagtaaaccatcgcatataccattgcattatgatattattttacattgtatttataagaaaagaaaaaaaaccgaaatgactg

SEQ ID NO: 19140 - protein, 225 aa, DROSOPHILA
MNPCVLPTPLPDLDGDKRWHSIHRRFISDCREKDPDVIFLGDCIFETVQDTEAWNKYFAPLHCLNFSIRDDCTEHVLWRIENGALDNVNPKIVVLHVGTNNVRNSAEEVAEGVLANVTKIRQKLPNAYIVLPSLLPRGQQPNKLREKNAKINEVVNGLTKGLYRVQTVAIDKGLVQTDGSISHHDMFDYKNLTNAGAKKILEPLYDLLSQILNENEPENDLTPSE

SEQ ID NO: 19141 - DNA, 4532 bp, DROSOPHILA
ttaatcaccagttagataagcgcgtaaaggcagagagaagatacgtcactgagtttgccgtgtgaatgaacttgttatgtttgtgtgtaagtgctctcgcatgcaattgtttcagtcacacacacagtgccttggatttgtgattgacggggaggcacaaggcccaatggaagaattaaacaaatggacttgtagagcacagaaaacgaaagcactacaggtacataagctttcacctgcacgcatatttacttacgctcgccgtttatttttaacaaatcgtcgtccttattcgtattttgttgtatgtgtaagtattgcactttatccttaatatatagttgctccggcttgttcacattgttctagcacattctaagcgaaacactaaaggcttgaaaaaatataaataatgtactaatctatgctactcattgagtagtactcaaaaaataacaaaacggaatttattcgactgtgtgaccgttttacgcgagggaaataatatcgaattatatatagggttgtcaagtggttcaaaaatgattttaatcgtaatctgaattgtaattcgatattatattgcgtgatttaagatattgagaatttgtatattcttaataagaaatacaatttacattacgattaaattaatttttgaaccgacaacaaataatatataataataaattcttatttatatattaagaatttcttattatattttaatatatattatttgttattagttattaatttgttatatatatgccaccttatatatatatgccaaatatatatctcttttccaactagatctaagattataataataccatgattttcttgtacgaaatgaagtagtttatctaatgcttattttctaaaaaacggtttagcacttattactttatttaaagtgtgaccatattgagccgtatcgatatatcacagacaacaaaggtattcactgccaggtaagttttcactagccacttgcgaccacaccgacggtgaaaaggcgaaataataaattttaacaaattgccgcagtgtaaattaaaggtgcgtagcattttacattccctttcagcggtcaccggccgtcccgcccccgcaccgtccaatttaacattttttacggccagtaaaacgtgcaatcccacccaaaatcagacacgaaattcggagcagcgcatcagagacgcagacgagaaagtgacgacgcagcaaaacgaagcaacaaaaacgaaaatcggcgacgtacacattcaacttgaacaaatttaaggtaggcattgcaatttccccaccaccacacggtagagtcggataggtcgtgtccatttcaatgggaaacaccgactgacccggctgcggaaaataaagagataaaaaaagaaaggcgacaaaccagtggtaggaaaacaaaatgtccgcaactctgtctgaatcggcgtcccgaggcttgcaaacgtaaccacgctggggaatgccctggcgaatgtgatttgtctttatttagataaactaatcctcatccattactttactctgattggtgatttgcagttttcgagtccaacgcaatgtcatgccgcgcccccttccagcccgacgatcagtatgagcagctgcgccggccgaatgtcggcggagcaggcggagtggccatgccgggactggatcagcaggcgcatctctttggggagtacgccggagcgcaggcgtacggtcaggtggttggcaattttcctgtgcaggccatgcaaccccaggcgcagactctgtccgatgcgtccaatctgtcggccacggccacaattttcatccctcgaggagctgctcccccgcagcagcagtcgcgacatcagcaataccagcaggctggtggagccggtggaggagctccttatggccaacagcagccgcgctatgtgaatggttttaagcatcaccatcagcagcaccaccagcagccgcactacaaccatcatcacaatcatcagcagaagttcaacaacgatatgcagaagctaacgaattccgtgcagaatcgcctgcacctgaatagccagcagggctcagccggcaactactatcagcagcagcaggtacaccaaaacacacaccaccaccaacaacaccagcagcagcatcagccacacaaccaacacgccaagtttcaacggcacttccacttgaataactcattccaacaaatcgtacagcaaacacagcacaaccagccgcagcagccgcaccaccagcagcacaaccaacagcagcagcagtatattcagaaccagaatcaacaaccgcagccatccacttcgactgcggcggcctcctcgtcgtcctcgaactcttcgcagccggacatggccaccatagcactggagtatcttgatacagtcatacattgccttaaccaggtgagaatttcgattgataagctatcagggcaattatgggcttcctttgatttatatttttagtgttttatgattatttaatcaattttaataggtgtcagcttaatattttctttaaatataacaatatatttaaaatcaatatatttatgctcgaaagtaaaaaaaaaaatcagctgaaacatttcagtctagtcaaacttaatcttaagttttaaacctaaatttcctactaaccagacatattaatgatctccatccagaatccgggccaatttgattcgattgcatcacgcttcctgaccattttcgatggcatggagaacaaccaattcgtgctctccatcgccatggaggacatcttcgagaagtcgatcgagcagccgaacttccggtacatgggcgccaagctgtacaacctgctgcacatgctcaactcgaagccggactcgctgttccacacgctgctcaagtgcaagcttgactaccaccaggaggaagtgaccaagtacatgcgctccaacgagcagcagaaggttcgcgagactgccctctttctggccgagctgtacatgcagttgcgcggcgacgacgactcgcgcatccagttgatcgctgtgaatattgtatattcgctgagtaagctgctggccagcgagagcaacgaaaatgttcgctgcctgtgccagaccctcaagctggctggatatgatctgacagccgattgccccaaggacatacaggagatcatcaccgccctgcaggcgatcgagctgaagtcgccgggcaagtaccccatggcggcaagtgtaattgccctgcagcagaacaactggggcaggaaggtgtcgaacgctctgggagacgatgaagatacagtgaaggagccgccgcgcctgagcgatgagcccgtcttctacggacctgatggccgcgaattgactgccgaggagaccgattttctggccggcggggataatgatggtgatgatgactttgatggggatggtgccgacctagaaatcgacgcggaaatggacgaggaaaccgagcgggcatacaaggagttctgtaagcagggcaaacagaagacctagacgactgtggagaactgtgttgcattggacggattcatgagggcgtggtcgttggcaggatatagcttgggtataggagggatggtggagagcgtaggagtggagcatttccaacaaattctcggttgtaggatcgatgattgcagttgcttggttcagaaccaattgtgattatcttttaaattattgatagcaaattgtttgtgatatcttcgtgtttcatgcacctatcataatatgacatgtgttaatgactttgttcgaacgctttttgtgtgatacgcccgttttgtatctctgataactaactctctgccatgatagccagttcattcattcagtttgtactttttaacttgaattaaataaatttgaatagtcgcgaagccaggatttcgaccgtaaacggtaaaagaaatatatatatatataactatagccactgccacgccgaagtgaaccgctgatacagacacacacgcagctgcactcaaagactcgtactcatatgcgcacccacacacttgcatggcacatatgcagacccataaacggcagaaaaaaacaaaatcgcaaatttcacattcaattaaacgacattctcttgatcatacaaatcgaaaaacgaaagaaaaaaaaacgacagcagccacgcctaatttttaaataattgtaattaatgttaacgaatccatgatttaattataaataaaatttatcgaattgcgtttaaaacaaaatcaaattgagcgattttattgaaacgggaaagaagcctgttcggttttcgaactaaaagcggttatattttcgttatttctaattatgtcgaaagagtcgagtatatgataagtgcaagcggggtttcgaacctttcggatgctatgactaaaggtattgtgttgatctattgctgctgtttgtgatgtttttaaaacaaatacatgagtgctttaaagttgctttatagctggaagaactaacaaaccttttcaacaaa

SEQ ID NO: 19142 - DNA, 1877 bp, DROSOPHILA
gaccacaccgacggtgaaaaggcgaaataataaattttaacaaattgccgcagtgtaaattaaagacacgaaattcggagcagcgcatcagagacgcagacgagaaagtgacgacgcagcaaaacgaagcaacaaaaacgaaaatcggcgacgtacacattcaacttgaacaaatttaagttttcgagtccaacgcaatgtcatgccgcgcccccttccagcccgacgatcagtatgagcagctgcgccggccgaatgtcggcggagcaggcggagtggccatgccgggactggatcagcaggcgcatctctttggggagtacgccggagcgcaggcgtacggtcaggtggttggcaattttcctgtgcaggccatgcaaccccaggcgcagactctgtccgatgcgtccaatctgtcggccacggccacaattttcatccctcgaggagctgctcccccgcagcagcagtcgcgacatcagcaataccagcaggctggtggagccggtggaggagctccttatggccaacagcagccgcgctatgtgaatggttttaagcatcaccatcagcagcaccaccagcagccgcactacaaccatcatcacaatcatcagcagaagttcaacaacgatatgcagaagctaacgaattccgtgcagaatcgcctgcacctgaatagccagcagggctcagccggcaactactatcagcagcagcaggtacaccaaaacacacaccaccaccaacaacaccagcagcagcatcagccacacaaccaacacgccaagtttcaacggcacttccacttgaataactcattccaacaaatcgtacagcaaacacagcacaaccagccgcagcagccgcaccaccagcagcacaaccaacagcagcagcagtatattcagaaccagaatcaacaaccgcagccatccacttcgactgcggcggcctcctcgtcgtcctcgaactcttcgcagccggacatggccaccatagcactggagtatcttgatacagtcatacattgccttaaccagaatccgggccaatttgattcgattgcatcacgcttcctgaccattttcgatggcatggagaacaaccaattcgtgctctccatcgccatggaggacatcttcgagaagtcgatcgagcagccgaacttccggtacatgggcgccaagctgtacaacctgctgcacatgctcaactcgaagccggactcgctgttccacacgctgctcaagtgcaagcttgactaccaccaggaggaagtgaccaagtacatgcgctccaacgagcagcagaaggttcgcgagactgccctctttctggccgagctgtacatgcagttgcgcggcgacgacgactcgcgcatccagttgatcgctgtgaatattgtatattcgctgagtaagctgctggccagcgagagcaacgaaaatgttcgctgcctgtgccagaccctcaagctggctggatatgatctgacagccgattgccccaaggacatacaggagatcatcaccgccctgcaggcgatcgagctgaagtcgccgggcaagtaccccatggcggcaagtgtaattgccctgcagcagaacaactggggcaggaaggtgtcgaacgctctgggagacgatgaagatacagtgaaggagccgccgcgcctgagcgatgagcccgtcttctacggacctgatggccgcgaattgactgccgaggagaccgattttctggccggcggggataatgatggtgatgatgactttgatggggatggtgccgacctagaaatcgacgcggaaatggacgaggaaaccgagcgggcatacaaggagttctgtaagcagggcaaacagaagacctag

SEQ ID NO: 19143 - protein, 559 aa, DROSOPHILA
MSCRAPFQPDDQYEQLRRPNVGGAGGVAMPGLDQQAHLFGEYAGAQAYGQVVGNFPVQAMQPQAQTLSDASNLSATATIFIPRGAAPPQQQSRHQQYQQAGGAGGGAPYGQQQPRYVNGFKHHHQQHHQQPHYNHHHNHQQKFNNDMQKLTNSVQNRLHLNSQQGSAGNYYQQQQVHQNTHHHQQHQQQHQPHNQHAKFQRHFHLNNSFQQIVQQTQHNQPQQPHHQQHNQQQQQYIQNQNQQPQPSTSTAAASSSSSNSSQPDMATIALEYLDTVIHCLNQNPGQFDSIASRFLTIFDGMENNQFVLSIAMEDIFEKSIEQPNFRYMGAKLYNLLHMLNSKPDSLFHTLLKCKLDYHQEEVTKYMRSNEQQKVRETALFLAELYMQLRGDDDSRIQLIAVNIVYSLSKLLASESNENVRCLCQTLKLAGYDLTADCPKDIQEIITALQAIELKSPGKYPMAASVIALQQNNWGRKVSNALGDDEDTVKEPPRLSDEPVFYGPDGRELTAEETDFLAGGDNDGDDDFDGDGADLEIDAEMDEETERAYKEFCKQGKQKT

SEQ ID NO: 19144 - DNA, 3461 bp, DROSOPHILA
aggcagacgctctataaccgcgtctcgactataccgcaattttagactgcactttccactcgtcatggacaataagcccaagattctcaagaattgctcgaatatacaactcaaaattgaattaaaatcgtatttatagacaagtagcttatattcggataaagttgagtagtagcaatgaaaattgatataaagtgctaaatttgttttccaataagtgaaaaaatgtaaccaatgtcctccatccatattcattaaaaaatttaatttaatttaatttatttatttaattaggccttaacagttcgaagaaaatctcattggtttatacttatagagctgttaaatttaatacataaaattcgaaaataaacaaatgtcaatcatcataagaaaatactattggtattcatttgtattataaaaaacgcactttttaacgtttactacttatttcaccgaaagcaaccgtaaaatgtagtaggtctttaaaaaaaagtagtaccagcgaagtcgctctcatccgacgagaaataacgggaaatactgggtgcagtacagggcgcatgtgcgaaccgtgcgccggctgccagcggtaaattagcccgatgcggcgtcagtagagttccgaaaccgaacgcggaaggttgtgccctggtcacgagatagcgttaccatcagtgggtctccttgaaaccgaatcgctcgcaagatccccgggctctgcctctgtggcaggataataaagcgtgacgcgtgtgcgtaacataaaaataaccataaaccactccgggcggagtaaatgaagtgaggtgaagtgaagcaaggggcaaacagagtccgaaacagcaactgaaactgaaacagaaaccgacgaaggcaaacggaattccttcaaaaatcggcaaataaacaagaagaaaagaagagcacacaccggttttgtgcgaaagaagcgaaggaagtacgaagtgaaatcaaaagaattctttagctcgaaatggggctgaacggaagacgacgattgttgggctgcggcctgggattcttctgcctgatcttctgctcttacggtgagttaagtcggccgactgactcatcttttcttctcattccaataactcctccactatctgccccacagccgcgccagcatcatttgaggatgtgagcatctcaaggggtccgaaatcctcgattaccatcaaggaacaaagttcgttgcaattgccctgtgactaccaactgccggatgggtatcttcagaagagcagcgtcatcctgcgctggcgaaaggatagcaaaacgttgcgtcaagtagagctgggcaggatggacagcacaacgagcgaaccacagctggaaaccatgctgcgggaggattcccgtgtggcgctgagcaaggacagtggcgccctgcaattcacaagcgtgctggccagcgatgccggtcagtatcagtgccagttggtcatcgacgactccgtggctgccagctccagcagtggggtgctcctggttattgagcaactaaagttcgtgccacagccaacctccaaaaacttggagttgggaactcttagtaaggtccactgcaaggcgcagggaacgcctgctccacaagtcaaatggatgagggtaagcattgcattcttttgaatgttcgaatcaaattaaagttgcatgatgcaacatttaatacttacatataattcaatccttccaggaaacccagctacctctccctgttaacgtaaccgatcagaatggcacgctgattttcaaccaggtcagcaacgagcaacggggtcagtacacctgcatcgcctccaatagccagggtcaaatcacggccaccgtgtccatcaatgtggtggtggccccgaagttcagtgttccgccggagggacccatcgaggtcgcagaagccggaactgccgtgatccactgccaggcaatcggagagccaaaacccaccattcaatgggacaaggatctcacctacttgaacgagaataacacggatccggaacgcttttccctaatggagaacggaactctggagatacgcaatgttcggccagaggatgagggtcgctacggctgcaccattggcagcagtgcgggcttgaagcgagaggatgttctgctggtgttgaagtcaagtaaatccgcgtccaattcaatagtgacccggattatcattgtgatcatttgcctggccttcctgtactttgtgctggtgcttggcctaaaggtgtggtaccgctatcgtcgtcacctgggcaaggtgcagctggaagatggccatgtcaatgggcccaccgatggtcaggagcacgaccatcacgaaaacgagccctgcctgacggaggccaactccagcaagaatctgaagagcaagctgagggagagcacgatactggagcaggagtcgcaggtggccgacgatattgtgtgaggagtagtgctcctgcgcctgtggagtaacctttcagccactttccatgatctcgctaaacatgcccctcgaaagttactccgttctgttgttgagaatcaaaaaggaacttgtgaaatcccccagaaatctatttgtatttatatatttatctagtttatatatatataaatattttatgtatttatgcatgtgtgtgtctctgtgtatatatcccatgtacagttattttttagtagaataaatattttatggctctcatagagccccattttatagcgcaatcgtttcaatctccttttttttgcggcggacaagcgttgtgcggggctcgtaaacttcctccgctgctccatcgtaaattggaagcccacttggcacggccgtaaagcccatggaacccggatgagtgttctgccatggctttttatgcgctttttatgacagacggagaagtttgctgcacataaaggcaaccctccctcccccctccgataaaaagtcgtaaaatagcgcgacattccagcgtttcttctttcgtttaattaaaacaatgaaagtttcttcatagcaattatagtttatcaacatgttgaatagtatatcttatatttgtgataggaaaaaggtatccttccaatgccaaattacttaacaatttgttttggattctttgactagcttgcaccatgatatgccatcctttgaggcagtgtcacccatacccatcatcttgtagggaatttccatctaaagcatatccagcgacaatttcccttcaattgccggcatctgcacttaatcgcttcatttccatgtccatttccattggcatatgctggcaatctccaattgccagtgtgctttatgcatattttatggctttttatagcgctcgaataaacagcgcacaccacacatcaaaggcgttatccaaaggcaactacacatgcgcaggttactccgccaccaggcagcagataaaaaagtaagcggcaag

SEQ ID NO: 19145 - DNA, 1302 bp, DROSOPHILA
atggggctgaacggaagacgacgattgttgggctgcggcctgggattcttctgcctgatcttctgctcttacgccgcgccagcatcatttgaggatgtgagcatctcaaggggtccgaaatcctcgattaccatcaaggaacaaagttcgttgcaattgccctgtgactaccaactgccggatgggtatcttcagaagagcagcgtcatcctgcgctggcgaaaggatagcaaaacgttgcgtcaagtagagctgggcaggatggacagcacaacgagcgaaccacagctggaaaccatgctgcgggaggattcccgtgtggcgctgagcaaggacagtggcgccctgcaattcacaagcgtgctggccagcgatgccggtcagtatcagtgccagttggtcatcgacgactccgtggctgccagctccagcagtggggtgctcctggttattgagcaactaaagttcgtgccacagccaacctccaaaaacttggagttgggaactcttagtaaggtccactgcaaggcgcagggaacgcctgctccacaagtcaaatggatgagggaaacccagctacctctccctgttaacgtaaccgatcagaatggcacgctgattttcaaccaggtcagcaacgagcaacggggtcagtacacctgcatcgcctccaatagccagggtcaaatcacggccaccgtgtccatcaatgtggtggtggccccgaagttcagtgttccgccggagggacccatcgaggtcgcagaagccggaactgccgtgatccactgccaggcaatcggagagccaaaacccaccattcaatgggacaaggatctcacctacttgaacgagaataacacggatccggaacgcttttccctaatggagaacggaactctggagatacgcaatgttcggccagaggatgagggtcgctacggctgcaccattggcagcagtgcgggcttgaagcgagaggatgttctgctggtgttgaagtcaagtaaatccgcgtccaattcaatagtgacccggattatcattgtgatcatttgcctggccttcctgtactttgtgctggtgcttggcctaaaggtgtggtaccgctatcgtcgtcacctgggcaaggtgcagctggaagatggccatgtcaatgggcccaccgatggtcaggagcacgaccatcacgaaaacgagccctgcctgacggaggccaactccagcaagaatctgaagagcaagctgagggagagcacgatactggagcaggagtcgcaggtggccgacgatattgtgtga

SEQ ID NO: 19146 - protein, 433 aa, DROSOPHILA
MGLNGRRRLLGCGLGFFCLIFCSYAAPASFEDVSISRGPKSSITIKEQSSLQLPCDYQLPDGYLQKSSVILRWRKDSKTLRQVELGRMDSTTSEPQLETMLREDSRVALSKDSGALQFTSVLASDAGQYQCQLVIDDSVAASSSSGVLLVIEQLKFVPQPTSKNLELGTLSKVHCKAQGTPAPQVKWMRETQLPLPVNVTDQNGTLIFNQVSNEQRGQYTCIASNSQGQITATVSINVVVAPKFSVPPEGPIEVAEAGTAVIHCQAIGEPKPTIQWDKDLTYLNENNTDPERFSLMENGTLEIRNVRPEDEGRYGCTIGSSAGLKREDVLLVLKSSKSASNSIVTRIIIVIICLAFLYFVLVLGLKVWYRYRRHLGKVQLEDGHVNGPTDGQEHDHHENEPCLTEANSSKNLKSKLRESTILEQESQVADDIV

SEQ ID NO: 19147 - DNA, 21708 bp, DROSOPHILA
gttgccactgccattgctgtacatgtgcatctatagatgtccccatcgtacggtaacggcccagttgaaaatcgaaatacccgacccccagaatgacagacagttatctcgaatgcagcagccactaaagttttgctgaaatttaagtgcagccagtgcatcctggcgagatttcagtctgaaaatttgaaattcgacttataaagtgcttaagctattacgccggccagcggagcagggcagcctgtttagcatttccgcttccgtttgcacagccgtttccgactggactcggtttgcatttttcatgagtcctttcgcaattcaatttagatacaagtctcagatttaaagttctgctaaatgagcaggcgaaaacaaaacaaaactctcggctcagcttttcaatttgagtagcaaaacccttttctgccgttctaaaaggatttttccaacttaggtcaagctattattttaggatgcagcaaactggatgtgattggaaaatttgttgatttttaatcttacccgagagcgacccgttgttaataaattagtaaaagggccaggcgactcggttcgataaatggcagttccggccgacggccctcgaaaagtcattccttatgacaaaaacgaaaaaaaaaacccttcgatcattatgtaaagtaagctcatttaaaagagaaaagcttatggctctgaaaattacgcatacgcagcataaatcattcgccgtaagctgccagcggaacggaggcggagggtgaaaatacctaccaggaccaggacccgaacccggaccggtcccgtccattcgccgaaatacaaattgcgtggttggctgcattaattgcggcctatttatatggacgtttgccgtggcgttcacgtgtttaacttgatttaaatacaattaaaaggaaccggagacataatccaggtgagtggcaattcgcccacttcacggcttcccattgaattgaacgagatgtgtggtcaggttgtacataattagttcttattattacaatatcttttggtttttacacgaatgttagccacaagctattcagattcatactcttatcgaagctttagttgcgggactaaagcgttaagctatagactcctttcatttgggattgttagcagatggtttctttgcattacactagggacaaagtatcttttgtagcgtaaggaaaaactaaactaatcgtaactaatcttaggatacattactcgcaggcatatttcctatttacatttcccactctaacggcttaaactacaaatgcatctttggtccaaacggtactcgatttcttttctaatttttgggtctcatcagacgatcctagtggcatactcgtcctttgtacaggttccactcccactgacccaatcgctacaggtagacaaagtgtcccagtcccttggccgggttgttgttgacggcctccgccgtgagtttggtactggtattgccgttcatgtcctgggtctccgtctccgccacaggcataagtctgccgtagactcctccggacgcaaagcgggcgttcatgtggatgtcaagcagcttcttgtccttccccagcgaggagaaggagtgcgaggcggttcgaatctcgcgtatgttgtacacggggctgtagactcgggcgggtgacacggacaccgccacttggggcacaactggagcaggagctgcgggcgtggtgtggacgtaaaagtcccggcgtagggcacattctgtggaattatccgaggagccagaactgctagcacactcgtcttcatcctcggcatcctcgctgctgctgcagcttcgcagatcctcggagagcgacagatccgactccaaggagagctccaggagactggttgcatcctctgccgcctccgcggcctgtccaattgcctcgtttaggttggccaacagctggcgccggcgtgcgtaattgggcgttcggcgcaccaggaagtgacagccttcgccccgcttcatccgctccatctgagtgcgcagtggaaggtcgtccgggtgcaattttcgctgacactcctggccgggacacacctcgtacagcgagaagttctcgaccggctcgggtgaactgtaacagccgaggagcaggtgcagcagctcgtcacaggtggtctcctcgctgatgaccagcgacttgtactgagagctgggctgcagcgcggaggtgtggacgcggatcaggccacctggttttagctgcagacagaatcgggactcgcccttcggatgacaggcctgcatgatggccggccgggtgtcgtcgtccagcaccaagatggtcttcactccagcccgacgcacagctacctccatggataggtagaacaggcgtggatcgcgatgtcgcatcttgaggctgcaatcaaatttcaatttaaatcgaattaaattgctgtccagcgacggcgaaccacaacaattcgcttaccgtcttagcagctggccaataacctccttgcttgtagtgtcccactggattccaagggtcttgtactcgatgtcgatcttcaggcagtttgtgtacaccttgattgtggtctgtgggcgggaaatgtcgcatgagtgatgggttcgccaagagcttttccttgtcggactcacctgtggcagctgctcgttgaggctggagtaactggaggccctcgagggtgttctctgcagctccgccggaggctccggactgccgcacatggagctggcgcacgaggaggcgtggctggaggagcgaagggacaccgaatcggatcgatttcgcagcggcgagatttgcacgtgcttcagcatctgcaaggggaggatgggaaaagagaatgcgggttagtcatatagtttgcggataccccgaacttttgtcttattcattatgaatgcttcctggaaaactcggagagcacttgctactctaaatgaagtggccgcatccggtttttttttttagatgggaagtacacagggaaaaattaaagcagcttgaacagccatagatgatataatatttaaatctttatattgaagtatgagaatataataaaaagataataaaatacttcctttttaaggaggaaattattaaatatactcgtaaaatccctcgataaatcgcctataaaattttagtatgcaccatgaatatgatttactcgccgtgcaggcaaatatgggggctctgtagggcaactttgttcaatccccccaatgaatgcagccactttcaggcagccgtcaacgctcattgaggcatgtaaatgaggggaaagacattgaggagagagtgtcctcagccgaagcagctctcaaagggattgcagagggctggtgggagtgataaaacagagggatgatgaagtgaaattaataaagggttcccagtctcgcagcctcacatcactgcactctccatggcggtgacaatgaggcatgaatgaacgaaatgggccgtgcatcgggtaaaattgccgcctgacatttgattgaaagccctgaaacctagaggccccgatccgcgaccctactcaataccgttgttttaccctccgttcagagatccccagccagcgaggcattgagattcattcgaggcgtgccgcattgtgaggcaattgcaagcggaagttgctgggatagccctggtccaacatccggttatgcaatccccatcgagctctctcttaatttccatatactttcctataaatacatatatacacaattcactatattgggtgggcgtctcgttctcattgcgtgccaggaaatttgcaagtatgcattaatatggaaccgagccatatttaattgaaatgtgaaaagtttgggaagctcgcagccatgattgctggcctcacatctcatccaccattaattagaaccggacccgccagtcgcagtcgctggagcaagtgaaccgcagcggaccgctggagcaatacaaactgcgaattgcgactggcggggatttggtggcactaaggggggcagtaagagcgctcaagtggtggcgtctgctgttcccgcaattagcggctaatgttgcagaatttcacgccaagttgccgcttgggtcacggcaaaattgaactctccagcccgcctacttcatcttaatcgcgagttctgggaaaatctcataaaaactacataaagttgaaagtcgcatccaagcgtcagacgacaatagaagtacacatcaattttatagaagccaattgttgttaaaaacttattttcgttatcattcaaagcagacagtttcttaactgcagagatacaaacgttatccaaaccccacgagattataaggttgcataaaaaagagcgaattgagggtcagtgaaaagcactttgctgtctccaattgcaaatcaaccaattccgatccccaaaaaaaaaaaaaatccgaaaataataaaaacaaatccaataaagttgcaaagttgaagacgagtaaaagtgacagaaggaaatcaagaatatatattttatgtgaaattgaattagaaattcgcataacaatttcaggacactctggacacggcacataagttgaaagaaaaggaacaaggatcaaggtgatggaagatggcgattcctggtgggcaggcacaaaatgttaatggcatctggattgaggtggcaaagaaagccttgtaagtggatattagttaaagatttatagccatcactgcggaacaactaggactgacctctctcattgggttttaactgagacactgtgtccccgaacttttccaattatgccatcgatagcagcgcctgaaggtgccacgcccacttgagtcgacccttaaagtgctgaaaaagtcgcataaattccacaaggagaacacagtatcgcaggagacacagagcgagacggagcagtaagtaagtaactgccagacagacattacagaacttacaactgctggcaagaaacaaaagaagcaataaaaagcagctgcagacgggagtgagtcggatgctgaaagatgctccaacttgcgaggaatgttttaatttcaacttcttggcgaggaaatcgtaaacgcttccctccaaggagatgacagcatcgcacacggctgaaaagttcttgctacttttggcacagacaaatattttcgcattcatacagattgatattaaatgaaagtaccgctctcgaactgccttaaatgatattgcattcatatatggatcgtgttttttgggctttaagcagaaagcaatcggtgaaagtggatactcacgtatccatatctaaccggcacttctagcagggcctttccgcatcaagagtcataaagcctgctaccctgacattcaacatggaatcaatgtccttgaacttgttgctgaaaagcacaaactttgtagttatatatttgaaagtttatcggcgcaggggccgtgtcctttgtcattttcacacattcgagaggcaaacgaccaaaaggattattgattgaattacaacagcagcgctgggaacaagcaaatactcgtactttcatggccagcagactagaaaaagggaccaaaaataagtcggcaagggtctgaaggaattgccgagaccaaggatacttttcgttgccaaagaacaaggaaagatactttaagtgcgaaaaaggcacggggattctctgaataactcggctgacgtgtctgataagatttgactgccatgttacgttttctttattaatcaaagacgggagccgagaggtcggatgaatagatgaatggatgaatggatggatgcgagacaaacgacgacaggctcgtagcatttgccaaatgtggccattcccctccattgtcgggctggtaaggaccaagaattgccaggatagtgaaaaatggcactctttaaaagggcctaaggaaacaggatagtatgcagcagagctctggcaaaaagtttgctgaaatcaaagcaaacacaccacgcatgtgttatcataacattttcatagagatgtcagctgttaattatgtgccgtcgtattaactcaacggttggcaatttaatgaagatttataaagtgcagcgttcgaatgcaaatagttcccgatgaaaatgaaatcaaaccggcaaataaaatgtacctggcaactggtttgactgcaaaactgactgaaaaatgacagaagtaaatatttaaacaacctgattttacacatgtgtgtgagcctacttgcatatttgatgcatctgccatatggcaggaaattcagatggtatgggtgaatatgctttcgataataaatcgcgtttgattcttttttttttttgccaaatgtaattaatgaaattgacttgcaaaagtcaattaagttgaccgttttaatggcaaattgtttattggcagtggccctttcggatgtacccactttgggccacaatgttctagctccgtttgcctcgatgggcagcgaagcatttccacagattttcttttttcatttacttagcggattcttagttgagtgattttcggtgtttcgctttacggttaatttatgcgcagccagattggaaacttcggttatatttttgtagcatttgtagccggttgtgggataatagctttatggctaaccgctaagtagcaaaattaaatggtagaattgaaagttctgatttagttgttctgatttaattcaaatggtaaacgacaaaaaaaaaaacatgaaatatgttcactcaggccaattaacaaaaacagagctgggataaaaaaaaatggcgcaaacgattttcgcagtgccaccataaaataaaagccgcaaaaagtggctgaacaaattagtttgaaaactctcgctatgtctcactaccatttataatgcaatgcttaagcggtgtatttatttatcttcggtggcataaagccgctccttaaccattttttattgccttccgctcggctttgtaagccgcttagccaaccattttttcatgccattaaaaatgtaaagaatgtacaaaactgtaaaaaaaaagtgttgcatagtaaagggcgccgtggcggggcaacgcaaaaagtcaaacaacaatatcaaaattaaatttcacttttaatcaacttttgcccgtcccgaccgtatttcagggtagaaggttaatttccgggccgattcctttaagccgttaattggcgaacgggcagatttggctttgttttacttatgctgtagcgccttttgtttctttttcaacacaaaagcgttaaaaacgcattacaccaagcggggcgttcctcattaaaatgttagccgggtaaccaagaactggctcggacttcaagagaaactaaatgggtaatgcaggatgctggatgctggatgctggatgcaggatgtggaatgcggtatgcaggtgctgcatcaaggatgccgctcaaaatagagtcaaaagggcaaaaagggcgccagtcgagcatgaagcgaaattaagagtagctctaacaacaaagaccagttgtggttgcaagttatcacgatgcggggaattaaacatccttcatttttcatacaggaccacactaggcgaaaatatttgcatcctggaataacttatttaaacgcttcagctcaatttgatatcctatgctatcctatccgattctatatgatatcctaaagaagtttaggcagagaatattttggaaactatttttttatttaatcctgagctgcatttccatatgaaatcaaaggcgactattctactttccgattctaactattatgcatttgggtttcctatatttttcgtcgttgccttcgaccaatttgtatcatcacttcgcgtctttcacagcaacaacatgctcggcctggggcgccatttcagcatatttaagcgacgtcctttggagaacacaggttcctaactacccaactacccgcccagttattatgcaaaacaagagctggtagattaacatgccagcaggcccctccatgagcgtacggggaaattatgttttggaaattatgtaagcataaagtgagaggtaagctgcagtgcccggcgggaagagcatttgttcaaggacccatgcggatgcgtccccatgtcaaagctcgcacagacaatcacacagacgcacacacacacacacacgcaagcggacaggaagcggaaacggcgacatcatcacagtgacagctgaaataatttccaattatttagagcatacttttgggcttccaattttccattagaccctctgcatgttgcatccggcgaaagtgttaaaaatttgtggtcaactaacagcagagtgacatcagtagatgcggcatttgcagcgtctttgtcacctcatcatttgcatacattgcggcatttggttcgcaattcgcacccaaatcgataattatatgggtcattcccttgccaaacgaacaactgactctttcatcaagccagatttcccagttgggtgaaatcgtatcgtagccaggaatgttgttctttttgcaattcggttaattcttgaccaaagtaatgaacggttagattaaaagccctactctagatcgtgcaactccatttaagcctgtggaattactacattgttcgccgttcttcgtatgcgccattgtttgctgtgcaaacttcgttagtcatgcttttgtaaatcattttcaagtgaaaccgaaaaggcaacttatacaatgcccgaattacaattttagcacagcagttttcccttatttttaaggcaaggatgcgggaggccagaacacacacacatgcgaagtcctggatctttccttccttccttccgttcataaattgcacattttaaaagtgtcgtaaattttgcgtaggtgagagaatcaactatgaaattgaatcgaatgcagtcgagcattggcacacacctccagaagcacgtggagtttgctctcacatccacagccacacacagacacagagcacacatatgcacagacacacacacacacacacacatggcgtccaattcgccattgcataccttagagcgaaaagttttggagcccccataaattcagctcgcagcatatgcgatgtatgggcgtagaagagaagatttagagccacgctgataattgcatatgattttcagtagactaagttatgccgcttataaatttcaatgcaattaatagcattgcaagcacatgcaataaaagcgactaggaactttaaattcctaatcaaagtgtataaaaatatgcagtgataaatcatgtttatctttcgaaatgaatgaatttgactgcaggcaatgaaacctattattatatgcttctgctttaggggatttaagaatccgtatgattcgattaattatctaaacccatataagtgtatcttcttatctactcagatagtgttaactctaacagccaatcatttaagcacagcgagtttttcgaaacgcagtgcacatcctagacgcagcaaacaggaagtgcatgtggaatttgaattgaaaggccacttcccaatcattaagagacgagaggacaggggactggggacagaacaggagcggatagaaggcgcgactcgaagcgttttccagccacttccgctggatgctcgcatccaacctgttgagtggaaacgtgttgcaagcgaaggaatttgcctgctgcataaattcttttcgatatgatttatagctgccgctgcgacgacgatggtttttgcgtcgcttatgctggaaactggttcgaaatgcatttgacatccggtagccggcttggaaaaacagcaaattccatcgttatgctaaataatgctggatatatgtatatataaattgtggtcttgtggtctatatttactcgactgtggaccgaactggttggaggaaatgctgatttgattgtacatttggtacagcaatcagaggcgggataattggactcctcggagtcggcacttctgctggagacatcccatatatagtactggctcgtcctttgcctttctgctgaatgcgaaaattcctcaaattgacgtatccttcagcacgtaccaacaattgtcactggtgtgggtgagggtgtgactgtggatgaggatgtgaatgtggctgcatcattccggccacaacacccagaaagtcctacatttcttccgccactctttcgccactaagcgaaaaatttaagcaaagtgatacatcttacttctgggtgagttgtatattagatgaggtcgaagatggatcctttaacaacatgcgatctagctgagagctcctggatttgtcaacattaaaagagtagtcagaaggacaagtattaatatcatgttgtaccatgtggttaggttttttttttttagatttttagccaaacaccgacacacgctgccgtgaaaacaaactaaggttctggttggaccgggaaaatggaggccgacactcatttcctttccgtcctactcaatgtttttggtagattcggtgcgtgtggaaaacaggaagtgtaaacattaattgtgccacgtgaagtacggaaattcaattagacgccaatggcggggaatatacatatttaactgttagttctcccattagggaatgcggaaccacctgcaatttaggctattagaaaactgaatgagagaaatgcttttctaacttcaagacccaattgaattccagtcgaatgtgtcgttggctgccatttagcctcatttaccacaaatttcccatttgattttagtgcaagcagctcatcttgtcaaattatctaattaaagttaaaggcattcggttttatggcatgaccgaaagatatctttaaaagacaaatacctcgaatgcccttgtcccctgtcccctgtccaccgcatctcactgtcactttagctgggctcccttttcgggttttttttctctggccattggcatcgggcactatttgccgtcaaattatttgctcaggaattcaagactattaaaaggaggacagcgctttcaaccgctgtcgcattacgcaaaacgagtatacatagctgtgttttgaaaatacattcgcaggggcagaggtttgcatataatttttggaccgacccgcgaacaaaaccaacaaagaacccggcgcacacaagggaaaaagcctcggctgaaaggcaaacaagccgccaaaggagccgggcaaaacccaagttagggcgaaatctggggcaagaaaaaaaaatgggaatagggaatatgtgactggggggctggggaagagggaatcggactcgtctgcgccatctcagctattaattttcatttgtcttgtcatttcaggcattccgcaagtggcctgttgctaagccagctaagcacagctcaagttaccttataaatagttttcccgccttataaaaaaatacactgccagctgcgcttacctgtaacgaaaaggaaattgggaaaatacagtcggttagtgaatccctggataagttgaaaaagtttgtgcaataagtataggtcggtgcaaaaacaaaagacaggaactttcgcaagcgcacagtatttcctaaataaatatcaaattacaaactacacggtgttatataaaatatgttctatttcaaatggggaatgtaatgacttgtaatttaatgtttaaagtagaatttggcttaaggtaaaaggaaacgttttcggtttagaattcctcgagattgttgaattcctgacagtcccttttgaaagccaaggggtggcaagttgccgtggcaagtacttaatgtgcgccttaaagcttaagaacattgcattaattttacgagtaaaatgaaatgtctagcgtactgaaccttaagcttttaaatattgttgtgttcgagagcatttatttcccacaccattaatcaatcggacggctgtccgccatgcaaagtgcaacctgcaactgtttccctggccagtttcccagggccacgcgacagctgccactgggtttgcattatgaaaaaccatatgggaaaatcagcaacaacaaaaagaaaacagcatgcagcatgcagggaacgccgcggcgttctgagccacatcggcaaaacaatctcgccacgcacatatgctttggccacgccaactcgcatccatgagattcacttgatacggcgaatggaagctgagccggcagctgacttgcagtccttcgctgcatccaaatgcacatccatatccatagatagcgatgcgacggcgcagtgtgggaatttcgctatgagaaaatgagacaggtcccagctgcctttgttgagctgagttctccagaggtagcaggaataggaatagcaggtagctgttgtgtgcatctccgtgtgcatgtgcatgtgcgtgtgcatgtgcacaacatgtggaaaatgcggcagaggggaaatgtggaagtctcgatgatgtttttcccgtcattcaaaaatccggttcggcggccactttgattgtggagccatttgaatgagtgccacaggcaaatgcctattttatcgttccagatttcggttttgtttggatccgtatgccgtttccggttcgaatgtggaccagctccatcaccgggcagcatgccttccctgggatccttggaatggccaaagttcggaggtcagatgctgctaacgagattcgtttagttcgcattgtgcgacctttgtctcaggccaacgcccacaattcgaaaaacaaacgaagccgagccggaggtgtgaaaagaggtgtgcttatctttctaggtaaagggtcttagttgtcagagcctcaggttgatgcatcgcccacgataagagtgtgggtcgatcgggccgacaggtcgggcctataaggtctgacttcttgagctggctgaactggcgcattagtcaagattcataatggtttgtttgcagtgcctgatttcgagggattgtgaccaatcattttccctttcatgtaatttcatttcatttcattcctttcttagttatcaattagtcgctctcacacttgattcacttgggggcacttcctgtcgtggccacaaaaagtagtccacgaatagttttttatacccatttttccactggcgaatcgggtgaaatttacgatccgttcaaaaactgtttggtaagcgatatattgtcaacttaacaaatttgtcggcatgagtggtcgaattcctttgtattcgagtctgtagcgcagacattccatttattgtgggccacgccatacaggaagctgattgtgtctggtgcccagaaaatgtgttttgtgtaactattctattcatggggccataaattaccagaagtcgggaattgctcgagggccgaactaaccaaatagtaagttttccagtattttaatgagctccggtcataagctgcgttagtagactttttgccagcttttctgggtaactgctagccaaaactaaactggttttctgttttccgaattcccaaaaggaccgagcaacatttttgccagccaagtactaatgaaattacccatgaaatttgtttgacgcagttcttctacttgtgctgaacagaatccgagatgtggccaaattaggtccaacttagccagttaatggattctgttcgagttgtgcgactactcaaactatataaacatttttcccatttgttcccatgttgtggtatctctgttgtcgattatcatcggcttttgttctcaggtaaatgccaatttaatgctaccccagcaacaagttgaaattcgttcccttgacattgaaaccataacaagctaattattcttataattcaggtttttcatatcacaacagtctagggaaatgtacgaaacgttcacttctgttaccacaaaaatatggcaacgaattgaagttgtatgataccaaactgatttcatatgacataccaaaagcttatagtggcaaaacgatcatagagatcatcttgatgcggtgtcaataagcacgataaggcacgctactagctctaaagtctagacctatgactaagtaaacctctgactaagttcgtctgtcggtggggaaagggggagtactgaagtgaacatctccatccatcggctatttgtcacgctttgacttagccgctgcagcacgagccgcgctcgacgacagatcttagtcagttgggcaggttggagcttttgccgtcggtctttgacttggcacttcgctgctgttagtcgcatccagcggccaagttagtaccagaggtggaagtcgaacttgcagctgctgggacaagtggctgaaggtgattggcctcggcaattttgtcgctattacgcctggaaaatgacttggcatcgctcgtatgcagcaaggtaaaaaagttgccacgccggtatttagtgcaagtatgttggctttcaggcggcgatgatgtattaaccgttaatgcggcatgcccctgacatcttcctggccatgtcggaagctatagacgactatatgtatgtaggcagtggcacttatgatataaaacagcgcgccaatccggggaaaaccacaataaacagcgtggcgaggaaatctcgatttgacattcaattaaactcaattgttgttcaattaattaatcaattatgcatttttcataccgccgcattaatgtgatttattttcgccgtagaacagaattattcggcacttgaatgaatattgcaaggcaataaaaacggaaataaatggttttctcttgataatgagaggtaattcgaggacgattcgctgcagatgcaaaatgagttttaataaaaggatcgattatttaaggcctagatgaatttaccattaaagcggcaaaaaaagagcatcggatagtcggtggcagtcggttgggcatattgttcaatttaattaaaatgttcgaaattatgcattctcctactgatcaactgaattaaccccatatgctgttttaaataattcactgcattttttcgtttgctcattgaaaagaaatagcgattcataaatctgttaaaatcctgtcatattttatggactttctcgcccgtcaaacgctctgcaaactgaaaacgcttgccgcctcataaatttaaaatataccaaaaaaaaaagtaaatcgagtgggtaaactctaaaaaatatcataaagctttcagctctctgcggaaattataaattcagagcaaaagcgcgtggttctttttttattccgccttggctgttttacacaattacaaaaagccagaggtattttttttttatttgaatttttcctggaagcctgccaggtattgtacaccagtttttgcggttgtcaataaataattccaacatggatttctaccgacaaaatgttttcgtgccgcttatttagataaaaagcgcgcttttccaaattgcattccaatttccattctagacaaaagcgcttttcgcagtggaaatcgttgtttgtgatccaaggcaaggtcgttgcattgtcttcggtgggatttcaaacacaaccccacacaaattgcgcatttgtttcggataaatcagctaaaaataatacacaaattactgtcccacacttgaatgccttcccccagtcacaacaggcccaaactaatcattaaataaatgcggctggccttaaaaaaccaccacagatgcatctgcagctcgcccactttaaaagatacaaaagaaaccgaaattccgtgaagaaccatgcctcgccctaatgaagttatgagctggaagaccagaatatcgctcaaccgggggctggaatacttatttttgatgccactctttcttgcatattccataaatatgatgaaagctggaggagatggaggaggagaaggcttccacttaagcgccgacaattaatattttccatatttcttctgcgcttcgctcccctcgttttgtttattagagtgtcgattaagttgctttaatattaagcagccctctatattaagaaccctccgagatatatggtttatcttacggggaaagcgaatgcagcaggccttgttcctatttcagagttcagacgatgcaagataagcgcaatgagtatatatacactcatatgattcacttgcaattgtggagcagtagctgaggttcaaggcaccaaacggtttcgttttgtatcagcaagttaatatctcaaaagtgccagtgcgcaagtgaagcacaaatcaaaacggcgctgctgccaatcaatgaaaactgtgagctgccaaaaaatcgggccgaaaggagagagagcgggcaaaaacaaaaggttcagcggtgttacccaatccgattctcacacaaatttgcaaacgcacaattaagtcgcctgggagggaatccgatggagcttcctgcagcagaccctgcggagcgcatgatgtgccaacaaagacgtcaacttgtcacccgtccagtggccaagtggccaagtgtccagctggagcggcacaacggcctttagcttggttaatttatcatggccagcggaagggaataaaggagatgtgcaaagagtgcaattgtgtgaagaatgtagttgtttttttttttatatacgagcgctctggtttttgggccctggatttcttttgggccaagtgtttgtatttagccgctgtgccgctgactgatgtgcggatattaataacgctcaaatagagctccaaagtgggcaagctttttggtctttttttgcagtggctcagcacagagtttttttttgtttttttgtataatcctcacttgctttaatccagcgagtttccggcctttagctctttttgcccccgtcgaatgggtgctacacgcatattgattaccaggtagtcaaaaccagctgggaatcgaggggttacgagcgttttaaaggcgagtaaaagctgcatttgcagggtcagttaatgaatccccacagcagtggtgagtcaatcaactgttgggactcccaacattccgcattcccacagtgcattaagcccgagtccgagccagcaaattcctgtcccaggatagctgctgggaatcggaggcgcagaaccatccggccactgcaaagtcaacagcaacaaaatcacttgcggtttgggccaacatccacagccacaaatgcgaactgaagtggtaagtttgcttttctttttaggcgtgagaatcggtcgccaattcaggtgggcggattacagaggcacgtgttggtggaaagtcagtggcgagaacgatttcccagccgataagatggccactgtgagatacatttcgcagctagatttacggcctaatgaaagttttacgaggttttgctcggttcatagcgaaaggttacccagcttttgaccctaatggatcatctgaactgctggaaaaagtgataaaagcgaggtgaagaaactcaattggacagaagaaagttccagatgaactttttctgctcgtaaagcaaagtatggggatcagcgaagacacctgcgcttatataatgtaataaagggatattaatctaggacaatctactaaaatgtgaaaggtatttcccaagacaagatgttcctatcataagaagactgatcatcagtacaacttaatctctaagctcttttcgcagtaacccatttacaatgcaaatttgcttcttatgactaatactacatagtttcgctgaaagccaaatcaatacggaatcacttaacacacaaattccccaatgcctaatcgtttcgaattatacattgtagtgctagagaaaaccagatgccataaggcgttataattgttttacgccaccatatctcacaggttgccgtgcgcaaacaaacagttaacaggctttgtgtaccttggttttttgttaattaattgttaacaaaacgaagtgtcaacaaaaaaaaatatcaaccgagagcggctgagagaaaaaccacgagtaaaagcgccaacttccagttttttgctgactttgtgccatcatttatattaaagaagtcgtatattattttttcatttcgctgctgaacttgtttattgaatttaccattttgaagccgctgactcagtacgattttcgctgtaatttagccgagttagcgagaaacgttaaacgaggctgcagtgcataatatataaccgaaaaaaacccccgattcgggccagcattcatttcaattgaattttgaatatttcggaatgctaagctccaacatcaaattgtgttgccaacgctcgaataaattgtaaatcaatttaagaatcaacaagagaatgtacgacttcgggtgtgaaataaaataaaatagcttaggaaaattgcagtaaaataaattgttttattttatagccggaataatttagagtagaacttttacatatatgtacgcaaaaatccggttagcgcacatttatgtcgattgacaaatgctattgtctttttattgccagtgcgggtgtgtctttggttagatgaagaaacaatagacttgaatgtacataactgtatatggaagtcaagcaacttcctcaagctataaagccacgcataaattaccgaggaaattatacaaaatggtttgttcaaccattcactggaatggagctcttaaatacaaatatgatagaaaatggctaaaaactataaaagcgaattgagatgttagtgccaagatctccagcgaaagataaacgatccctgatgcagaccaccctcgacttcctgccatcgattaatcaatagaactacttccttttaaaacgcccctcgcaagtactacgtgtgtgcaatgtgaagactaaatgaggcgaatatcctttcatggctcacgtatccagcccaatacaagatacttctgttaagcacagatttggtggtactacctgttccgaaatcgaagcagaaggcgctaaactgaaggaaaccgcacttgacagtagcacacgagcaggtaggcccaaaaaggtaatccctctctcacgtagtcttctgaaattcaggatgggatcgcagcacgttgagccctctggggcgtattgtactcgtgcatttcctgatttttaattagccaaatagaacctaacaaagacaacaagttgggccaaacggtctgaggctacgtgcttggtatgtgaaatctttagcccctcagtgtccacaggaaaacaatgctccagaccgaatactcctgtgtgcgagaggacaggaaattaattcgatatcaatacttttctgcggttgcgttgaaaattgcgagaaagtgatggtaaccaccacctcaggctagcaattttataatcaaaaccaaccgcttttggacatcgggattttccccactcgtaatcatggttacaccgccgtctggtggacaatgctaacttattattgcaactcctcattagatgatattatgtggaattgacattaaggagtttgacaataagcacagcaaagacaaatgaaatgatacacatgtgtatccgattggggggcattgttaatcgaaaatccccaatgagcattgttaccgaactgagtgatatcattcatctgagcttgaaacaacagagacggattttctcacagaaatctacaagatatgcatcaaatcaaatgtttggtcgagacccaaagtttgtgtcattcataatcggccaacaaagcaactcgactaattaagagagtcactcgaccaagaaatttacatgaaatgtttatgcatttccaaaatagctgggaaggtcttatgtccgcctgtgtggccctctaatggaagtttgaaatatttgcataaaaattcaaaaaaatgctgagcaaattgtcgagttgcagatccacggatgtacacttgtcggaggccaagaaccggacaatgatgctcagcaattccgtatttgcattgtaatccccctagatgacctcgggaatggaggaagtgactggccaacagcttggttaccgttgcgggttcaatcaactcctctggccagcgaaactgtctggatctaatcgcgcaattcgataattgagtgcaggagagtgggctgtgaaaattctggactttcgccaaggcgagaagaaacccaatcgaccgaactagatctcgtctagcaatcaaactttctagatgaagagcgaaaactggaccagcgatcgggcgcttaccttctagcgtatgatttgtagtatccaaatgtgatttgtgtgtaatcccaagaccttaaggcccgagactttgatggatggcggtataagaagtccggagtgcgaagacaagacaaggtcgcgtcgtttttcttcggctgccgcttttagggccctttggctgcttggcattaagttatcaagcactctacgccacttcgcatttcttcgcgtatccaaaggtgcgtatgcgtacgtgctccctgctggggaaacaggtgcactcaggaagcagctgcactgatttttattttagcgttgcactttgagtttctatccgaatttgttcactttttgtacatatgtatattcctttggctttcgtaccaattttattttagatctggacgcacattcactttcgttcgaataggctcgctaccgttagccagttcactaagaattggaaattttcgagcggagctaatgtagattgagtaccgcactcggcagtgtttacagacgcactgaagccgcacggctagcgtctgcgaggtctaacccgctgagaggagtcgcattcagatacctgttttgtatgtgtgtgtgagctggctctcgcgctctcgcctctctgcactcagaaaaaaactatagctagcttgatcagcggaaagcaacgcagatacttgcagttagcaagttatttaataatttgataactaatatttaatttttttaagctgactataaaattctctctcttcttatcttctacaggggactttaattcaacttgaaatgagccaagctgatctgataccatgtgaatagtatgaatgttaggtgaatggattttgggaaaacgcaaatcgttcataatggagccactgggggtgtgggttggcgcttcgtgggcgagtgagcgggcgaactagttctgtctgcggctcgctcttttcggagagaggaaaactggtttccaatcagacttagactttgccggcatgtgggtttcctcatggaaatctggggatggggattcgcggtcgagcgacgccggatgggcttgggcagagctacataaatgaccaaagttgaagggcgaggcacggctagagtttacggacttgtaataaatcagggagttttcaaagcagaagactttagctagtaatcgtatgtatatatgtgttcacgctagaacggcattagtagtttatttagttactaaacaacaagaaaattcaaaaactgtactaccttaacagtttccacaacaatcaatatgaagctgatgcatttttaataggtagaccttaagactccttctatagtattcgattaacaggatcgattttgtaactttaagtctggcgaaactaaatccaggaaataagccctgaactttggcagtatgtaaactgaaaaggtgaaagaaagttcaacattcaggcgagatattccattccggcaagtcgtagattgcttcggtttgatgttttttaga

SEQ ID NO: 19148 - DNA, 2208 bp, DROSOPHILA
ccgagtgcggtactcaatctacattagctccgctcgaaaatttccaattcttagtgaactggctaacggtagcgagcctattcgaacgaaagtgaatgtgcgtccagatctaaaataaaattggtacgaaagccaaaggaatatacatatgtacaaaaagtgaacaaattcggatagaaactcaaagtgcaacgctaaaataaaaatcagtgcagctgcttcctgagtgcacctgtttccccagcagggagcacgtacgcatacgcacctttggatacgcgaagaaatgcgaagtggcgtagagtgcttgataacttaatgccaagcagccaaagggccctaaaagcggcagccgaagaaaaacgacgcgaccttgtcttgtcttcgcactccggacttcttataccgccatccatcaaagtctcgggccttaaggtcttgggattacacacaaatcacatttggatactacaaatcatacgctagaagatcctccccttgcagatgctgaagcacgtgcaaatctcgccgctgcgaaatcgatccgattcggtgtcccttcgctcctccagccacgcctcctcgtgcgccagctccatgtgcggcagtccggagcctccggcggagctgcagagaacaccctcgagggcctccagttactccagcctcaacgagcagctgccacagaccacaatcaaggtgtacacaaactgcctgaagatcgacatcgagtacaagacccttggaatccagtgggacactacaagcaaggaggttattggccagctgctaagacgcctcaagatgcgacatcgcgatccacgcctgttctacctatccatggaggtagctgtgcgtcgggctggagtgaagaccatcttggtgctggacgacgacacccggccggccatcatgcaggcctgtcatccgaagggcgagtcccgattctgtctgcagctaaaaccaggtggcctgatccgcgtccacacctccgcgctgcagcccagctctcagtacaagtcgctggtcatcagcgaggagaccacctgtgacgagctgctgcacctgctcctcggctgttacagttcacccgagccggtcgagaacttctcgctgtacgaggtgtgtcccggccaggagtgtcagcgaaaattgcacccggacgaccttccactgcgcactcagatggagcggatgaagcggggcgaaggctgtcacttcctggtgcgccgaacgcccaattacgcacgccggcgccagctgttggccaacctaaacgaggcaattggacaggccgcggaggcggcagaggatgcaaccagtctcctggagctctccttggagtcggatctgtcgctctccgaggatctgcgaagctgcagcagcagcgaggatgccgaggatgaagacgagtgtgctagcagttctggctcctcggataattccacagaatgtgccctacgccgggacttttacgtccacaccacgcccgcagctcctgctccagttgtgccccaagtggcggtgtccgtgtcacccgcccgagtctacagccccgtgtacaacatacgcgagattcgaaccgcctcgcactccttctcctcgctggggaaggacaagaagctgcttgacatccacatgaacgcccgctttgcgtccggaggagtctacggcagacttatgcctgtggcggagacggagacccaggacatgaacggcaataccagtaccaaactcacggcggaggccgtcaacaacaacccggccaagggactgggacactttgtctacctgtagcgattgggtcagtgggagtggaacctgtacaaaggacgagtatgccactaggatcgtctgatgagacccaaaaattagaaaagaaatcgagtaccgtttggaccaaagatgcatttgtagtttaagccgttagagtgggaaatgtaaataggaaatatgcctgcgagtaatgtatcctaagattagttacgattagtttagtttttccttacgctacaaaagatactttgtccctagtgtaatgcaaagaaaccatctgctaacaatcccaaatgaaaggagtctatagcttaacgctttagtcccgcaactaaagcttcgataagagtatgaatctgaatagcttgtggctaacattcgtgtaaaaaccaaaagatattgtaataataagaactaattatgtacaacctg

SEQ ID NO: 19149 - protein, 430 aa, DROSOPHILA
MLKHVQISPLRNRSDSVSLRSSSHASSCASSMCGSPEPPAELQRTPSRASSYSSLNEQLPQTTIKVYTNCLKIDIEYKTLGIQWDTTSKEVIGQLLRRLKMRHRDPRLFYLSMEVAVRRAGVKTILVLDDDTRPAIMQACHPKGESRFCLQLKPGGLIRVHTSALQPSSQYKSLVISEETTCDELLHLLLGCYSSPEPVENFSLYEVCPGQECQRKLHPDDLPLRTQMERMKRGEGCHFLVRRTPNYARRRQLLANLNEAIGQAAEAAEDATSLLELSLESDLSLSEDLRSCSSSEDAEDEDECASSSGSSDNSTECALRRDFYVHTTPAAPAPVVPQVAVSVSPARVYSPVYNIREIRTASHSFSSLGKDKKLLDIHMNARFASGGVYGRLMPVAETETQDMNGNTSTKLTAEAVNNNPAKGLGHFVYL

SEQ ID NO: 19150 - DNA, 20348 bp, DROSOPHILA
tgatctattagaatttgtttaaaaagtttagaaactataattttataccaatcaaccattttacctatccaacaatttcatagaaaacttctacagttttataaacattatatgattaagagccgaacctttcaatcaaaagattcaattggatttaaatttatatgtcattgtttttaaattggttttgctgtattatcaaaattttccttcgttgctcttagataacattttctctcatagaacattttaaaattttctttatttcttcgagtgtggaaaattggtagtggaagtatcttgcagtttcgtcgtatatctgctcgtaaaagcagcaagccaccaatggatttcctcccactgccgaccggccaccccattttagctgattcttgctttggtcattaagacgcattattgtttggactcaaaaaaaaaaaaacagggggaaacggttggatgatgagacagcgggcggtttgcatagtgactctctgatctgattgcagacaactgatagctttatttcatcaaatgaaattaggaagagtgtcgggttcagctagggggaataatcgcaaattaaatactcatgtttgatataaactcataaaacaattcttagttttttaatcacaataaaccatttttaccacatctcacgatgatcatcttaagttggttgctctttataaatattatatatttatatatattatataaattaattttaggttttggtgtattttaaattaaatgaaacttgtgagttaagtctttaaaattccacttcaaacttgccgcgccacaaacgactgctgcagctcggcagcactggcagaaatacagggcatgcaagaaatactggtcacgagtaggtatattccaccggagagagcgctaactgaacccagtattttccgctgagagagcagcaaaagccggttcccaccaacaacttcgaacagccggcggagttcagtaataaacagacttcgaacgcgtgcagttcagattgagtttgaggttcgattggattcgagatatccaagttccttttgcgctacgttttgtttagccgagtttgccccgaactaaaatcacccaccaaagccggttcgggatgcgatgatgccaaggatgcagctgatgcagccgggctcttgtatctttaagatacaaattaagttgatttgttgcgctcgcgttctcttgggtaattgaaccccacagttgggctccttgcgccctctgccgcgcggtcttcggtcttcggtcttcgagcatttcgttgcattttgtgtatctagatacctttgtcggtatccgtatccgtcgcttgtcaatctggtcgctgataaaaaagcaaacgcgaacgcagccacgaaacataaaccagccgtcaacggaaaataaaagtaaaaagcaacaaacagcaagtggcgtatcagttcgtgtgttctcggtgataaatgcatttcatgcgttccaactatgtaaatagcaatttaatttgagtgtccacagtaaacatcaaaaaaccgccctggactccagtcaccaccaccaacaacaccatccccggtggagcccagtgatcccattgaaaccccggtaaacccctgaaaagggcagtcgttgtcatcgtcgtcatcgtcgtcgtcgtcgtacgtctgtgccatccaaatattgaatatttacaaatgcgttgagtgcattttcgagtggccggcacttacagtgactatctggtggatgtgcgagtgtattcatcggattgccagcagcataaaacttcgttttcgatactgatccaatacgcgagtgcttatatattttttgtgtcgctaattgagaccaaaggtgtcgaagtgcggcggttatacatatacgcagatgactgctaggatgatctcaatatgcggcctggtcatggctttgatgatgggtaagtggtctgctacgattggattttgtggactaagtgagggattgccttattctcggggggttctttgcaatcaaattcatttcatttgcttaagggggttctcaattcccatttatttgcttatttcgatgtcggcatttggcgattgcctttgcaactgaatcgctgggaacttcaaaggaatcacaacatttgtgttgcgcagaatattggccattccatcttgggtgagaccacccataatatggactctattaacctcgagggctctgccgtccacacagaactactcctatttccttattctccaagggcgattttgttttgcgaagaaaaaccgaaaacccagagagcctttgtctctggctattcaatttgaaaggcaagcggcgtgcaaaatgactcaattaaaagtcagccaggagccaccaagctggcattactaatttggaataggagaaggaaagcagcgggagaggaagccgtttggaaaattatgagtctcaggtctcagttcaaaatgaagtcattttgggcaaacatcaacatcgaaaatgtgacgagctcactaacacaggcaacaattgaggtccttgtggccaggttatccttttcaatgacagatgttgctcattaaatacttttctttagataaagtagttaatttataggcagatcagctaaaatactcgctcggaataagaaaatattgttataaaactaataaatatttcatttctataccttttagatccgttctgttttaatagattcactaattagaaacactatataggcatgtttccgaatgttttttcccagtgctagcacacacacacacttgaaatataaggaccatcctgccaaggatcacgatacccacttgaagtgagacaagcgacgccgaaatttcggctaatcaaatatagtttacagcggggattacgagtgggataaggatcgtgcccgaaggagggggatctcgggtctcaagagggacacgattatgcaaacgaaggtccttaacaacgcatgtgtgtgcgtgcgttcgagtgtgtgtgtgtgagacaggacagagctgaaaactgctgactgttaagtagcacaaaggcaaacagccgctaacaaaagccagccggcagacagcgaggatagggggatttggattcgcatatttcaaaatctgtgcaacgctactacagaggtccattatttgtatggcaaataatgtggctgtcagtgtgtgtgtgtgtgtgtgtgcttgtttgtgtgagttccttttgtgtggcagtcataatttgttattcaagcatgcaaaatgctgcatgcaacatgccaggccaaaagcaaaagcatcgtacatcccacattaagggcagctgtggcaactacaaaactccccttcaccaacctttgccactgccactgccacaccccccgcccctggtccttccgcctgtctgcatccttcggcaaccttaaagactgccagtcgaaagttctccagagggttctctctcgaaaattgtatgaactagtcatgcatttgcttagaaagccggggtataaagggaatttcaggatttaatgctgccttataatgaatccaatttattaggctgtgttctatgaacaactggtctccgtttgaaatactttgaattgaatacagcatccttgaggttttctactacactggattggctggataagggtattttacctatatgtaatagacataaaaccataattttgtaagctagttatttcctacaaagtagcgttcaaagaaatcatatccaaaatggtatttattttacacataagaagtaagagactacataataacttttcataaataatgcttggcaggcagtacgattcccattttcatgttgttaaatcaattttgtttgaaacacaaaggaaatgatcccgagaagctcgattgtagttgaagggaaaatccctgaataaagccctgatgactgtttattagccatgctgtaacctttaaattgaattccaactctatcaaagaccatccagtcctttttctggccatttttacccctgaaaaaaccctagatcaaacgtttgacgcgtaattgtcagacacaattccacttttcattcagtgcctgtctgtctgttgacttgcagttttccagcaccgcttttcccagacaaatgcctcgcattccacagtgacagttcagttctagccccccattccccattcccattgccaccccccgcacacagacacacgcacacaaaatcaaatcaaaacgccacccatggggcaagttcaagtggctgccacagtgggttgcctgattattactacaatatttcgcattcattgtgcttaatcgacgaatgttgccgcaccatttgtggcagtcgaagttggatctgtatccgcatctgcatcagaatctgaatctgaatctcaaagatgctgatgagcatgaggccacagcagtgggcactcgtaatactgcctgctgctgacttgctgatttcggttattcgagccaaacaaacgaactaattatcacacacgcacacacacccgcgacgagggtaagtggaagaatggaacgatgcactgagaaagatttctttgggtttaaaaaaagaatctttagagttccaagtacacaccttaaagtatataaatcacaaacgtattacttgtgaaacggttgttatagagaagattgttatacctataatgtcaaaagataaaaaaagataaaaacatctaccaattcctatcataaactctgtcatatctcattacatgctcataatttgcgaaactgcttaccaaaagttataaataaacattacttagtttaataaatcaattgaaagacacagtgttgaaaattcgtttgtattgtttttaaatttagaaaatcaaaaattcccacttggctacccttctttttcgccagtgtatgtccacagacagatcgagatgggcagttggaaccgggactgcccgctgctccgtggctctgtcgctgatgtttgcagcatcaacactttttcagtttgctgctcggcttctgcggcatcagtgctcctccacagagctccacctcctgccccactcctcgtcgctttccgcaccctctcacgcatttttgtgcccacatcagcgcaatcaacggactgcggagcgggacgcatatttctttaatcgacgcccagtaactgacattgttccctcgtctcgtatcgaatcgactcaactcgactcgacttgactggaactcgaactcgttttccgcacggcaaattaaatcgattcaggggaggatcgagtcgagcagggcagggagttaagcccagccaagaggaggaggtggagggcatcccggtgcctgcccaactgccttttcggttgggccgtgtatcataacacgtctgtcggcgatgtgactggcatatgaatcgcatggagttcctccttcgaacgtcgaaaggccagtaatgatgttgtggctgttgttgttggcccgcttattgattcctcggtgcggtcgtgctcttggccaaaaaggaactgcgcccgggacccacaatctgaggtgttgtctcaaattgctccaattagtggccaaatataatggttgccgttttgtagttcttgttcatgttccttgctcctgctacccaagtcgtataatcaaaagtaattgcgtttgaattgcttttcgtttcgagttgcggttgggagttatgtatcttctggccatatctactcacttgactttgtagcctcgaatggcgccacttgtggtctggatttaaacagcttcgatatgaaaaggttcttcgctcatttggtaatcgccattgaaatgcattcatatgggccacacctgaccagtgaattgcattttaaatgcagcaaattgcatttgcggctgttgatttaatataacaaccgatttgcattcacaaataaatgagaaacacacaaattaaatgtataaaaacatttttcctctcgaaatgcgtttatttttcgcatggtttttatgggcgcctttttcttctggcttttaattatgttggtacaaaactctgaatacgtttttgtttgtttttttttttcaccatacacatattgtaattttgtttgaggacacgcaactttggacagcaatggcgtaggttttttctccatgcctctctctgatactctataaagggtatttttttaaattttaatggcaaagatcatttcatttaagctttgaacttatgtaattatttagtttgtaacaaattgtccaataattcaataataataatatgctacttaataagcactttaatcattgcagctaaagagtattcaaaaagggtttttagatttaaaaaaaaagcctctgttttttgtgcttccgcccttttttgagtattttgttgctggtgtttctgcctttgctcctgcccttgcagagcgctttacaaaattacatttgcgttaaacactgtaatttaagcagcttaagcgcatttaatttgtttaaaccactttaattaaacaaaattatggttaatgcactttttttttttagttaattaagccaaattgttcgatgttcaatttaaatttaaagggacttttgtaagagctgcaaaactctgccctttaatcgggataatggctgactgtaatgagatccagtttactaatttccctcgcttatttctataattacagcttccgttttggccagctcatcgcgtttccagcgagtgccccaaagtcagtccgtggtggaaaatgaatccgtgaaattcgagtgcgaatcgaccgactcctacagtgaactgcactacgactggttgcataatggtgagcagtgcgatttacatatcccatggttgtgcattaagcattcgccttccttgcactccattccaggtcatcggattgcgtatgacaagcgtgtccatcaaatcggttccaatttgcatatcgaggcggtgcggcgcacggaggatgttggcaactatgtttgcatcgcgacaaatttggccagcggcgccagggaggcgtctccgcccgccaaactgagcgtgatatgtgagtagttatattcccagtttcagtccccatctccatcccaatcccagtgcccatgtcattccaactccaagacccacaattgttcgcaataagcaaattgactgatggttaagggcgacagcaaatctgtctttgcttgtgcaaattaacaaagcgaaattgaattgtaagcgggtagttgagagcactgcaaaaaacttcacttgatattgttacatttttatatctaaaaactgaagttagttcttgagccataaactttcagtggaatattacatagaacttacctagattgatagtaactgctgcactctgtaaatgctcaccggtttctttgcgtgtagggcaaattcatttgattaatgctgcatttaatggtattccaaccccaaccccacctctccctggcccaaaccccccttttcagatacgggcaaaccacaagacaacaagaaaaggtaaagaggcataaaaacgcaaccgaagcgaacggaacgcagcccaacaaaccgatgaaagataaaaaccgaaagttttgatgtacatgcgtcagatcccatgctaacccagtcccttttgccaactcccccttccaaagacccccccccaccccttcaccaattaaccccttcgcgcagagctacaggaagtgcagtgcagtgcacagaatgcatcccatgcatcggaccgtgaagaagaagaccctggtcgaagaagaaccacacagagaaagatcacttggttctaaaatgcagctatgcattcgaaaagtaaacttctttgagaaaaccatcttcaagatacatcctcaagatacatcttcttctttgcaattatgataaattgtagagttcgtttcaaatctaccttttcaattcttaatagcggataaagaaacatatctatgagtcttgagttaaaacaatacgattagataaaatatctctcagtgcatcgctgatttccttcaagtagcaagtgcagttgcagttcttggcctcgtgttgaggcagcggcgtcacgtgattgatgttcatttagttgcgtttgcctttaagcagaaaaatgcataaatttaccaaatagctccccccacttcccctactccaccgtcttcctttttcatgtaaacaaaacgcgagttttatgcacaatctggagtgcatgtgtttgggggccctccaatatacgagatacatatatctggtatctggtatctgctatctgcatctgcatctgcatttgtatctgtatctgtagctgggctgtcagcgcggccacggcatccgagctgtgatcaaagccacccaacagcaggggcatctttcctccgccgtcgctatttatacaccagcctcatctcaagtgtttttagctaattaattaactaattaatttgtagtttcgggagttgattttaattgccacagctcccttccccccccaaaaaaaaaaacagctgctgctgaaaagcgtggagagtgtatatatatacgtatttgtatcttggaggggatgcagggaaagtatcttggcgccagctgaagctaagtgggttatgtgattaccacctactcctgcccagcttgcatcaatctcataattcttgagcagcagacaaaaactattaaaatatgcatggggcagtatggatggagatggtgtcgttgctcctcagttttaggattcggtaaatattttattcaggactcgtcgccattgtgtcccctggctgcattgtcttagcccggattatccttccccgtctgcacttttctcgcaaataagtgttcaattaagcgcgagaaaagtgtcattttcctatgcgacatttaacaaatttgcaatggagactggaaaacaagaaaattgtgtggatgggaaaggcaatctggtaaaagctcattagatagtggaatatatacttctgcatcaatataaaatagcagatagatagagcattaacattttaaatggtaaataggtactaaaagttcggaaataaacatatttttaaagaaatattatgagtttgtaaatatattttagtcttacaaaagatacacacacatagttgagttttagtactaaagttaatctgaatttatgaagttattgtgagtaagcgcttctttaatgaaaggctaatggaaatcccaaggatagttccaatcttagcgggcaaatcaagtaaacctctttttcggtattcataaaagcgggaagacaaatgctgacagtgcccggcgactaaccgatgactacaaggaattaagcagacagcgaagaaattaaacagacagcaataaaggcaaaagcgagtcagagccaaaaacaaggaccaagaagaaagcagccgcgtcagaccaaaaccagacgactggctcctctgtgaggacgatgagtttggggcgaaaggacattccaaacatttgctcagcgaaaggggttgttggactcacaggactggcagctccggtactcagccaggatacacagactaaccattgaacagctgagcgaagctggtggctaaaaccggagggaaatgtgtgttgtgcgctgaaatgtatgggggggaaatgaaatgcaacattaacacgaaacataaacataaaatgagaaatggcagcagcaacaatggcaaccgaaccgagccagcaaagtcataaaaaccaaacaaaatgcaaagacacagcaaggacgggatttgcaggggaatgtcaggacgaaaagcaaccccttaaatcgaccgcccaggcacccgggcacccgaacacccccatcacatatatatatagactgttgtatctgtgctctagacacaagttcaagttgactgcagttggtaagttgggtttttattttacggatacagcgggggtggaacgcgatgcccggggagtcgcgcggtcgggtggcggtagcggtggggggaaccggataattttcattttgtgaatgccggaaaaacgcataaaattttacgagccaagctcggagaacattaaagggagacgacgacagacagaccgaaaaacagaaaaacagacaagagcttgcaaacggaaaatgtagccaactttttggcgcgctaacctgcgtcctctcttcatttctagtactcttcacacagcaaggataataccagttttcatttgaagctatgattaagaaaaacagcaactagattgactttgataagcaacgaaattagacattgtgaaactacacattttcctttaattaaaggttcttaaaaattcatattggatatactatacagtatatatgtgcattgaaaataaaaatattgtaataaaacatacttggctaaagatttgaaatcagtagatatttaatttaaataaaaacataaaaatgccctagcacagaccaattgttttgctctgtgcatctctttcaaccactcttttcctaactctaggattttctttatattcctttttggcatttattttacttttagcttttctgtgctgctacacgagttgatcattagcaacttttggggaaagcattacggggggggggcaacggcagcaggggcgtagttcagggaatcccccctttaaaacgggggctaactgccctcgccagagggcaaaggtcactgcaacggaagtccccttttttcgcaagccactggaaaaccagagggcagacaatgtgcgataatcgaatgtttaacgttttaatttgaaaaacgtttggggtgctgagacagcgactggccaactttaattaaagatccaacgataacgctatggagcaggacacatcgaatgttcttcggtcagttgttgcaataaattttccataaatataaatggctggccactgaaaacggagagctggggaaaatggatggtaaaatttggaaattcattgatatcgaaatccgctgatgaaagccactcatcgatttgtatctgtggcaaacgatctgcgaaatagttaattcgttgagtaagatatctgcaaacaattttgatgcatttccctcttgcatctgcgttaatttgcgaaatgggtcaataacttgtaagccgctttgtgcaccgcacacacacaagaatgcccagccaattgaagtgaaatggagtggagtggccactagccgctagccactggccagtgtccagttttccagttggacaactggatagatggaagcgcagaagggctgcataagtccattaacgttcacaattaccgccggccacttcagaaacacagccacttctatgggctcccatttccattcctccatctttcggtggacacgggccacttgggtttatgacagcgctgaaaacccttccactcgagttcgattcccaactctgcccgtccgaaaataatctatttttgattatcaattaattatattttcataaaagcgggcgataacaagaagtgcagcactgcagctcaaggaaaaaaaaaaaaaaacaaaaactagttatcttatcgggaggagcggactcatagttgacgaaataagactcagtcggcacacttattctggggtctttggagctccagaggtggtgatggggagtgagttcccaagacccaaccgataagaacgatccgctcgggggaactgtcaatttcgatatctataattctgcttgcctttcgacgtttacttccactttgtttacccaaggcgtctctatttttttatgggtcctacccacacccacactccacggcattccggcaattgtttacagcgattgtggtttatgctccatcctcggccagcgaaaagtttaacaaatttattttgttttggagtcgtgttggtttacatcgtcttatttccctcgttcccagtgtttagtgtttacctcgacttgcacgttcaacgtgtgaatgacgaccgccttccgaccgacccctactacaacttagagttacccctcctccccccactccccgcacgccatccctcgcccacaggtacatgtagatacaacccatgggtgtcaaaagatctgctgtctctggcgatgcatgcatcagcctaatgagaagctcgttaattagcgactcgcgacttgctagtaattaaagttacagttagtcatacctattagtcagattcatataatactttctaggatcgcagaggtatctcaacatgaagccaaaaagaggtagcaccaaacaagctatatattataaagatacttacaagggatgcaagttgaggatgttaatctctggttcttgtactagcacttataatgttagatactaatcgtaccttacaatactttagaatcttttacttacgaaccatagtaaatgccgaacctctttaacgaaaatacgaatatcattaagcaacatttccccacttctatgttaagatgctcaaccatcagatacttgtgtgcttacctgtccagtggcgagttgaatccgttcccgttcccgttccacactttacccgctgctcacttccccctagatgtttggccatccattagatacttttgctcctcggctgtctaagtgccaattagttcactctactgtcattttagtcgtaacatataccaaaaactttgtgccacaagcccacagagtatagccattggtacgtactacgtaccaccatacaaagtcgtcgtcgagctgacggacgtgccccaagaagagcaaatatacaaacacatttcaaacttttgacacttacccaacggagacgaaagacagggcactgtttattgagttgttgctgtcggttcagtttggttcggttcggtttggttctgtttttccactgcctgccaccaaataagtgtctacaaatatttagaggcattttttgttcactgactgagtctgcgagaggcaaacaaagtcggtgcccaaacaagatttatgtgcatatgtaaattttctctaacgcggccagcaaaccgcagccatccagacctggcaaacattcagataggcaaagaggagaaatatccataaaacatacatcatccattttgcctagatctcggctcgctcctttgggccgcagataaaaaatgttttatgaaaattatggcaccatctccgaaggctgtagcaatcacacataacatacatacatatatatggaataccaaacgcgggcaaatagagaatgtaggaaaacaatttgaataaattatttggggggataccaaattagaactttaaggagcagcatcgctcggcatccgacaattatcgctcggaatacaaaagtatctcattcacatcgccacaatgggctgcagatacacgattgcagctacaagatattatggaagtccggtcatacaaaagccacacacagagaaatttttataattactacaaaatcggaacttgaaaaacttcaactgtcgttgataacaataaaacattaaatgaacactaaataagctgatgaaatgtatttcaaatttaaggaatatgcagtggatattcttattttgactagtatttcaatcttaatcatattaatatgcatttgcccaacttagcataccagagaacacttttaagttttctctctgtgcagcgattgtgtatgctagcgtgtctgcaacatgactggccacgccccttgcgcctccggctgccactaaaacataaattaaaccctatgccacggcagagagtttagagagcagcgcattcttcttttggactgcagtttttttcccccccattttttatgcgcttttcttttgcgccatagaaactcttttctcatgcggcaattgttggcaagtaccgttccataccgttccgtctggccaagaagtggagaaagaagccggcgggcaggaaaatggagagggccatgtgagcatttacatatgggcagcaaggtgggatcgaggtcgggagcgagaggtggagccttctcccgactgactgacagttcaatttatgcttcctcgccaccttaaatgggctgccaggctgtgccgataaagacaaagattgcagcgtcgtgttcggcgctgaactgacgataaaatgcacttaatgccgcgcgaaatacccctgctttccagggcgaaatatgtattgtatgtagttataaccaaagggccacggaaagcggaaagcagaaaatctgaaatcagaagagggagagcaagcgcagcgaattcgcatagccaagaaaacgcattaaggctaaatgtatcttccggatatattatgcatatttatggaatgccagcctattcgcattttacaggggctgatcaataacttttgctggcaacgagccttccgttggccgaactgttgtggcaaccctcggcctgcgtcttgcattaattcaattagtttatagcccacactcattccgcagcctcaatctccgcatctgctacttcttttacacggtcagaaaatatatgaatttacttagttttttataaataatgtaaaatttaaaatgttattccctgtcatctcttctttaatatattgtggttcttagcatcacttacttttatatatgtatcttttatgaggcattagatgataaaaaatatacatacttggctcgaacgtatgtttatataaaaactataatcgacttataataacaccattctacccattcattcctaccttcagatcttgaatcggccagtgttcagctgctgggcagcaatcgcaacgagctgctgctcaagtgccacgtggagggcgcctcaggagatttggaaccgctagagatcgaatggtatcgcaacagcgagaaacttagcacctggaagaacgtccagctggatcagcatcgcctgataatccgacagccgggaagcgaggacgatggcctgtaccgctgcaccgcctccaatgcggcgggtcgagtgatgagcaagcagggctatgtctaccagtccagtgtgaagtgcctgccccgacttcctaggcgcaagaacgaaaagatgatggagtcctgggacaaacagaccttcctgtgccgcggtaagcgcggtggagctgctggactagaggcactacccgccgctcccgaggatctgcgcattgtgcaaggacccattggtcagtcgattatcaaggagggtgagcccacggctttgacctgtctgtatgaactgcccgacgagctgaagaaccagcgcattcaactccgttggcgcaaagatggcaaacttttgcgtcaagtggaactgggtggctcggcgcccattccaggtcactccttcgattccggcaaggatgctctgttgcgtgaggacgcccgtctagtgctgcacaagcagaatggcaccctaagctttgccagcattattgccagtgatgcgggtcagtaccagtgtcagttgcagctagaagctcatgctccgattaactcatctcctggcatcttggaggtcatcgagcagctaaagtttgttcctcagcccacgtccaagaatttggagctggatgcagtggtggccaaggttcactgcaaggcgcagggcactccaacgccgcaggtgcaatgggttagggtaagtaattcaatccaattagattcaaataaatacttattttaaggtacgaactaaaatggcatagcattcccttcgatatatttacacatggtttcaaacaagtactagctttcatttatatatttgttacacttacttttgataagtaatagattgttcttgcaaaattttagtacaccctatccggttgacatctgcctcctattcagtaattgcccaggcacttcggtcttcatttcgaccgcttccaaatgggaatgtttctggacatttctggctcactttttcgcccactccaccacggcaatgatggccacatgtcactgacaaattgaaaaaacgcgcattgcgccgctgggcaaacttttgctccaaacaaaccgtttcatatgcaaaactctatcgtgtctatgtggcctaagcacccttcttctatcgcccgaacatccgaaaaacgaacccactccatttggtggccattgagcgttttgtgttgccagctgtttgccatggccaaccaatttcgacaactgtttgtctatttgggaacggagcgaaaaaagaggatcgaaccctttcaaagaaagtttttcatttggccgaaaaacaaacctgactcaaacctgttcaaagtgtattgcgtcctttttgtctgcttttctgcatttttgatgaaaacgcatggcacacgttggcaaattggttggtaatggtcagctgtctgtttctatttctcactgatgtttcacattcaactttgatattaacagattggaagtgcataataaatgtgcatgtgtctttgatattcaaattaagaaatgtgggggtgcataaaccagtgcaccactgcagtggtttgatatcaaaagtaataaccagaaagaaaatctatccttagattgctattgatatatgatagatcctcataaaatctactaacacaacaaaaaattatttctctacaggatggggaaaataccactttacccgaccatgtagaagtggatgccaatggaacactgattttcagaaacgttaactcggaacatcgcggcaactacacttgcttggccaccaacagccaaggacagataaatgccactgtggctataaatgtggtggtcactcccaaatttagtgtgcccccagtgggacccatcgagacttcggagcagggcaccgtggtgatgcattgccaggcgattggggaccccaagccgacaattcagtgggacaaggatctaaagtatctgagtgagaacaatacggaccgcgaaagatttaggttcctggagaacggcactctggagatacggaatgtccaggtggaggacgagggtagctacggctgcacaattggaaatagtgcaggactcaagcgagaggatgtccagttggtagtgaagacaaccggtgacggtttcgctccagaggaatccggaggtgatggcttcctggtcacccgagctgtactgatcaccatgacggtggccctggcctacatagtgctcgtggtgggcctgatgctgtggtgtcgctatcgccgtcaagccagaaaagcccgtttaaacgatctgagcacaaaggaagctggcggggatcagccggatgttgctggcaatggcaaaggctccgagcaggagccctgcctgtctaagcagcacaatggccacagcaaatccagatccaagtccagtggagatgcccagaaatccgatgacacagcctgcagccagcagtcgagggcctcaaagaaatcggcacatatttacgagcaactggctctgccaagatccgggctcagtgaactcatacaaattggacgcggcgagtttggggatgtgtttgtgggcaaacttaaggctaccttagtcacctcgccctcggacaaggatgcggatacggaaaagcagcacagcaacagtgaaaatggcagtggaggcagcggaagtggaagcaccacgctaagtactctaaatgagaagcgtcgctccaagacctccatggacgacattgaggagatcaaggaggaggagcaggatcagcacaatcaatcgggtctcgagcagctcgttctggtcaaagccctgaataaagtgaaggatgaacaggcctgccaggagtttcgacgacagttagatctgctgcgcgccatctcgcacaagggagtagtacgtctgtttggcctgtgtcgcgaaaaggatccgcactacatggtgctggagtacacggattggggcgatctcaagcagttcctgctggccaccgccggaaaagtgaacactgccaccgcgggcagctcctcaccgccgccactcaccaccagtcaggttttggccgtcgcctatcaaattgcccgaggaatggacgccatctacagagctcgcttcacccataggtaagtgatttgagaaggccagcattttcatagatccaattggcaatactttaccttacagggatctggccactcgcaactgcgtaatttccagtgagtttatagtgaaggtatcctatccggctctctgcaaggacaagtatagccgcgagtaccacaaacaccgcaacacgctgctcccgatccgctggctggcgcccgagtgcatccaggaagacgagtacaccaccaagagcgacatctttgcctacggtgtggtggtgtgggagctcttcaaccaggccaccaagctgccccacgaggagctgaccaacgagcaggtggtgcagcgttcccaggcgggctccttggagtggtcagtggccgaggcgacgcccgatagcctgcgagagatattggtaagcatccttataacttaacaattatattcgtacctattaacaaatttcaattaaattaattatattagtcaatgattcgatggatcctcgcttggcttagctatgaaatgaatgcttaagtcgctgacaaactactgatataatccttttctgcgtccactttcagctgtcctgttgggtgtccaatccgaaggagcgaccttcgttcagccaactgggagctgctctcagcaaggcgatgcagagtgccgagaagtgaggccagactgatggctcgatcatgccaaaaagtaattcgtagtattgtcttagtgtctgcacgcccgagttttgctatgcgctcagaaacctagtcttaaggatcgaaggataactgcgcctgtttaacatgcgcattgcgcacttggtggcacacagaatgaagttaagcagctactgtacaaacacaatgtatggaaatggggatatcttcgtgaatagtattgcgtggtgctgcatatttttaggtatgcagctaaaatgtacataataactgccacaaatatgcatttaaaccagttgaagcatttctaggattagatcatttcaaccttcgtcagcatttaataatcgacttctaagctaaattagtaaataaaataaaatataaatacacaagcatatgcatcacacaaaacaacgagcgatttcattgttttcaaacattgagaaactaagccaaattttaagtttagcattaaatataaataacacacaccacccacatattttatcacaagcctagttatacactttttaatgcgtaagaaacaaacagccgaaacaattttatgactagccatttaagctttgatgcatgtttacaaaacatttaaataaactcgaataaaataaatttaatcagaaggcacaaatttaaagaatcagctttatttcgaaagtagaagaccaaggggagagacgaaacctttcgtgggctactactttttatgggcctttcatttggcatggcaaatttgttgagggtcctttgggcctaagcggacttggctcattcacacttcacttgatttgaaaaatgagcgcctattgaatgtcggggttaggccgtcttgcctccacgtcttttcccaaaacgattgacaaacaaacatggcaataaaccgtaaagttgcctcggcttattggggcttaaagtcgccgcactctccgatttttttttcccggaatttgctgctccggaagttccagcgcctatgtagccaacaaagtttcgtcgtgcgaaaactttggccaggaccaaatccaagcaatatttgcatttgaatcagcagcaaaaacaacaccgttacacaatgaattgccattttcctagcctagtggataggctgcttagcttttcctggcacgtacaaatatctgcctgtcatgaatatcaaatgccttcggaaaaaggttgattgaaccagttggtagcaggaagtgtggcagaaaaaaagaaagagcacaaatgatatgtcgaaacgggatggcagagaatttgatactctatttcacatgtaaaggaaacctaaaaggattcaaaacgtatttacttccacataggccactttttaaaattaaaactccttgataacttttagaagcattagcgaacgaaataaatgggatacccctaactcaaaggctcgaaaggcaaactgcattcgcaattggtaaagctgcctaaaataaaatccatgccctgccgcacatggcgtatgcgcaatatttgcaatgtttgtaatggaacgacagatgtgcaacaacaaaagcctaagctcgacacagaacgaaaacataaaaatgccatttcgcatggctttcaatttattaatattttatacgggccactggcagaaaggga

SEQ ID NO: 19151 - DNA, 4645 bp, DROSOPHILA
cgcgtgcagttcagattgagtttgaggttcgattggattcgagatatccaagttccttttgcgctacgttttgtttagccgagtttgccccgaactaaaatcacccaccaaagccggttcgggatgcgatgatgccaaggatgcagctgatgcagccgggctcttgtatctttaagatacaaattaagttgatttgttgcgctcgcgttctcttgggtaattgaaccccacagttgggctccttgcgccctctgccgcgcggtcttcggtcttcggtcttcgagcatttcgttgcattttgtgtatctagatacctttgtcggtatccgtatccgtcgcttgtcaatctggtcgctgataaaaaagcaaacgcgaacgcagccacgaaacataaaccagccgtcaacggaaaataaaagtaaaaagcaacaaacagcaagtggcgtatcagttcgtgtgttctcggtgataaatgcatttcatgcgttccaactatgtaaatagcaatttaatttgagtgtccacagtaaacatcaaaaaaccgccctggactccagtcaccaccaccaacaacaccatccccggtggagcccagtgatcccattgaaaccccggtaaacccctgaaaagggcagtcgttgtcatcgtcgtcatcgtcgtcgtcgtcgtacgtctgtgccatccaaatattgaatatttacaaatgcgttgagtgcattttcgagtggccggcacttacagtgactatctggtggatgtgcgagtgtattcatcggattgccagcagcataaaacttcgttttcgatactgatccaatacgcgagtgcttatatattttttgtgtcgctaattgagaccaaaggtgtcgaagtgcggcggttatacatatacgcagatgactgctaggatgatctcaatatgcggcctggtcatggctttgatgatggcttccgttttggccagctcatcgcgtttccagcgagtgccccaaagtcagtccgtggtggaaaatgaatccgtgaaattcgagtgcgaatcgaccgactcctacagtgaactgcactacgactggttgcataatggtcatcggattgcgtatgacaagcgtgtccatcaaatcggttccaatttgcatatcgaggcggtgcggcgcacggaggatgttggcaactatgtttgcatcgcgacaaatttggccagcggcgccagggaggcgtctccgcccgccaaactgagcgtgatatatcttgaatcggccagtgttcagctgctgggcagcaatcgcaacgagctgctgctcaagtgccacgtggagggcgcctcaggagatttggaaccgctagagatcgaatggtatcgcaacagcgagaaacttagcacctggaagaacgtccagctggatcagcatcgcctgataatccgacagccgggaagcgaggacgatggcctgtaccgctgcaccgcctccaatgcggcgggtcgagtgatgagcaagcagggctatgtctaccagtccagtgtgaagtgcctgccccgacttcctaggcgcaagaacgaaaagatgatggagtcctgggacaaacagaccttcctgtgccgcggtaagcgcggtggagctgctggactagaggcactacccgccgctcccgaggatctgcgcattgtgcaaggacccattggtcagtcgattatcaaggagggtgagcccacggctttgacctgtctgtatgaactgcccgacgagctgaagaaccagcgcattcaactccgttggcgcaaagatggcaaacttttgcgtcaagtggaactgggtggctcggcgcccattccaggtcactccttcgattccggcaaggatgctctgttgcgtgaggacgcccgtctagtgctgcacaagcagaatggcaccctaagctttgccagcattattgccagtgatgcgggtcagtaccagtgtcagttgcagctagaagctcatgctccgattaactcatctcctggcatcttggaggtcatcgagcagctaaagtttgttcctcagcccacgtccaagaatttggagctggatgcagtggtggccaaggttcactgcaaggcgcagggcactccaacgccgcaggtgcaatgggttagggatggggaaaataccactttacccgaccatgtagaagtggatgccaatggaacactgattttcagaaacgttaactcggaacatcgcggcaactacacttgcttggccaccaacagccaaggacagataaatgccactgtggctataaatgtggtggtcactcccaaatttagtgtgcccccagtgggacccatcgagacttcggagcagggcaccgtggtgatgcattgccaggcgattggggaccccaagccgacaattcagtgggacaaggatctaaagtatctgagtgagaacaatacggaccgcgaaagatttaggttcctggagaacggcactctggagatacggaatgtccaggtggaggacgagggtagctacggctgcacaattggaaatagtgcaggactcaagcgagaggatgtccagttggtagtgaagacaaccggtgacggtttcgctccagaggaatccggaggtgatggcttcctggtcacccgagctgtactgatcaccatgacggtggccctggcctacatagtgctcgtggtgggcctgatgctgtggtgtcgctatcgccgtcaagccagaaaagcccgtttaaacgatctgagcacaaaggaagctggcggggatcagccggatgttgctggcaatggcaaaggctccgagcaggagccctgcctgtctaagcagcacaatggccacagcaaatccagatccaagtccagtggagatgcccagaaatccgatgacacagcctgcagccagcagtcgagggcctcaaagaaatcggcacatatttacgagcaactggctctgccaagatccgggctcagtgaactcatacaaattggacgcggcgagtttggggatgtgtttgtgggcaaacttaaggctaccttagtcacctcgccctcggacaaggatgcggatacggaaaagcagcacagcaacagtgaaaatggcagtggaggcagcggaagtggaagcaccacgctaagtactctaaatgagaagcgtcgctccaagacctccatggacgacattgaggagatcaaggaggaggagcaggatcagcacaatcaatcgggtctcgagcagctcgttctggtcaaagccctgaataaagtgaaggatgaacaggcctgccaggagtttcgacgacagttagatctgctgcgcgccatctcgcacaagggagtagtacgtctgtttggcctgtgtcgcgaaaaggatccgcactacatggtgctggagtacacggattggggcgatctcaagcagttcctgctggccaccgccggaaaagtgaacactgccaccgcgggcagctcctcaccgccgccactcaccaccagtcaggttttggccgtcgcctatcaaattgcccgaggaatggacgccatctacagagctcgcttcacccatagggatctggccactcgcaactgcgtaatttccagtgagtttatagtgaaggtatcctatccggctctctgcaaggacaagtatagccgcgagtaccacaaacaccgcaacacgctgctcccgatccgctggctggcgcccgagtgcatccaggaagacgagtacaccaccaagagcgacatctttgcctacggtgtggtggtgtgggagctcttcaaccaggccaccaagctgccccacgaggagctgaccaacgagcaggtggtgcagcgttcccaggcgggctccttggagtggtcagtggccgaggcgacgcccgatagcctgcgagagatattgctgtcctgttgggtgtccaatccgaaggagcgaccttcgttcagccaactgggagctgctctcagcaaggcgatgcagagtgccgagaagtgaggccagactgatggctcgatcatgccaaaaagtaattcgtagtattgtcttagtgtctgcacgcccgagttttgctatgcgctcagaaacctagtcttaaggatcgaaggataactgcgcctgtttaacatgcgcattgcgcacttggtggcacacagaatgaagttaagcagctactgtacaaacacaatgtatggaaatggggatatcttcgtgaatagtattgcgtggtgctgcatatttttaggtatgcagctaaaatgtacataataactgccacaaatatgcatttaaaccagttgaagcatttctaggattagatcatttcaaccttcgtcagcatttaataatcgacttctaagctaaattagtaaataaaataaaatataaatacacaagcatatgcatcacacaaaacaacgagcgatttcattgttttcaaacattgagaaactaagccaaattttaagtttagcattaaatataaataacacacaccacccacatattttatcacaagcctagttatacactttttaatgcgtaagaaacaaacagccgaaacaattttatgactagccatttaagctttgatgcatgtttacaaaacatttaaataaactcgaataaaataaatttaatcagaa

SEQ ID NO: 19152 - protein, 1033 aa, DROSOPHILA
MTARMISICGLVMALMMASVLASSSRFQRVPQSQSVVENESVKFECESTDSYSELHYDWLHNGHRIAYDKRVHQIGSNLHIEAVRRTEDVGNYVCIATNLASGAREASPPAKLSVIYLESASVQLLGSNRNELLLKCHVEGASGDLEPLEIEWYRNSEKLSTWKNVQLDQHRLIIRQPGSEDDGLYRCTASNAAGRVMSKQGYVYQSSVKCLPRLPRRKNEKMMESWDKQTFLCRGKRGGAAGLEALPAAPEDLRIVQGPIGQSIIKEGEPTALTCLYELPDELKNQRIQLRWRKDGKLLRQVELGGSAPIPGHSFDSGKDALLREDARLVLHKQNGTLSFASIIASDAGQYQCQLQLEAHAPINSSPGILEVIEQLKFVPQPTSKNLELDAVVAKVHCKAQGTPTPQVQWVRDGENTTLPDHVEVDANGTLIFRNVNSEHRGNYTCLATNSQGQINATVAINVVVTPKFSVPPVGPIETSEQGTVVMHCQAIGDPKPTIQWDKDLKYLSENNTDRERFRFLENGTLEIRNVQVEDEGSYGCTIGNSAGLKREDVQLVVKTTGDGFAPEESGGDGFLVTRAVLITMTVALAYIVLVVGLMLWCRYRRQARKARLNDLSTKEAGGDQPDVAGNGKGSEQEPCLSKQHNGHSKSRSKSSGDAQKSDDTACSQQSRASKKSAHIYEQLALPRSGLSELIQIGRGEFGDVFVGKLKATLVTSPSDKDADTEKQHSNSENGSGGSGSGSTTLSTLNEKRRSKTSMDDIEEIKEEEQDQHNQSGLEQLVLVKALNKVKDEQACQEFRRQLDLLRAISHKGVVRLFGLCREKDPHYMVLEYTDWGDLKQFLLATAGKVNTATAGSSSPPPLTTSQVLAVAYQIARGMDAIYRARFTHRDLATRNCVISSEFIVKVSYPALCKDKYSREYHKHRNTLLPIRWLAPECIQEDEYTTKSDIFAYGVVVWELFNQATKLPHEELTNEQVVQRSQAGSLEWSVAEATPDSLREILLSCWVSNPKERPSFSQLGAALSKAMQSAEK

SEQ ID NO: 19153 - DNA, 2890 bp, DROSOPHILA
gtgccactgaattctcccgagttgatttcgaacgacctctgcgccgccttcatgggtgccataacggggattccaaatctcgggctaccattttgcaggacgaccctgaatgcctccaatccgtccacaattacgctggagaaagagcgtccttgggctgaaaattaactatgattattaaattttccctaaaattttcttcatattctcacctgacaaaggttcggcaacttcggcaccttgacagctggccagggccacgataagcgcaatcaggaatgcagacttcattcttagcacagaacactagttaacccttttggcaatcaaaatccactagtcgaagcttgccaaatccattcctcttatataggaaaatgaccattgagataatctatcggtacacagcacaaaaatatcagtgtctagattaaaaaattttaatattaggaaaacttctatgtacagtgaataaacagtgaatgctttcttggcttatatttacaaaaacatggttgaaatatggaacaatttgttatttattcttaaataattagtgtttataaaggtttaaagaaatattaggggcattcctctcatatcaaaattattgtttattgacacaaaatggtgaggtattgagtacagtgctctaagatattccctttgatataaaaatcatattctgaaaatcgctatatcttattatattattttgtatgaatctacattttttttctgtgcatgtgaagtagctttattaatcggcaaataatttggcaaagtgttttatgacagataggacacaacttgagattagaccgtctttgaaatataatgaaagctgatggatgttgtaaatattaagctttttaaaacatcgtttaaatttcccaatgcaatgaacaaaaaaaaacccaccgaaagccagtcccgcaagaaaagagccaggtgacgaattcttgattcataaacggttgtttaatgaccgatgatttgtttaccactcgaactcggggggaatgcaggcctccttctctccaccctcaccatcaccaccggcaccggagatgatctcggcgatgctgatgtcgtccagaacgctgttgacggcgggcagggcaatactctcgatggtatcggcaatcagatcttcgttctcattgatggccagctccacggcctcggccaagtactcattcatcttctcgttgatgctgccatcgcccaggatgccctcgatctcggaatcaacctcacccaagtgggtgcggacctccaatgacttcagcttcaggttgccgctgatcacgccgagtgagtacttcatagtgccccagataaccatatccttgatggcgaatttggcatgtccggcaccgatcagattgatggtaaatccgtacttctttagcagcacactcaaatcgtattgggtatccacgttcacgtcgcggaaagtgaacttgtaggtcaccttgctggtgatggcgttgaccttcatctcatcgatatcaaaatcattcagaccgttcaggcggaagtgatcaatggttccctgagccttcagcacgctgctatcgatgttgatatcctgatggtcaattctaagaggagccaatggcggcaggccgacactggtaaagccacagggcatctgctccttaatgccctcgatcacatccacaatcgtgctggagatcgactgggtttctagagaatcaaatggataggtatgctaaatatttgggcattggaaatcatctggaatactcaccaatgggctggcccatggaagccgcactggcaacggccacaaaagccaaaatagccacgaagattttcattattgctttgactgagagtcctaccgactgatcgtagtacctacggtatttatactactcagtcgtccggtcgcacgagtcgctttttatagacgatcaacatttcaggtggggttgtgataaggtggcttcgtactcgtgaacgatttgattagccaccgggcgttcaatcgatggcctattgctgtcttatctcggccaacgattccccggttggcaaattttttaattttaatgattagttatatatacatacatgggggtacttatcctaaggaaatgatcagatttaaaaagacagttttcactaaagtacaaacattgccttcttgtggaggagtgtcaagatcaaagtctatttggggtgtgtccccgctttgttatggttagaaggcttcaaaaaagtgtgtttttctaaaacgttttctaaaaaagaaggtgtaggattagtggttgacttggaaacaagattttaaaatcattagtttcgcgattacagagtactcatacattaaatgtatggtcttacgaaaactttccatcaatcgatattttaaggtcatgcaggtgttgaagccaataggaaacattttaacaaagtaattatcaaaattgaaaacgactaccaaaaatttagcatgattataatcttctaaagaagtctgtttggaattaaaattctccatgcacttctgcggatctaaagtctgcgaaaagtttgtttattgattaacaatcaagtgatttttaagtgcattgagtgatttatgaatgatatctcgactggggtatttaaaggtcttacgaatggatctattaataaaaaaatccagacgattaacacctgatggctagtcaaatactctcttaacgaattattggctttaaagttaacgccagtcctagcccaatatgtttatcaataagtagtttacccattgtgttagttccccttgtaaaatcgtaatcagaatagcaataaatcactttttagtacgcctttaaggttctaaagagtacaaaaaagccactgaagctctgaa

SEQ ID NO: 19154 - DNA, 826 bp, DROSOPHILA
taggtactacgatcagtcggtaggactctcagtcaaagcaataatgaaaatcttcgtggctattttggcttttgtggccgttgccagtgcggcttccatgggccagcccattgaaacccagtcgatctccagcacgattgtggatgtgatcgagggcattaaggagcagatgccctgtggctttaccagtgtcggcctgccgccattggctcctcttagaattgaccatcaggatatcaacatcgatagcagcgtgctgaaggctcagggaaccattgatcacttccgcctgaacggtctgaatgattttgatatcgatgagatgaaggtcaacgccatcaccagcaaggtgacctacaagttcactttccgcgacgtgaacgtggatacccaatacgatttgagtgtgctgctaaagaagtacggatttaccatcaatctgatcggtgccggacatgccaaattcgccatcaaggatatggttatctggggcactatgaagtactcactcggcgtgatcagcggcaacctgaagctgaagtcattggaggtccgcacccacttgggtgaggttgattccgagatcgagggcatcctgggcgatggcagcatcaacgagaagatgaatgagtacttggccgaggccgtggagctggccatcaatgagaacgaagatctgattgccgataccatcgagagtattgccctgcccgccgtcaacagcgttctggacgacatcagcatcgccgagatcatctccggtgccggtggtgatggtgagggtggagagaaggaggcctgcattccccccgagttcgagtggtaa

SEQ ID NO: 19155 - protein, 260 aa, DROSOPHILA
MKIFVAILAFVAVASAASMGQPIETQSISSTIVDVIEGIKEQMPCGFTSVGLPPLAPLRIDHQDINIDSSVLKAQGTIDHFRLNGLNDFDIDEMKVNAITSKVTYKFTFRDVNVDTQYDLSVLLKKYGFTINLIGAGHAKFAIKDMVIWGTMKYSLGVISGNLKLKSLEVRTHLGEVDSEIEGILGDGSINEKMNEYLAEAVELAINENEDLIADTIESIALPAVNSVLDDISIAEIISGAGGDGEGGEKEACIPPEFEW

SEQ ID NO: 19156 - DNA, 2335 bp, DROSOPHILA
atttatttcagtccattttcatgtttgattacgtgacacatttactgattgctactcgtaaaaatgttctcgactgcaaacaaaaaaccagcagagacaaaaagttcggcaggatttaaaggtgttatctggttaatgaactctggaaaggattaagtcagaagatggcccacaaactttagagtatacatggaagagatagattttgaacataacccaaattaaaagttcattcgaagcacatgatattcaaataccagcaataaaagagaagaaattttcgtctaaatatcataaatttgggaagcatttggaactcaagcagcgagaaaagggttcgatcctccgaccgaaagtattcataaatttgtcaaacgagacgctctcaagcagagaaaggtcattttaatagcacgtaacacaacacttttacctttacagaattccagttaaggccgaaattccactctacttttgtcgtggaaattagggcagacgaacaaatcaccacggggaccacaggtagctaaaagcaggtaaatgtcggccaaaaaccaaaagaacctgaccaaatgtataaactatgttaaagaggcgccacagtatcgcatattactgatcccatatttgtgaaagttgagctagacgaatctttatgacccacaggtcgagtttatgtctaaaatgtattttatatttatgtcctttcgtctgcatttatatgtataacattttatatgtataactacaaataccatataccccactctatatttcaaatacaattttatcacagctttggaaaatatcggaactcttatttcaaaagcttcttagagtccatgtccattataatatggtaaatactttatttgggttattatatcttttaaatgatatattacatattgcatagatacataatattttgcttgaagtaactgcggttaaaaagcatatgcaataatcgctgtttaagatatttgctggtgaatccaaaattatgccatgttcagttgctggcgcacactctctatttcatcaggactcatgacatccgagttgaagtctgctttgtgagtttgtatcaaatgcccagtcgcatcgttcacactatcctgaacactgtagtcgtatagggttctcaacatgccattcatcactttctgggatcttgattgtgaactagactgaacgcttataaagggggcagcatcgctaaattgccaaaggcaaatgcaggctaagtgatgaaaactaaattaggcaaactctaagaacctcgaagatccttacgaacttacagaaaatgcagatcaccgcgaagtagttcattgtggaaacgtattctctagactgtaaagaatccaaccagcacttggcctaagcgttatgaatcgcatttattacggctaacaagatcagaaaaataagtaagtgcgcaattagaaggtcttgcaatgactcaatactattgtttctgttcttaaatgatgggaaaccatatgattttaactattaaagtgttggtagattcccttgggaaggatttgtctccgtgggtacatcggtagcgactttcgcgatttcgttattgatcttctgactaagttctttcagaagtgttagatatttgttacggtaagtgttcctgacgttggcttcctgaaactgattggcggcaggtggggcgctatccttactagaacgtttcttacacggctttgtggactttcgagtgttttgcagttgcccattcaattccaaaagtctgcggttcacagtatttagctcgagctctaaatcgaggtttaactgtcgtactttgataatatccgtttttctggcctctatttctttcatcaagtatatggaatggttccggagaagtaaactattgttctgctccgttagtaacctctgttgcagggccttgagcgcactttgattggatccttgatttttttcttttgccgggaaatcatctagtcctttattgaaaggaatattattcaagtcaatggaagagctttttagtgatttggacctattgattggataatcatccagcggcaaatcagaaatatcgatatccattatataatcgccctttttcgcatctttcagagctacatcatctttggctattttggcctgtgtctcatcattcttgggagcaacatttttcagagatgcacttttcgtagaatcacttttcaggtgcatagctgaatcgagttgttgctcactatcgcagcttgccactgtaaaaagcagcactaaacgaaaagatactcgttcttaaatgtgctcaaaaatgcataagtcaacttac

SEQ ID NO: 19157 - DNA, 274 bp, DROSOPHILA
atgaactacttcgcggtgatctgcattttctcctgcatttgcctttggcaatttagcgatgctgccccctttataagcgttcagtctagttcacaatcaagatcccagaaagtgatgaatggcatgttgagaaccctatacgactacagtgttcaggatagtgtgaacgatgcgactgggcatttgatacaaactcacaaagcagacttcaactcggatgtcatgagtcctgatgaaatagagagtgtgcgccagcaactgaacatggcataat

SEQ ID NO: 19158 - protein, 90 aa, DROSOPHILA
MNYFAVICIFSCICLWQFSDAAPFISVQSSSQSRSQKVMNGMLRTLYDYSVQDSVNDATGHLIQTHKADFNSDVMSPDEIESVRQQLNMA

SEQ ID NO: 19159 - DNA, 2642 bp, DROSOPHILA
tgccaatcactatccaaatcagcagggctacggcggctatcatccgtttgcgggcaatggcgtgcagcagaactacggcggcatggtgccaccaggtccaggtggctacgtgggtccgccccctaatccgtgggccagcaatgtgccgccacagccgcccttcaaccagatgccccagaactttatgggtgcccagcagcagcagcagcagcagcagccgcactttaacaacatgttcggtggacgtcactagagtgtcgtagacttagatatccatactattaacgttatgcaatttaaacgtaatgtagaaacgagaataacgccctttgaagtgcccgtgtatctgctagctggcaagtgatttttattatttttttttttaccatacatgtgtgctgctgccaaaaaaaagaaaagaaaataatcactaccttcatttgtttataaaacaccgaacaacaatagaattcagaaaacataaatctgaagagcacgtgaataaacatacacaataattccggaaatcaactttaatcgactttcgtttggaattattagctgggggagctttgagttctgaattctgtgtattgaaataaaaataaacgaaatggaacgtacaagtgacaaataataaaataaaataaaatatgtatagctacatatgatgttcttcaatggtgatttgattattattatttgatttatacattaaacaactgatttttaagtttattcctctcaaaaacaacaaatttaaacttcgaaaccaaaactaatcgtacataaatgaataagcgaatgcaaagcatttataccagaagctaagcttcacagctccagggaagtataagtatatacctttgctcatccgcagcagcagcagttccatgtatatcgagtgaccactgtgccaacagatgaagaacaataaatatatcaaaatcgaacgtttcaaccgactttttatggaggagaatttaaactaatcacggaattaactacagtagggcaggcgtaggaagtccacggactgtgacttcagtatgccgggtatctcctgctgcaacagttcgtgcagcgactgaccactgtgcttgtagatccatctgcccgccgccacagtgccgacgaaatcgtatcgcttgggaccgctggtgggcgaactgagccagatctgcttgttgggcgtctgccggttgatcacataggtgccgtgttgtcctcccaggttcacggttagcacgccatcctgtggaagcggaaaccccgcgaggattagcaggtcaatggaatgatgtaatagccgaatgtcacctacgctgtaagccacatccgtgccctgcagctcggaggcgttctccgtcagctcctcgaagtagtcgcacagtgcgtccagggtgtcggagcacacacgctcgtaggtggcgccgtccaatgtggattccgtctcaatttgactgctaaacaatcgccggttggcagtgaattcctcgcattgaatagcaactgcggctatcgctggtgtgctgggcaggatcacttggctggcgtgtgcttggggctttgaccacctgcccatggtggccaagcatgcccgaccaacgatcgaacggaccatcaaacgaccggcaaacattttttagttgtttacgatttgtttatattttacaaatcccagttgcggggctgccaacttaatggaaaatgatttgccgttggtattttctagattctagtgtggtataatttttgatttctataaagctgaataaaaatgagaagttacagattttttttattagtagcagcaattcagctaaagtgttctgctagttttaggtaactaaaattttgtatattctctagcagttactatttccttatcatatatattccgctatatataccaattcccggcttatatgatttttcttagaatcagatacggccacacctccaccaacgccgacagaaaatggcgtctgtctgaaaattgttatttctcttggaaaatccatacaaatttgaccagcgaattgcacaaagatggccctgccaagcaactacaagcagatagccgttggcggccagggatcggccacaccactccagggcggcggcggtggctccggcggcggcagccggtcgcgttcatccggcggcggaggtggtggcgatcgcaacaaggatcagacgcccatcttcacgcacagcaactatgggaatccggcattcacgccacagaaggtaaccaagtcgtcgagcagcaagaaccagaacgaatcaaggctacccaagccaccaaagccgccggagaagcccattttgccctacatgcggtattcgaaacgcgtctgggatagcgtcaaggcgaagcatccagagctgaagctgtgggagctgggtaagaagatcggtgccatgtggaagttgctgcccgaggatgagaagacggagttcattgacgaatacgaggcggagaagctggagtacgagaaatcgctaaaggcctaccaccagacgcccgcctatcaggcctacatgtcggccaagagcaaggtgaagaccgacgtggatatgcatgagacaccgtcacgcggtggcggcagtaagtcgcagcatgagcgacgcatcga

SEQ ID NO: 19160 - DNA, 573 bp, DROSOPHILA
atgtttgccggtcgtttgatggtccgttcgatcgttggtcgggcatgcttggccaccatgggcaggtggtcaaagccccaagcacacgccagccaagtgatcctgcccagcacaccagcgatagccgcagttgctattcaatgcgaggaattcactgccaaccggcgattgtttagcagtcaaattgagacggaatccacattggacggcgccacctacgagcgtgtgtgctccgacaccctggacgcactgtgcgactacttcgaggagctgacggagaacgcctccgagctgcagggcacggatgtggcttacagcgatggcgtgctaaccgtgaacctgggaggacaacacggcacctatgtgatcaaccggcagacgcccaacaagcagatctggctcagttcgcccaccagcggtcccaagcgatacgatttcgtcggcactgtggcggcgggcagatggatctacaagcacagtggtcagtcgctgcacgaactgttgcagcaggagatacccggcatactgaagtcacagtccgtggacttcctacgcctgccctactgtagttaa

SEQ ID NO: 19161 - protein, 190 aa, DROSOPHILA
MFAGRLMVRSIVGRACLATMGRWSKPQAHASQVILPSTPAIAAVAIQCEEFTANRRLFSSQIETESTLDGATYERVCSDTLDALCDYFEELTENASELQGTDVAYSDGVLTVNLGGQHGTYVINRQTPNKQIWLSSPTSGPKRYDFVGTVAAGRWIYKHSGQSLHELLQQEIPGILKSQSVDFLRLPYCS

SEQ ID NO: 19162 - DNA, 3599 bp, DROSOPHILA
gaatctgtgcgttattctgctctcccagctgccctttgagaagttctacaacaagaccggacttagtgaaatcgtctgcctgcacttggcgcagtacaacaaggcggagacacagcgcatcctgggatctgactttcagcaggtgcgaaatcaactgctggaacagttcgcccaggataagaagcgtctggagatttgccaggaagccgtaactgaagacttctacaacaactatctgaatctctttctgagcgtcttttacaaagcctgtcgcgatgttccagagctccagctgaccgccaggaagtgtctgtccacatacttggagcctgtactcgacggcactgtggatgccacggacatctcccggctttggcggcatatagctggaccactgcgttccgccttaacccagatttatatgcgaattgaaaaacccgcggaagaagttgaagatttcaccgccatagaagatcagagcgttcgcaagctggcgcagtcgctggagctgccctactatgccaaatttctgttgatcgctgccttcttagccagccacaatgccgccaagcaggacaagcgattgttcgtcaagcaccatggaaaacagcgaaagcggatgcagacggtcaacgccagagccaaggtgggttattcaatttttcgatgactccatttgcttattttaataccttttagaccacggagaaaatgtccaccactttgggacccaaatcctttagcatcgatcgtttgctggccattttctacgccattctagaggagaaagtcggtctgacctgcaaccttctctcccagatctcaactttggtgcacctcaatctactaagcttcgtctccggcgaacaaaacataatggaaggttccgctaggctgcagtgcaccattggcttggagtttgtcctgcagattggcaaggtggtgggctttaatgtccgccaatatctctgcgactttatgtagcccctggttgttttttttagtttttaaatatatttaataaatagtccggtacatcgcttatgtgtatggtctccgccagccttgtgtcccggctgcgcaactgcatcagtccgtttcttagcgtttgctcgtttataacaagtgtataaggtatgccgagcatatccgtttccagcaagtgctctgctaaatgagaagcgttcttcgtcgtacgaattccatccccttcagaaagtctaagaccggcgtggttgagaacatgtttcagatgctgacaaagatcagacaagtcagcagatagctcggaatcactttccacacaggcaattccacattgatatggcgccagaacgcggtgtaagagcagggattgcgagtcccggccatgatcacagccatccagaagcagagctaaaggataataatatagaaagattttcaaagatagttatgatgaccacttaccgcaggtggtagtttccagctctatcacagaccttatgacagtcggttgcacaatttcacccgttcgcgcatcgggcagccggaagtctttgtcgtccactattctcaccaggctcagttgctccacggtcacttctcctgcatcaccgtagctcgtgcggatatcgatggcttgatagtcgttgggattgagatcctcagccaaatcgcaaggtacgatgcggtagcgactgggattcgaggaaagacgcatccaccagatcttgctctcacgctgcatgttgtagaagtgctccagtgcgcgatgtggttccactaggaagtccgtggttaaatgtagcgtaggaccctttatcccaaatagggaattgctagtgggaccagaacaagtgctttgatgtttcagaagagtgggacatttggcctttcgaggatgatctttgacgagtttttggaaattgttacggaattgctggctttgtggaaaggaaaaacgctggatgttgactggatttatgggttctttcgtggcgcccaggtgcgcagccaagggacgtagtcgtgtccaatgctgttgcaacagtttggcgtattcccttccatgactcagtagctccagtttattgtcttccacggtgcgaaagaagccagcggaagccagggacttaaagcatcgttgtatgcgactcattgctccagcggaatgttgcccggcggcgaaacgaagtagtcctcgtccgtcaccttggcgttccggagcacctccgcccggcaatcgccttcggtcacctggtcgttgcgtaactggagctgctgatgctccaggaccgtgtacagtggacgcacgtgctccgtgttgatatgggcaatcttgtccgcgaactgtatgctgctctttagcgtggccagcgctcgttcgctatccagatccaccagcgacagccgctccagcaactggatggttttcgtgtcgatctggatttcggaggcgctggtgtcgggaaacttcgagtccactggtgtctgtggcaccttggtgggatgcgttagctgcttgaagtccaatttagtggccttttcattcgattttgttgcaattttgcagtaaaaacggctgctgaacagacgcaacattctcaccagcacaaaatcagaggtggaactgagtttcggaacaatcagctaaatgttatctgaaaagtattgtccttgcaaaaatgttgatttatgtgtttattctatcttaatttaaagcaattttcttgttattgtgatctagtttaattaaacatgtctccatcacatttgttcaatttaatatatccagcccttattgttaaaaatctagctataaatccgaaacgagaacaacaatcgataacggcacacttatcgccggctgttattgctgcacttccatcgcttccttttcactgagcgggttatttttttcgtgaccctttaatttcatcaaaacaaaaccgcaatgccgtacgccaaccagccgtccgtgcagataaccgagctgacggacgacaacgtaaagttcgtcctggaggacacggaactgagtgtggccaacagcctgcggcgagtgttcatcgcggagacgccgacgctggccatcgactgggtgcaactggaagccaactctacggtgctctcggatgagtttttagcccaccggatcggtctgataccgctgatctccgacgacgtcgtggagcggctgcagtacacgcgtgactgtatctgcctggacttctgccccgaatgcagcgtggagttcaccctggacgtaaagtgcagcgaggaacagacgcgccacgtgaccaccgccgatctcaagtcgagcaatgccaaggtcctgccggtgacgtcccgcaaccagggtgaggaggacaacgagtacggcgagagcaacgatgagatcctcataattaagctgcgcaaggggcaggagctgaagctgcgcgcctacgccaagaagggatttggcaaggagcacgccaagtggaatcctaccgcaggcgtgtgcttcgagtatgatccggacaactccatgcgacacactctgtatcccaaacctgatgagtggccaaagagcgagcacaccgaactggaggacgaccagtacgaggcgccctaca

SEQ ID NO: 19163 - DNA, 1492 bp, DROSOPHILA
ttttgtgctggtgagaatgttgcgtctgttcagcagccgtttttactgcaaaattgcaacaaaatcgaatgaaaaggccactaaattggacttcaagcagctaacgcatcccaccaaggtgccacagacaccagtggactcgaagtttcccgacaccagcgcctccgaaatccagatcgacacgaaaaccatccagttgctggagcggctgtcgctggtggatctggatagcgaacgagcgctggccacgctaaagagcagcatacagttcgcggacaagattgcccatatcaacacggagcacgtgcgtccactgtacacggtcctggagcatcagcagctccagttacgcaacgaccaggtgaccgaaggcgattgccgggcggaggtgctccggaacgccaagatgagtcgcatacaacgatgctttaagtccctggcttccgctggcttctttcgcaccgtggaagacaataaactggagctactgagtcatggaagggaatacgccaaactgttgcaacagcattggacacgactacgtcccttggctgcgcacctgggcgccacgaaagaacccataaatccagtcaacatccagcgtttttcctttccacaaagccagcaattccgtaacaatttccaaaaactcgtcaaagatcatcctcgaaaggccaaatgtcccactcttctgaaacatcaaagcacttgttctggtcccactagcaattccctatttgggataaagggtcctacgctacatttaaccacggacttcctagtggaaccacatcgcgcactggagcacttctacaacatgcagcgtgagagcaagatctggtggatgcgtctttcctcgaatcccagtcgctaccgcatcgtaccttgcgatttggctgaggatctcaatcccaacgactatcaagccatcgatatccgcacgagctacggtgatgcaggagaagtgaccgtggagcaactgagcctggtgagaatagtggacgacaaagacttccggctgcccgatgcgcgaacgggtgaaattgtgcaaccgactgtcataaggtctgtgatagagctggaaactaccacctgcgctctgcttctggatggctgtgatcatggccgggactcgcaatccctgctcttacaccgcgttctggcgccatatcaatgtggaattgcctgtgtggaaagtgattccgagctatctgctgacttgtctgatctttgtcagcatctgaaacatgttctcaaccacgccggtcttagactttctgaaggggatggaattcgtacgacgaagaacgcttctcatttagcagagcacttgctggaaacggatatgctcggcataccttatacacttgttataaacgagcaaacgctaagaaacggactgatgcagttgcgcagccgggacacaaggctggcggagaccatacacataagcgatgtaccggactatttattaaatatatttaaaaactaa

SEQ ID NO: 19164 - protein, 491 aa, DROSOPHILA
MLRLFSSRFYCKIATKSNEKATKLDFKQLTHPTKVPQTPVDSKFPDTSASEIQIDTKTIQLLERLSLVDLDSERALATLKSSIQFADKIAHINTEHVRPLYTVLEHQQLQLRNDQVTEGDCRAEVLRNAKMSRIQRCFKSLASAGFFRTVEDNKLELLSHGREYAKLLQQHWTRLRPLAAHLGATKEPINPVNIQRFSFPQSQQFRNNFQKLVKDHPRKAKCPTLLKHQSTCSGPTSNSLFGIKGPTLHLTTDFLVEPHRALEHFYNMQRESKIWWMRLSSNPSRYRIVPCDLAEDLNPNDYQAIDIRTSYGDAGEVTVEQLSLVRIVDDKDFRLPDARTGEIVQPTVIRSVIELETTTCALLLDGCDHGRDSQSLLLHRVLAPYQCGIACVESDSELSADLSDLCQHLKHVLNHAGLRLSEGDGIRTTKNASHLAEHLLETDMLGIPYTLVINEQTLRNGLMQLRSRDTRLAETIHISDVPDYLLNIFKN

SEQ ID NO: 19165 - DNA, 4223 bp, DROSOPHILA
cttcaagcgcctcggcccgattgcaatattctcggcgagacgccactggacagcgcccagatgtgtgcgtctccagaaaggttcctccctgtatcacagcgtgcccagcaatgacaacaagtgcccattggataacgatgatgacgaggagcacgatggtggatacaatctgtacaaggaggagtttgagaactttggcttccatgtgcgcggcgatgctccggtgatcattgcccacgttgagattaattctttggcagacgtaagtaaatgctacttccatcgattcgtcgtatactgtaggcattattttcagcttggcggcatcaaggagggagacttcatagtcgagatagccggcgtggacgtgaagtggtactcccatcagcaggtggtgcagctcatacaatcctgcggctctacactcgagctgagagtgataacgcccatggatcgcaactacttgaaggtgcattttgtttattaatcatacgtaaaaaatcagcaaacaaattcaccttgtttacgcacagccattgtcgtcgaagggctcattatcaacgctatcggcggccagttcatcgggcatttcatccggatttcccagtcccacaagtattgcggccaagcccaagctccacctgaaaacatcctctagttcgcgacccgctggcagcgtttcatccagttcgtggaatccgtttcggcgaacgcctagcttagctaaaatattttaagtagccatcagttttattttgtgttttatttttttgctcttaaggcaatggccatttcaagttaaaaagaatgttgtgcagtttaagttaagcaataaacttaatgattttttaaaagcccctctattatacccataatttattttattcctattgattcaatcgctcccaatcacccatcgataataatctacacggaaaatgaattgaaataaatgtttttaatgttttatcgaatttaaaatatatatttatacaatttttgacatctacatttgaattaaatcattacgatccaatgatttcgaaatttcagttttttatgctggagtcgtagggtatcgcggactttttgaaatagtttgggatccaatccacttctgttttgcgaatcctcaaattacaattataaccgaatgctaacaatttatgttaattaatcacaccaacgactattgcccaacgagtttaagaatattgttgatttaactggaggatactgctatatgattacttcgcacgctttccatacacatttgaacataggttcttcttatcggggtgatgtctttatgcgttcgcagattgctatgcatagaacagccacaatatccacacaacggccaaatacgaaaacagcttggacagggtctgttcatcctcgtattgccttgttccccgattagcagctaaatacatgggcaaatgttatttaatatcaatctcagaactattgagatggcatgtaacctaccaggtggacgtggttcgccaaagttgagcgtagatgttatgaacccgaaaggaaaagctccaataccgaaagacatgtgaaatccgtcgccgaatccgaatccagggaacccgggaacaggatctggttctgtacgttgtccagcggggcgtggtggaactttgttactgcaaaacacatataagttgggttattgaaaaatactcatgttgaaagcggttcaaacctaccgtggatcttcctggtgtgtactatttcttccgtacagcggtatgaccttatccttatcaacggcagccttacaaacgggacagagtttgcgattgggacgcgtcaggagccactgatgcaggcacggccagcagaacagatggccgcacatgctgaccacagcatccttggcggtgtccaggcatatgttgcactcgtagagtgagtcgtctgcggtatgttccttctccttgtccttttcgttggcttttgtgtccgtatcggtgccgccgaatggatagccacccttcagatcggccttattgccaccagatagatagtctccagtaaaggaatacgaagtgttggacttcttcagttccgatgccgtcgaattggttggaatcgaggtacccagcgggcgcaattgacttgtagatgactcctcagccaagggttctgtgatatcccgagtccaggctatcttgtcgtagctcacgttgttggacaaagtcgatgaggacgacgatgccccggttgatgtgctgggaagctccgctgtgggtacacttttcggttcctccatggtttgcccaagatgcgggtaaagttttagtcgttcaagctgcaacgtaacgttggatgatttagaaacccaaatttgctaagtaagtctgtgttcaccctattgacaagtgcctagattgcttagatgattttcctaggccatttctggtgtacaactaaggtccgcactttcttgaatatgacttaatttaattaaatacttcaagcgcagtttgaagggggtttcccccgagttccgcagcattcagcatttgtccgaccccatggggtggtgtttatggctacgaaaaccgcccaaagggcgtatttaccaccaagtcttcaaggataatgcaccgaacattcccattggctgcacccacataaattaaacaaaaaagtcaaattttgtttgaattgcgttggcaaacaagacggtatacctgcatatgtacctggacttatgtgcgtacttatgtacacatctacacactcaaacactcgcgtgtatatagggctagaaggtttccatctacctgttacatatgtacattggaaccgattatatgcttatttatacagtacgtatagatgtcaaagatgtcacatgatgttttcatggagcacttcctattggagtcaaggggaattatatgctcatatacatcgagttccagggattgcgtttaaacgcattataacttaattaaactatatataacttcctggggcacagcaaatagtataacttctcgaaattacatacattgtaagtgtattgtttgcaaaacctgacttgtttgccctcattttattgtttgttttcgctcacagtttgcttctacttgccgtgctaagtattgttaaaccgaatcagagaatgttgctaaattgattgtgtggacaagtgtgttatgttacggtaaaattgggaatttatcaattgacgtcttagcacctcaaaacaactgcactgacgatacctgaccgaggccgatagacctttaccctatcggtaaatagctgcctgtataacagcccgtctccaccggaccaaagtccacgctcgcgttcgataactatcgagttaggtgaaaaatctcggatctcaatgaatcatttgaaaagtgatcagtgatcagtcctcgattgatttgtaaacaaaataaactactaaatacatttacaagactaaatactattcattaacagctgttgtgtgccatggacaatcgataccaggactcactcgactatctctagttcctaacgatctggtcacaacaaagctcaagaatttaataatattgatattagactaaaccaaaacaaggaacagctgatttttagaacgctaatgcgtttaagtcgtaatcgatagctcacccactgtacactgtacaccatccctaattagaactggcttctttcaaaacaaagcaaacgaaatttgaaactttttcaatttatatgttccattggtgactctggttgcaatgagctgctttggctgcggtcgcaaatatggcctattctgcaaggaggcaagtgccatcaaaccaaagcaaaccaacatatatcacctacttacattgtgttaaatccgaaattttagtatggatgccccaactgcggctactcattctgctccaagtgcttgaagagaccaatgcccgtgccccgtcatgcaggaaaggtgcacaatgtgtgcctcatatgctacgacaaactatccaaactccaggcgagcgccgatgccgagaaagttatagactgtgatgctttgccggggatcttagtcaccaaaatgaacctggctcctccatccaaaagttcagatggcgccgatgccctattcaagtaagtaaaataccacattaaaacaccgattctgaaactataattcgattaattgcagcgacagcctgcctgtggaggagctgccacaggcattg

SEQ ID NO: 19166 - DNA, 1653 bp, DROSOPHILA
ctaagacgtcaattgataaattcccaattttaccgtaacataacacacttgtccacacaatcaatttagcaacattctctgattcggtttaacaatacttagcacggtagatggaaaccttctagccctatatacacgcgagtgtttgagtgtgtagatgtgtacataagtacgcacataagtccaggtacatatgcagccaatgggaatgttcggtgcattatccttgaagacttggtggtaaatacgccctttgggcggttttcgtagccataaacaccaccccatggggtcggacaaatgctgaatgctgcggaactcgggggaaacccccttcaaactgcgcttgaagtatttaattaaattaagtcatattcaagaaagtgcggaccttagttgtacaccagaaatggcctaggaaaatcatctaagcaatctaggcacttgtcaataggcttgaacgactaaaactttacccgcatcttgggcaaaccatggaggaaccgaaaagtgtacccacagcggagcttcccagcacatcaaccggggcatcgtcgtcctcatcgactttgtccaacaacgtgagctacgacaagatagcctggactcgggatatcacagaacccttggctgaggagtcatctacaagtcaattgcgcccgctgggtacctcgattccaaccaattcgacggcatcggaactgaagaagtccaacacttcgtattcctttactggagactatctatctggtggcaataaggccgatctgaagggtggctatccattcggcggcaccgatacggacacaaaagccaacgaaaaggacaaggagaaggaacataccgcagacgactcactctacgagtgcaacatatgcctggacaccgccaaggatgctgtggtcagcatgtgcggccatctgttctgctggccgtgcctgcatcagtggctcctgacgcgtcccaatcgcaaactctgtcccgtttgtaaggctgccgttgataaggataaggtcataccgctgtacggaagaaatagtacacaccaggaagatccacgtaacaaagttccaccacgccccgctggacaacgtacagaaccagatcctgttcccgggttccctggattcggattcggcgacggatttcacatgtctttcggtattggagcttttcctttcgggttcataacatctacgctcaactttggcgaaccacgtccacctgctgctaatcggggaacaaggcaatacgaggatgaacagaccctgtccaagctgttttcgtatttggccgttgtgtggatattgtggctgttctatgcatagcaatctgcgaacgcataaagacatcaccccgataagaagaacctatgttcaaatgtgtatggaaagcgtgcgaagtaatcatatagcagtatcctccagttaaatcaacaatattcttaaactcgttgggcaatagtcgttggtgtgattaattaacataaattgttagcattcggttataattgtaatttgaggattcgcaaaacagaagtggattggatcccaaactatttcaaaaagtccgcgataccctacgactccagcataaaaaactgaaatttcgaaatcattggatcgtaatgatttaattcaaatgtagatgtca

SEQ ID NO: 19167 - protein, 277 aa, DROSOPHILA
MEEPKSVPTAELPSTSTGASSSSSTLSNNVSYDKIAWTRDITEPLAEESSTSQLRPLGTSIPTNSTASELKKSNTSYSFTGDYLSGGNKADLKGGYPFGGTDTDTKANEKDKEKEHTADDSLYECNICLDTAKDAVVSMCGHLFCWPCLHQWLLTRPNRKLCPVCKAAVDKDKVIPLYGRNSTHQEDPRNKVPPRPAGQRTEPDPVPGFPGFGFGDGFHMSFGIGAFPFGFITSTLNFGEPRPPAANRGTRQYEDEQTLSKLFSYLAVVWILWLFYA

SEQ ID NO: 19168 - DNA, 6829 bp, DROSOPHILA
agacatcctcgtaaatctccatccgcccctaaaaaaaaaaatggcgcatacaaatgggtgaaaggaaaaccatcgccgcaaacataaaaagtaaaactcaataatggcaggtgcagagctcttggtttttctgggccaggtgaaacctgcaattttcagtcggcccgaggctccgttcttttgctaaagcgccatttaaataagccgcaaagagatactgcataaaggacgaatatatatactcatactatatattttcctttttggctcacagtgatgccgcccgtcttttcgtcttttgcgctgcgctttggcctcattagcgtgcaacgtggcgtatgcgtaacgtgtttcactctcacctgacactctcctccgcccgtctcctgaaagacccgtcaacataaattccaaaggcgtcatgtgtcacacatcgcgttcacacacaaaagcccaagcccccgtatgtgaaaaatggccactgctataaatacgatttgtatggagcactagagaaaaacattgcaaataaaggaaaactgtcagcgtgcgcattcatcgaaaggagaaactaaagtgctggggatatgttgtgggcggtggatgctgctatcggggatcagatgaatggggctgcatcagaatgcattaagagtcatgctcataaccagaaaacaaaggattgcttacctaaaatgcatgagattccgtttgtttgcctgggcgtttccgcaaggaaaatacaatgattcacttctcattgtgtatgtggaggaaaatttaagacttgttaaatttttttagttgctgagttaaatcgttgctgagttgcaatggcaagccattatttgaagtttgaccaacctatttagctctcgaaatatactataatattttctgccattgaaatgcaattccaagacgctcaatgcccatccaaagctcagaggccgaaaaacacttatgttaattgatatttgcgaaagacttcgagcttgtaatggctcagtctgagttcctagccacctggcagcagcacctgaagcggaaaactctgggcaaagtgtaaggctaggcgggtcaaggatttttatttctgcaggagaacacacccacatccatggaaagtgcaaatacacacagaaatttgcgataacagttgagcaggaagcggaaatacaagattgcagcaaataagatggctttttatcggaaaaatgagcataatacgtatgtagctttttccaatatttaatctagtatttgctctggcaatttaacattgattccgcaaacgaggattgagagcaatgaaatttccaaggaaattgtgaatttatattggctgcaaattgcatttcctggaacagcttgaatcgatattaaatttctccattgacgcgtttagcagtttatcacccgatattatattgaacgaacgaaatacacctttgtttgcttaactccccttcatcccaatgatggtaattgataccatcagttctggccatgacacgaaaatgaatataaatggcatggatatgtctgaacgtgcaccggttttattcaacttgcgacgaacaggacttttcccccagcgtacatttgaatgacaaatggtcgaagccaacttgcaatcagccgcccacatagataactttgtttttccagcgaggaaaagttactaattgccaaatgatgtagccaaccgaaagggatactgcttgtggattattcaatcaggttgcatcgctttgaaatggaaattttctatttcttgccatctatcctgaatgctcaactttctcaaaggcgattgatggtcctgtccggagcttgaaattgcatcatctccttttgcttactgcagcttacactatttcaatagcatacttttgcgggcagcacccgtgggaggtttctggcaaggactcgatttcaacgacaagagcacgatgtcggcagctctgaccccacaaagagactcctgcgaggacttatctttgacacagcttaattggcatggcttccctggggatcgctggtttcgtggtgttgggctaccacctggggaaatcattatgtccgcaaaaatcaatcaaattattaaaatcatgagaaaactaaatatgccaataatgctaatatcaaagaataatgtgcgttaatgaaaacctccttattgttatgttttccaggtggcactgtgcgacaatctggaactgcctttccgggacgacagtttcgatgcggtgttgtcgctggcggtggtgcaccactttgccactaccgagcgacgtgtccaggcactcagggaattggctaggatcctaaggatcggtggtcgggttgtgatcaccgtgtgggcgctggaacaacgacatcgacgcttcgagtcgcaggatgtgctgataccctggcagccaccaaagaatcgaaactactcctactcggatgaggaggacgacgacaatttccagccgccttaccatgcctacaccgaggactctacgaattccagtcgatcggccggagatggcgatagctcaagtcttagttcgtcttcgccgggggaatcctgttacagctttgttcgccgggccattcaggtaaaccaaagattctgtcgctcataattgataattttgtaattattattatgttcttaaaccatagaaactagcccgtggacgccggcatgcgtggttcatggactcgtggtcgtcaaaggataccaagaacgacagcagcttggactacgaagatgccaaggatctgcccatcgagctgcgtcgcctggaggactttgaggattttcccgatccgccattatcagccggcctcaaatcacgcagtttgggtagcattctgcagccaccaccccgccagattgtccgctcacgctccagtgttcccagtctgggtggtcctctgattcctggtgaatctaaagccagtgccgcggctctgctactcaataatccggagagtcagcagcttcagctgcaactccaactgaatggaagacattcacccaccaccacggcaagtgctgggaatacgttgagcagaagaccaaagctcatcaagcagaagcagtccttgtgcgatgatgacgctgccactccacccgcccccgaatcctttcaggtggtaagtagcctgaatggctccaatggcgtggtaagcagcagtttgtacacaaagagtggctgctatgccgggaatttccatcagcatgcctcagcgacggccacgcctccttcgggtgattctggtgaaggaggagtaactggcggacccactggtgggccgacgttcctgcgcaaacaaagttcccttaacgaggatctgatggcctgcaatcgattgagagaaaaggagagggtgcgcaagcgtattcaaaagcaaacctcgctaaatgaagcattcctctgcagatcagctctgttctccaaaagattgcaggtaatccgtgagggtttcaccaccaaaatcaagagctcgacaggcagcctagaaagggtgacaaagacgggcataagtaaactgatccaaaacatcaagagtggaccgcaggcgcagacgaatcctgcccagcatccagttcaactggataaaaacgccacgctgaataataacaataagcagggagtggcggcgacggctcatcaacaccaccatcaccaccaccaccatcctgttcatcacctgtcgcacttaattctgcccgcatcctcgacttcggcacctgtgacgtactgcagcagtgtggagtgcaccatgagcaatctctgtcactgcagccagtaccagcaagagtgtcccgcctgtgcggatggcggtcagggtgacaaggctagaaggcattcccgggaatccggttccgactcctccaaggacagcagcctgcaatcggacacaagtattgagtccgaggacagcttcgcttcggtcatattcatacccaagccggagcagcaccagcagcagttgaactaccagcagcaacaccagaactctaactccagctcgagcaattcatcctccagcaatggacaaagggcgcagggagctgctggtcgggatcagggggtgaatcccggctcccgattgccgcctactcactcagtgccaacgtcgccgctcatcatgccctgccctcccactccggctcattccccggctgccatccagggcacggtgacttctccgcctcaatccacatcggccgtttccgctgccatggccatcttgacgccaccctcgaaacccgctcgtttcagcttcgatgaggcccacatcaagctgcaaaaggaacagcacgttgatctgcaaaaggagctacccaaggagaaaaaggagccgttgaaggtgctgccaaaggaaccactgaaggaatcgccacctgtacgtagaatcacccgccaggccattagagatctgccacccattccgaaattccggaaacagcaatctctacagctacaacgtcagagctttcccatcgttaggcgagcttcgggatcgggcgtgtctacttcagcatccaccacatcgctggctaccaagctgctctccctggagctctttaatccagccaccgatgatctggacagcgattccagtgagccctcctcccctgattccatagacagcgttataagtgcaccaagatcggccaaagtaccctcgggaagtgaggaaggagaagccgcctccgcgaactccaattcggcctcgcaggacgaaggagaacccagcttggcgcagctcatcagtctgcagcaggagcagtaccataaaggggagcttcagatcaatagttctcgctcccatgccgaagatgatataatcctgaatgcagatagtgcccctctcctccccgaaaagagggaggccgttcaaaagcaggactgcgcagaattcgcggaacagctgagtgcccaactgcagcgggaactggatgacaaaacaaatcgaactgagtgccggtatctggatgggatcggaatgggcgatctgtccgagatcttgggtggcggtaagaagcgctctaatggtgatctgagtgctttccgggatgagctcagggaacgtcgcttgatgcttgctaacctctccacgcagccaagtctgcagcaatccccggtgagctcatcgacctcatcactatcctcccaaacccgcagcttcaccatccaggaagaggatggtgaggaagaggaggaggaggagaacgagtccagctactccctgggcgtttatgagcactgcaagatctccaagttcaactacaagaggaatcgacactatcagctgaatccggagacagcctacctgctgcaggacgatggggatagtgatgtgcgcgaggatgaagacgatgtcataccagaggaggaggagcaggaggaacaggatgaggatgcagaggcagaggctctggaggcccgaggcggtgatcagttgggcgaaggcatgtcggactatggccagcgcaggcgcaacatggctgccctgaaggtccaaccaccgacgacccagcagcagcagcagcaacctcagaaggagccaaaccaggcaccgaatctccagcagcgtccctccaacgattccctggagcactcgaacagctccaccaactccctggacagcccctcccagggcggagccagcacacaccaccgctactaccatgtgttccgcgagggcgagctggacgcactgatcaaccaccatgtggccagcctgcacatcgttagctcctactacgagcgggccagctggtgtgtggtggccgagaaggttcaggtgtggaccatctaagcacccaactctcaaacggggattcgaaacgaaacttaagtttatttgctattactgggaccgaagcatgtataccaaatatttaaaggatatacgttaaattactttgaattacatttttttatacgcatctaatacattttaagttgctctacaaaaacacttgaatatctttttaggacattcaaaatccaagcagcttttttgattttttcaaggcgtacccgtttacccgtttgaatccctgatctaaaacaaatgcccatttcctagctgtagtctctgatctgatgcccccaaaggaattgttaaatttagtctattactctagtcggctggcggtgcggggcggggaaggcccgtcctgctatccagcactaatttattgttagcaggcctgctcaaggacgcgaacgcaggattgcactgcattgaaatccaatttcaaaggaaaacttagctgtaagaacgaaaccaatcgaatcgaatgcgataacgaaacaacgcaagctaaatacaaatcttactagttatacgagcatattctatttacaacgatcatctgtttgtatcttgcgctatctgcagactaagtttcaagcactttatgctataatttcgaagcgaataatcatcaaacgtccattgcagccaacatataccacttatacaagagaaaatcaagataccagttaagcagctagaacaaagtaatatagcaactatgtacgtgcatgtatacactccttaaaactgcaaagttaatagaaccctctaaaaatatcaataactgcatttaaatctatgagaaaaccgtacatatatcgaatgcaaagtaaaatcaaaaatatatacacaaaacagtttaagaaactctttccgcaagctcacaattttccacatatataaatttttcacctttttaaagcacttttttatttactttaattgattggataaagtacccaactcacttcccaaaaacggccaataagacgat

SEQ ID NO: 19169 - DNA, 3813 bp, DROSOPHILA
atggctcagtctgagttcctagccacctggcagcagcacctgaagcggaaaactctgggcaaagtcttacactatttcaatagcatacttttgcgggcagcacccgtgggaggtttctggcaaggactcgatttcaacgacaagagcacgatgtcggcagctctgaccccacaaagagactcctgcgaggacttatctttgacacagcttaattggcatggcttccctggggatcgctggtttcgtggtgtggcactgtgcgacaatctggaactgcctttccgggacgacagtttcgatgcggtgttgtcgctggcggtggtgcaccactttgccactaccgagcgacgtgtccaggcactcagggaattggctaggatcctaaggatcggtggtcgggttgtgatcaccgtgtgggcgctggaacaacgacatcgacgcttcgagtcgcaggatgtgctgataccctggcagccaccaaagaatcgaaactactcctactcggatgaggaggacgacgacaatttccagccgccttaccatgcctacaccgaggactctacgaattccagtcgatcggccggagatggcgatagctcaagtcttagttcgtcttcgccgggggaatcctgttacagctttgttcgccgggccattcagaaactagcccgtggacgccggcatgcgtggttcatggactcgtggtcgtcaaaggataccaagaacgacagcagcttggactacgaagatgccaaggatctgcccatcgagctgcgtcgcctggaggactttgaggattttcccgatccgccattatcagccggcctcaaatcacgcagtttgggtagcattctgcagccaccaccccgccagattgtccgctcacgctccagtgttcccagtctgggtggtcctctgattcctggtgaatctaaagccagtgccgcggctctgctactcaataatccggagagtcagcagcttcagctgcaactccaactgaatggaagacattcacccaccaccacggcaagtgctgggaatacgttgagcagaagaccaaagctcatcaagcagaagcagtccttgtgcgatgatgacgctgccactccacccgcccccgaatcctttcaggtggtaagtagcctgaatggctccaatggcgtggtaagcagcagtttgtacacaaagagtggctgctatgccgggaatttccatcagcatgcctcagcgacggccacgcctccttcgggtgattctggtgaaggaggagtaactggcggacccactggtgggccgacgttcctgcgcaaacaaagttcccttaacgaggatctgatggcctgcaatcgattgagagaaaaggagagggtgcgcaagcgtattcaaaagcaaacctcgctaaatgaagcattcctctgcagatcagctctgttctccaaaagattgcaggtaatccgtgagggtttcaccaccaaaatcaagagctcgacaggcagcctagaaagggtgacaaagacgggcataagtaaactgatccaaaacatcaagagtggaccgcaggcgcagacgaatcctgcccagcatccagttcaactggataaaaacgccacgctgaataataacaataagcagggagtggcggcgacggctcatcaacaccaccatcaccaccaccaccatcctgttcatcacctgtcgcacttaattctgcccgcatcctcgacttcggcacctgtgacgtactgcagcagtgtggagtgcaccatgagcaatctctgtcactgcagccagtaccagcaagagtgtcccgcctgtgcggatggcggtcagggtgacaaggctagaaggcattcccgggaatccggttccgactcctccaaggacagcagcctgcaatcggacacaagtattgagtccgaggacagcttcgcttcggtcatattcatacccaagccggagcagcaccagcagcagttgaactaccagcagcaacaccagaactctaactccagctcgagcaattcatcctccagcaatggacaaagggcgcagggagctgctggtcgggatcagggggtgaatcccggctcccgattgccgcctactcactcagtgccaacgtcgccgctcatcatgccctgccctcccactccggctcattccccggctgccatccagggcacggtgacttctccgcctcaatccacatcggccgtttccgctgccatggccatcttgacgccaccctcgaaacccgctcgtttcagcttcgatgaggcccacatcaagctgcaaaaggaacagcacgttgatctgcaaaaggagctacccaaggagaaaaaggagccgttgaaggtgctgccaaaggaaccactgaaggaatcgccacctgtacgtagaatcacccgccaggccattagagatctgccacccattccgaaattccggaaacagcaatctctacagctacaacgtcagagctttcccatcgttaggcgagcttcgggatcgggcgtgtctacttcagcatccaccacatcgctggctaccaagctgctctccctggagctctttaatccagccaccgatgatctggacagcgattccagtgagccctcctcccctgattccatagacagcgttataagtgcaccaagatcggccaaagtaccctcgggaagtgaggaaggagaagccgcctccgcgaactccaattcggcctcgcaggacgaaggagaacccagcttggcgcagctcatcagtctgcagcaggagcagtaccataaaggggagcttcagatcaatagttctcgctcccatgccgaagatgatataatcctgaatgcagatagtgcccctctcctccccgaaaagagggaggccgttcaaaagcaggactgcgcagaattcgcggaacagctgagtgcccaactgcagcgggaactggatgacaaaacaaatcgaactgagtgccggtatctggatgggatcggaatgggcgatctgtccgagatcttgggtggcggtaagaagcgctctaatggtgatctgagtgctttccgggatgagctcagggaacgtcgcttgatgcttgctaacctctccacgcagccaagtctgcagcaatccccggtgagctcatcgacctcatcactatcctcccaaacccgcagcttcaccatccaggaagaggatggtgaggaagaggaggaggaggagaacgagtccagctactccctgggcgtttatgagcactgcaagatctccaagttcaactacaagaggaatcgacactatcagctgaatccggagacagcctacctgctgcaggacgatggggatagtgatgtgcgcgaggatgaagacgatgtcataccagaggaggaggagcaggaggaacaggatgaggatgcagaggcagaggctctggaggcccgaggcggtgatcagttgggcgaaggcatgtcggactatggccagcgcaggcgcaacatggctgccctgaaggtccaaccaccgacgacccagcagcagcagcagcaacctcagaaggagccaaaccaggcaccgaatctccagcagcgtccctccaacgattccctggagcactcgaacagctccaccaactccctggacagcccctcccagggcggagccagcacacaccaccgctactaccatgtgttccgcgagggcgagctggacgcactgatcaaccaccatgtggccagcctgcacatcgttagctcctactacgagcgggccagctggtgtgtggtggccgagaaggttcaggtgtggaccatctaa

SEQ ID NO: 19170 - protein, 1270 aa, DROSOPHILA
MAQSEFLATWQQHLKRKTLGKVLHYFNSILLRAAPVGGFWQGLDFNDKSTMSAALTPQRDSCEDLSLTQLNWHGFPGDRWFRGVALCDNLELPFRDDSFDAVLSLAVVHHFATTERRVQALRELARILRIGGRVVITVWALEQRHRRFESQDVLIPWQPPKNRNYSYSDEEDDDNFQPPYHAYTEDSTNSSRSAGDGDSSSLSSSSPGESCYSFVRRAIQKLARGRRHAWFMDSWSSKDTKNDSSLDYEDAKDLPIELRRLEDFEDFPDPPLSAGLKSRSLGSILQPPPRQIVRSRSSVPSLGGPLIPGESKASAAALLLNNPESQQLQLQLQLNGRHSPTTTASAGNTLSRRPKLIKQKQSLCDDDAATPPAPESFQVVSSLNGSNGVVSSSLYTKSGCYAGNFHQHASATATPPSGDSGEGGVTGGPTGGPTFLRKQSSLNEDLMACNRLREKERVRKRIQKQTSLNEAFLCRSALFSKRLQVIREGFTTKIKSSTGSLERVTKTGISKLIQNIKSGPQAQTNPAQHPVQLDKNATLNNNNKQGVAATAHQHHHHHHHHPVHHLSHLILPASSTSAPVTYCSSVECTMSNLCHCSQYQQECPACADGGQGDKARRHSRESGSDSSKDSSLQSDTSIESEDSFASVIFIPKPEQHQQQLNYQQQHQNSNSSSSNSSSSNGQRAQGAAGRDQGVNPGSRLPPTHSVPTSPLIMPCPPTPAHSPAAIQGTVTSPPQSTSAVSAAMAILTPPSKPARFSFDEAHIKLQKEQHVDLQKELPKEKKEPLKVLPKEPLKESPPVRRITRQAIRDLPPIPKFRKQQSLQLQRQSFPIVRRASGSGVSTSASTTSLATKLLSLELFNPATDDLDSDSSEPSSPDSIDSVISAPRSAKVPSGSEEGEAASANSNSASQDEGEPSLAQLISLQQEQYHKGELQINSSRSHAEDDIILNADSAPLLPEKREAVQKQDCAEFAEQLSAQLQRELDDKTNRTECRYLDGIGMGDLSEILGGGKKRSNGDLSAFRDELRERRLMLANLSTQPSLQQSPVSSSTSSLSSQTRSFTIQEEDGEEEEEEENESSYSLGVYEHCKISKFNYKRNRHYQLNPETAYLLQDDGDSDVREDEDDVIPEEEEQEEQDEDAEAEALEARGGDQLGEGMSDYGQRRRNMAALKVQPPTTQQQQQQPQKEPNQAPNLQQRPSNDSLEHSNSSTNSLDSPSQGGASTHHRYYHVFREGELDALINHHVASLHIVSSYYERASWCVVAEKVQVWTI

SEQ ID NO: 19171 - DNA, 2636 bp, DROSOPHILA
tcgacggcttcatcgacggctcgccataccgaaattctagtgataagcgcggggaaggcctggaggaagtcttgatgtgtagacatcaagaagccactgcatcgcgataacgataaggcacgggtggcgaaagagttctcaaggaggggaaggtgcgtgggaaggcaagtctagcacttcacagccactgtgtacgggagttgcctcaagtggtgcactggaaagaattcaaaacagcctcttcaattgtaaatgtttcaagtgttaataatggcaactaaaggtgtaattatatgtacgttggtacctacactttccgaaggaacaacgtgacaacttaaagggcttcctttcgagtgtgtgtgtatatcaaatgactaacggagtggttataaaaatatttcaagatagtacaagtatatttattattgatatttatacttctttttttcagtttccttatcaatttgagatcattttaagtagcattatatttttgacagatcgtttccctttacaatttacagttgcagtctgctgagagtaagagcggataagtgagagagtgcattccgaagaaggcccaaaaagagcaaagctgcatatacactgaggaaattgcatatatcaaccaaggtacgctcacatatgtcgattgtagaaattaactattccggttggcttacagtttaaaaatatttattatttatggtttctagagagctttcgatcaatctaagtgattaaatttttttgtttaaatgatgacccacgatcatttgaatttgtacatcttattaataaattgctagatcatagatcagtaattaaatccgcaatcaaaattagttttatttatcatttattttcagtgtatgcacgaaagagagagcaatatcgcgcaccgccaacgcgatcgtgtttttgttggcgttgctttgtttgtgagcagcagcagcggtattacttctctcagcgccgcacggcgtcgccagtcgtgtctcaacactcgacagcagcagacgtgttgcagcagcagtaacacttgattgatcgcatctcgaagagccagctccataaggaatacccaaactctgttctaaactgatcgtataaccgcgtgatattcaaatccagccatgaacccagccgctcaactgctgcgcatgcgcagcgctaccgcatttggtagcgccgcaacgcgctccatcacgacgaaccggcgccagcggaccaccagtaccgccagcgcccagcgggagcggacgcagagcgtcagcgagacggacaagtttctgcactacagccccgaggacggctactacaagacctcgccctttgaccccgtcaccattcccaacgtaccgctgcatgagtacgtgtggcgcgacttcaaaaagtgggagcgacgcactgcagcggtcccggcgtgtagacgggattcactgtggtcaccgtcagtcccgcctcaatggcgcccaatgtggcaatgggatactcgggaagattcggcagacagatggccaaaacgtcgggcttttggagattgaatttggtctgcagacgaacggcaaaagcggcgctggcatcacgcatttgagcgaaagtgtactgccgatcggtgatcacacaaacctaaaataaataacatacagaataatttatattaatatttaaaggaagtagttcatttacagtgcacagctctatctcgattgtataaatatatgctaaccgggcaaatatgcagataacgataaatcaaaatcaagcaaagcctgggaaaaaccaaatgggcggcactccaatcttatctaaagaatgcttcaagtggactcatatgtttggattatatgtttatggtagatctagtgtatagtgtagccaaagtattgaacaggtgtctgaatcactatggtgaaattaggcgtaacaaatataccccctatacactgttgccactgatatgggttaaatcatttaccacctaaatagcaatagaataataaatgtttccattgcgataagataatccattctcgcccaattcaaatgacaatgtttaatttatctaagctagtgtggcattttatcagcacaagtttggctagctattaaatagattaaaagtggtgcctttgagatttatccaaggtcagtacgtagtgatgatctggatttttgaagttcaacccttgatatcagttcccaaatgatccttcctttttttccctgtccagggcctttcgctggccttgacttctcgtgggactgacctcaaaaccggtttgcagcgctaaggtgaaggttgtttgaagcaaattttgcgagtaccagctaaatgggtgtgggcctaatgagaaaggggggggtggtggctcactgattgggggattgtccgcctaaatttgcgcagtcggaaatcgcattcggttaaaaataagcattataaatagccgcgccgccaacaagttgctcaaattgaagaaaacaacccacaaacgaggcaaacacacaacttgacatcataatgaataaataagcgagtaaaaaataagagaatcatttcgtgcatttgccatgtatatgtagatttgcacccctctaaaatcgccgagcaacccccccccccctcc

SEQ ID NO: 19172 - DNA, 2567 bp, DROSOPHILA
tctcaacactcgacagcagcagacgtgttgcagcagcagtaacacttgattgatcgcatctcgaagagccagctccataaggaatacccaaactctgttctaaactgatcgtataaccgcgtgatattcaaatccagccatgaacccagccgctcaactgctgcgcatgcgcagcgctaccgcatttggtagcgccgcaacgcgctccatcacgacgaaccggcgccagcggaccaccagtaccgccagcgcccagcgggagcggacgcagagcgtcagcgagacggacaagtttctgcactacagccccgaggacggctactacaagacctcgccctttgaccccgtcaccattcccaacgtaccgctgcatgagtacgtgtggcgcgacttcaaaaagtgggagcgacgcactgcagcggtggtttgtgtgatcaccgatcggcagtacactttcgctcaaatgcgtgatgccagcgccgcttttgccgttcgtctgcagaccaaattcaatctccaaaagcccgacgttttggccatctgtctgccgaatcttcccgagtatcccattgccacattgggcgccattgaggcgggactgacggtgaccacagtgaatcccgtctacacgccgggaccgtctcactgatcgtcacatttccgattgcagatgagatcgccaggcaattgacctttagcggagccaagttcctggtgggaacggtatccggatttgccacactaagccaggccagcaaactggtgggcaggcaaatacccatcgccgtggtgcgtaccagtgccgaggaggccctgcccgagggtgccatcgatttcagcgagctgacgagcacccagaatgtgcgttacgaggatctgaaagcgcccaaagaagcctccgccgacgatatggtcttcctgcccttctcctccggcaccactggtctgcccaagggtgtgatgctatcgcacaacaacatcactagcaattgcgagcaggtgcaggcctccctgccactggatctcatgggtccgcagaacacgttgccgggcgtcctgcccttctttcacatctacggcctcaccgtggtgatgctctcgaaactgggacagggctgccgactggccaccatgccgtgctttaagccggatgacttcatgaggtcgctggacaagtaccagggcagcatcctcaacttggtgcccccaattgccctctttatgattaaccatcccaagctgacgcaggaaacagcgccccacttgaaggtggtgatgagtggagcggccccaattggtcagcacgatgtggagcgcttcctgaacaagttcccgaacactgtcttcaagcagggctatggcatgacagaggcttctcccgtggttttgctaacaccggagggcaacaaggtgtacgcctcgaccggtgtgctgccggccagcacggaggccaagatcgttccactggatggaagcgatgccaagggcgttggtccgcgcaccactggcgagctgtgcgttcgtggtccccaggtgatggccggttatttgaacaacgatgaggccaatcaggtcaccttctatccgggcaactggctgcgcagtggcgacgtcgccttctacgacgaggacggtctcttctatatcacggaccgcatgaaggagctgattaaggtgaagggtttccaagtgccacccgccgaattggaggcagtgctgcgtgatcaccccaagattctggaggcggccgtctttggtattccccacgaattcaacggcgaggcaccacgcgccattgtcgtcctgcgtcagggggagaaagccagcgccgaggagatctccgcctacgtggccgaacgggtggcccactacaagaagcttgagggcggagtgatctttgtggacgaggtgccaaagaatcccaccggcaagatcctgcgccgcgagctcaaggagaagttctccgattaagttcccagaggacgaatcttcgtaggctaagaaatatttttgtgatttttttttgttcgtctcaatcaggaatggtacacagacaaatgtggaggtcctaaagcaatcaacctattgccaaatttaagagctctatttgtttgtggccacattccgcggaacatgtatgtatatgaggaacatcaatgttggccctggatcccctgatccctgggaactggtttagacattgcatttacaacttcgaaaatacttagctattatgcttagacataggtctcgattagtcgctcgattggtccatagttagtaagtctagattaggcatatgtaagaccttaaacattaacatatgcgtatttataacgtgtaatctttatgcgtgcactctaacctttgattatacttaatgacgcagccgatattttgctatgatattcccctatttgcatatatcaattttttttttgcctagtaccataagattattgtttgttgatcgtattgaaagatggcggcatgccaaatccaatactttaaatgccatgtatgccacgatgtttaaaaataaagacgaaatgaaccagttgaaataa

SEQ ID NO: 19173 - protein, 169 aa, DROSOPHILA
MNPAAQLLRMRSATAFGSAATRSITTNRRQRTTSTASAQRERTQSVSETDKFLHYSPEDGYYKTSPFDPVTIPNVPLHEYVWRDFKKWERRTAAVVCVITDRQYTFAQMRDASAAFAVRLQTKFNLQKPDVLAICLPNLPEYPIATLGAIEAGLTVTTVNPVYTPGPSH

SEQ ID NO: 19174 - DNA, 10200 bp, DROSOPHILA
gggcgtggcaacattcccacctacatcatcggcatcgacagcgaataccagttcctgccacatcgcccggccgcgccaaccaaagaagactagctgaaatttaccagagattagatttaggacatgcatgtatgtaaatatagagtataataggtttaggacagtcgcaaataaaagctgtaattcgaactaaacttgcattcagaatttctattttgttgattatgggaaaaaatacggtggctgtgtgtcaaaagtcaatcaaattggagcacacaactgggagattgccgtttacaataccaggcgaacagcaacactaggaggtgaccattgattttcccagcatccttgctctacagattatgatcgcttggtgcagcaaacctggaaatgtgcgctcacttgaggccaatttggttgggcaaattgggagatttttcgatttaagtaccaggcgaacagaaatcgcagaaggtgaccaattgattcctaacagaagcttgttaaagattatgtttacttggtgttaaaagccacgaatgtcccacgaatcgccgcaaattggtcggtctaaatcgaagaaattctgtttcctgataccaggcgaacagaaatctgcagcaggtggctggtcgaaatttttaatacttaatattccattgcatacttttgggctgcacgtatctgcggagtgaactgtgcagtgtggccgtattttttgaactgttctcaccaagcccaaaagtatgcaacagttttgggtgaaatttaaataagtttgtcccgcgccaagcccaaaagtatgcaacagttttggctgaaatttaaatacgttttgcccgttttatttgaatttcaaatgtctaccgtttataacggcctaaaaaccaagaattttgtaaaagtgacaaaagtgaaaaataaaaaaaccctttttattttatgtcataactttattataaaaacacaatttgtttacaatatacacactgacgaaatggatccggcctacagcaaaaatgtagtggactaccgctcgcttggcaacatgccgggctacgagtggaaactcctgcgggtatgccatgttgcggaaatagctttccaagtgtccaagtaccattcaattgcagtacaagtgccgcgagttgcgtctggaaggcgtttaccatcggcattgtcacctggtttcggtggcccttgtgacccaacttattatagtcatcgaaattttgatgctcatccatgtgattctgctgttcagcgtggttaaggtgggaaaaataccgcaatcgcatcgctttaaataactgggtttcctccgatgcagaacattgatttcctcaccgtacttccctatttcgcggtcatgttactcactccatccattctgatgcctagcagggagcccaacgtcgagcaatacgaatccattgccatattggtcagctgtttaatggctctgcttttgactgcgatgggtttgtgatttctgcgacactcgtatccaaggttcacactaagatctcatccatttcagacttgatactgcccatctgttacttcaggcccttttccctagtaccaagttatgatcacgttgtgattgtcctgatatacctgatgtttccaatagcctttgtgaaaaacggcagggcttactttttgggcctggccgtttcactgttctactttggctacatggcgttgatagacaagattagcacactggataaagtgtgggagctgacggcttatggggcgtacctgttctttctgaacatgctgtgcatgttcctttccagattccaagagtacaacatgagaagcggaatactgagtcgttaccaggtggtgtaccagaacttggtgtttcaagtgagtaaatctaaatttctatgtgctagttaccttataacaatttcttagatggctatgaaagaggaaaaggccctgctggactcgattataccagtaactctggcgagatctttgcaagacgccatcgccagtcacatcgaagaggatccgtctaatttaatgccctttacgaaaacacggtgagttatacagattaaaaggcagttgattgaaagcaattaattgctcacagacatctctttatggagccccatccggaagtatctattctagaagcggatatggttgactttacgggtctaaccaccaccatggaagtttcggatcttgtggccatcttgcacgagttgttcgttagcttcgatctggctgccaaccacaacagggccacccgcatcaagttcctgggcgattcatacacctgcgtcactgggattcccagctactttcctacccacgccaacgcctgtgtgaaccaggctctggacatgattgagataagccgagaagtcagcaagcgacgaaacaagaagatcgaccttcggatcggtgtgcactcgggggagatactagctgggatcattgggctcaccaagtggcagttcgacatttggtcgaaagacgtcgacatcactaatcggctagagtcaagtggacttcctggaatggtgcacatttctagccgcactttgggcctgttggacaaccactacgtgtatgaggagggtactgatacggccaagctggatcctctcctgcagcggtctaatctgagtacctacctgataagaagtcgtcttccgaatttcgaggacaccgacgacttggaggacgataatttctcgctgaacgactaccgtttcagcttcagtttcagtcaggactacgaggacatccaggttaaggcgcagcgtgacatgattctcgaggtggagcacatgccggtgaaccgagttcagacgtgcaagattcgacgacctatgcaccgaatagcaaaggaggacatcaacgaggagtatcgattccatctcgagtcgtactacctcttcaccactttccgcagctggaggatggagtggtccttcaacaaaatgcgggaccttttaatgaagtacagcctagggatgatggtcttcgctggagccacgatcatagccatggacctactcgttaagtgagtttataatactatttcaattgcaaatccgctacgttgctgctgctttttatttgttttcaggagcgaagccatggactataccatgttgttcagcctatttctgctcatcctcttgccacttttgctggcgtcctataaaaagctttggctacgtggtcgccgactttcgcccataacgcaacccactttcttcctgagtcgttggttcatcaaggcctccgatctgatcgagaagtcggtgttcgttcggataccactggccatcatggtattattcctgctttatgtgatgtcttcggaaacagtggtgagtccctttcgtacctctgagttccataagtgactgactagctaccatagttttcctgtgatatagccaggctcgagctggagattataaattccgagctgcataacttgagaccccagatgttatgcttcatgccttgggttggtatttcgaattaagagcgatcagctttttcaaatccagttcaaattatcccactagggagtgacttatgccgtagtcatcgtgctcagccttatgttggtcatcattggcattccgctgatcataaagttaggagtgggcctggccatccttggctcccacgtgatcactgtacacgcctactacggattcgcctttgagcgatcgcaaaccaccaatataggcgtgacatcgagccttgcccactcctggtacatggttgccttcttcatcgtggtagtggttcgcgaaggctacctcaactacatcctaaaggcgagctacttgttagttagttagttggttagtttgttagttcatatacttacctactttactcagcatgagcatgtgtttcgagaagaagcacgagctgaccaaggtcaaaacccgaaccatcaagatcatcatggccaacattctgcccacccatgtggctgaggtgttcaaagtgcgtcggcgcagcgatcaactgtactacgagaacttctcccaggtggccgtgatgtttgccaccatcgagaactacgaggcggataagtcgggtctgcgagctcttcacgagatgatctgctacttcgacgaactcttggttaactaccaatcctggtacaaaatcgagaagatcaaggtgatgggctggacatacttagcggcctgcggcctgcacgtcgatcactacacggacttttcggtcagcgttcccatctccaccaatcgggagtccgataaacttcagaaatctggtttgtccggtttatttcatacatgattaaggtggtctcataattgcgcattcctaggttctgttcgctttgcccccatggatggtgatgagataatgatcaaggatctgcaccccacacaggcaactacgaacgaggatgataatacaatcctggtcatgactgaattcgctttgaacttacttcgcatcctccgagatatccgttccaagggaattttcttcgaaaaggattccaaattaactggcagcttgaagattggtgagtccaatatttatttcgtctgcgactctaactttcctcccaatctcaggcatcgcacatggacctgtgatggccggcgttgtgggactctccaagccgcactacgacatctggggacacactgtcaacatggcctcccggatgacttccacgggagtgagggatggcattcacgtgaccgaaagcactgcgaacgttctgcgcgactttaacattcgctgcacttatcgagggatgacctttgtgaagggagtgggccaagtgcccacttaccttgtcgacctggacgagaatctacacttccaacagcatagcccagataacgattcgcacaagggcagcatagtctccgtgcattggttagatgaaaaaagagctgaaagatagaaatattgtggttcacttaaggtctcaatgcaaagttatacatatatgattggagttaaggaatatctgctctattttggcttgagaaataagtcacagtatatatatagtaaactcaaatagttctcgccaaacatttttcaaagtctaaatggataacgataacccatattaccaggaagacgtggttgcctaccgctcactgagcaccgtaaaggatttggaatggcggcacttgaaggtaggccaggtagaccatcttgtgtggcttaaccactaagattgttaccaatttcagaacaagtgtcagaatctacgcctggaattggcctgctctcgccttcgtgagctggccctgatgtcgaatgtggttcaaattatttggcatgtggaactattgatggtagctcacgtgattctgctgctagccctagtcaaggtagtcccatctgatatagtgtcctgcgtaagactacatcgatttccttaggatattatactggtgaccatggtaccctactttgcggttatgcttttcagtcccttcattatgctattgagcatgcagaataacgttgggatgattacgaatacgctcatctcatggctgatggcactttttctaacctctatgggtgaagtggttggtacatcatagtcctaccacttctaactatttcttccttgcagacctcgtttctgacctcctggggaccatctatagtggtgcagcgtatcccactgtgccttgctacgaccatgttgtcctggtcagtgtctacatgactctacccatcgcattctaccagggaagctcagtatatgtcctgggaatggtggtatccataatttatatcggctacgctttctatatgcagtatctgaacgatcaagtttccttttacctactcgcctcctatgctatatacctctttaccctcaacctgatcttttcatttttcactataatcagggactacggccttagacgagcaatacttagccgctaccagttggtataccaaaatattgtctatcaggttcgccatccagatttattatttccaagtgattagtatataagatctcatctttcttatccacagttggtaatgaagaaggagaatggcttgttagagtcaattttaccacgcaaaatgatacgcacattgcaggaggaaatctgtagtcgaattgaggatcaggataagaacttcactccttctaaggcgggcttacggtgcgtatgcgcgatgttctaaaatgcatttactgttagttttaattgcagaaaactgttcctggaaccctacccgaatgtttccattttggtagcagacatggtgaactacacgcatctgaccaccactctggaggcaccgcaactggtagagattctgcacgacctgtttgtgaactttgacctggctgccaatcgcaaccgagcgatgcggatcaagttcttgggagattcctacaactgtgtggctggcatcccgaactactttcccgcccacgcttcctgctgcgttgaccaggcgctggagatgatccatatcacgcagggtgtgagtagccggcgcgagctggacattaaccttcgaattggtgtgcactcgggtgaggtgtttgcaggaatcattgggcacaccaaatggcagtttgacatctggtccaaggacgtggacatcaccaatcggctggagtcatccgggctgccgggactggtgcacgtttcccaacggacgctgagcatgctggacgagcactatatattcagagagggcaccgaggcagccaaaaatgatcccatcctgcagcaagcggggatccgcaccttcctggtcagcaatcgacttcctgatgcagtggagcccggcgaactggacgacgaattgagcagcgcctccataaactcatgccgcctgagctacggaggatactacgaagagatccagatcaaggcgcagcgcgagataatgaaggaggtggatcaaatggcggtagggcactgcttcatagaatggagacggagcagttcgatgaagaaacaggacttcaatgaggagtacctgtttagcaaccagatccaccttgtgctgggtgtgttccgcagctggaagagggagtgggaatttcataacctgcctgacctcatgattaagtacaccatgctcttagttctttgtgctggactggccataatgagcattaacttaatcgaagagtaagacgactctgctagttaatctgccaagtactgcactttatctcttgatccacagagctacataccctgatattctggtcttgctcggaattcttctcatactactgatcctgtgcattctggctggatacaaaaagcttcggctgcagtggaagaaactaacgcccatgtcgcagccctcttgtttcctgagtcgatggcttctcaggatctcggaaagaatcgaggactctctgttcgtaaggattccattgaccatggtggtactgctcctgctctacgttatgtcctctcaagcagtggtgagtatttataatttgtgatcaaaaacaatgctctgcatatcctttacagttttcctgtgatgtagcgaaactggaactgagtattatcgaagcccatctctataatgagaagtcgtatgcggagtgcttcggtccatgggttggtttcactatctacaattttgaaaactagaaaacatctcctacttttagactgtcacttactgtgtggtcatcgtgatcagtcttctgtttgtcgtcccgggatgtccgctggtgataaagatactcgccggcctgctcatccttggactccacttgggcaccgtccatttatactacgggttcgcctttgagagatcggagaccactgatctgggacttaagtcggactacgcccacacctggtatctggtggctctcttcattgttctcgtattgcgggaacgtcacgttaactaccttcggaagtttaactacttgtgagtgtgtgtagatctttgtgtatatcggttcctcattcccttttcagcatgcgcgtttgctacgaggaagcccaccagcaaactgatgaaaagctgcgctccatcaagatcattatggctaacatcctgcccacccacgtggctcaggtgtacaaggtgcgacgaccccacgaccagctctactacgagaacttctccaaggtggccgtgatgttcgcctccatcgagaactttaacgccgacacggcgggcctacggatcctgcacgagatcatttgctgcttcgacgacctcctggttgactaccagaccaggtacaaaatcgaaaagatcaaggtaatgggttggacctatatggtggcctgtggcctcgaaacggaccactacacggacttctccatcgacattccggtcaagcaaccggaagctgattccgaaattagacgaggatccagcggtgactatttcccacgactagattagagtacaattgtaaaaggtacatctattcagttctgactgtccattttggaagtaccgaggacgatgagatgagcggcgataatgtcagccagccctacgcccaagtgcaagatgtcgccgtcctggtgatgaccgagtttgccctggacttacttcgcatcatgcacgacattcggtacaactacgtgttctcggagtacgatacattcttaacggggagcttgaagataggtgggctgcattaccttcaccgttatcctaatccatccaatgatatctaaggcatctcccatggatccgtgatggccggcgttgttggactctcgaaaccacactatgatatctggggtcataccgtcaatatggcctcccggatgtcctccactggattgctggacaacatccaagtaactcggcacacggcaaaggtgctgcgacaatttaacatccgctgcaactaccgagggcacacggaggtaaagggagtgggcaaggtgcccacctacctggtggtcgtagacccggatctcacattccaagatcacgaccaagtgagcatgagtatgaaggactcaaaaagctgggtcatcgacactctttcactgtcattcaccccgagcttcgtgcccccaaagtcttccacttcggatgaagaggaggctgaaggagagctcgaggaaaatgtatctgaaggcgatgaactggaggtctcgatacatgagcgccaaaagggaggcatctttctggccgggaaccttcattaatttaaatttattttaatagatatatatatatatatatatttatttaagcatatataacacacatatatagatgtattcgtacagttcaaagcaaatgtttttcttgaggttaaatacgttatgatttgagcactcgctgaaatcattgcacaactggtgaccaaagtatacgtatgttcataattcagagtcatacatagtcgttaggttatgtacatgctacagataatacactcatcttgacgaatctccatctccatcactaagaaagcaccatccgtgtgatcaggttcggtttcgtttggttttgtgcacagtttttagcttaagtaagcattgcagttgatttggggcatgggcatagcccttactcgttgacagaactggagttcagcagagccgtgtcctcgggaatgggcttccgcttgtaggagggctcagtggctaggtagacaaccagcgccccgaagaccacgtacattactccaatcacattggccaacacaccagccggtggaagagtggagtaagccggagttttgctagaaatgtcgtcatggattagtcaagtgatcgatctagaatgcatatacacctacatggcgaagatggccttctcggttatgcccatcagggcactagcaatagccagaacgaatccaaagagtccgaagtagatgtgcagcggcatcatggcgatcctgtagttctccctcaaccccggcgccaaaaaggccacaaatccggccacatactgcagcgagaagacgatcaccgcggagagccccagccaagagtgcagggagtacatgttgggaatgggcggattggccaagttgtgggaatcgaagaccgtcttcagggcaatcaccgtcagaatgaatgcacccatgtggatgccggcgtgggtaagcttcagagtcttcttgcgcgtggtgcggaaaccacgatagatcagaatggctgtgggattgaattgagttggattaccatttcgaag

SEQ ID NO: 19175 - DNA, 6261 bp, DROSOPHILA
atggatccggcctacagcaaaaatgtagtggactaccgctcgcttggcaacatgccgggctacgagtggaaactcctgcggtacaagtgccgcgagttgcgtctggaaggcgtttaccatcggcattgtcacctggtttcggtggcccttgtgacccaacttattatagtcatcgaaattttgatgctcatccatgtgattctgctgttcagcgtggttaagaacattgatttcctcaccgtacttccctatttcgcggtcatgttactcactccatccattctgatgcctagcagggagcccaacgtcgagcaatacgaatccattgccatattggtcagctgtttaatggctctgcttttgactgcgatggcctttgtgaaaaacggcagggcttactttttgggcctggccgtttcactgttctactttggctacatggcgttgatagacaagattagcacactggataaagtgtgggagctgacggcttatggggcgtacctgttctttctgaacatgctgtgcatgttcctttccagattccaagagtacaacatgagaagcggaatactgagtcgttaccaggtggtgtaccagaacttggtgtttcaaatggctatgaaagaggaaaaggccctgctggactcgattataccagtaactctggcgagatctttgcaagacgccatcgccagtcacatcgaagaggatccgtctaatttaatgccctttacgaaaacacgacatctctttatggagccccatccggaagtatctattctagaagcggatatggttgactttacgggtctaaccaccaccatggaagtttcggatcttgtggccatcttgcacgagttgttcgttagcttcgatctggctgccaaccacaacagggccacccgcatcaagttcctgggcgattcatacacctgcgtcactgggattcccagctactttcctacccacgccaacgcctgtgtgaaccaggctctggacatgattgagataagccgagaagtcagcaagcgacgaaacaagaagatcgaccttcggatcggtgtgcactcgggggagatactagctgggatcattgggctcaccaagtggcagttcgacatttggtcgaaagacgtcgacatcactaatcggctagagtcaagtggacttcctggaatggtgcacatttctagccgcactttgggcctgttggacaaccactacgtgtatgaggagggtactgatacggccaagctggatcctctcctgcagcggtctaatctgagtacctacctgataagaagtcgtcttccgaatttcgaggacaccgacgacttggaggacgataatttctcgctgaacgactaccgtttcagcttcagtttcagtcaggactacgaggacatccaggttaaggcgcagcgtgacatgattctcgaggtggagcacatgccggtgaaccgagttcagacgtgcaagattcgacgacctatgcaccgaatagcaaaggaggacatcaacgaggagtatcgattccatctcgagtcgtactacctcttcaccactttccgcagctggaggatggagtggtccttcaacaaaatgcgggaccttttaatgaagtacagcctagggatgatggtcttcgctggagccacgatcatagccatggacctactcgttaagagcgaagccatggactataccatgttgttcagcctatttctgctcatcctcttgccacttttgctggcgtcctataaaaagctttggctacgtggtcgccgactttcgcccataacgcaacccactttcttcctgagtcgttggttcatcaaggcctccgatctgatcgagaagtcggtgttcgttcggataccactggccatcatggtattattcctgctttatgtgatgtcttcggaaacagtggtgagtccctttcgtacctctgagttccataaccttatgttggtcatcattggcattccgctgatcataaagttaggagtgggcctggccatccttggctcccacgtgatcactgtacacgcctactacggattcgcctttgagcgatcgcaaaccaccaatataggcgtgacatcgagccttgcccactcctggtacatggttgccttcttcatcgtggtagtggttcgcgaaggctacctcaactacatcctaaaggcgagctacttcatgagcatgtgtttcgagaagaagcacgagctgaccaaggtcaaaacccgaaccatcaagatcatcatggccaacattctgcccacccatgtggctgaggtgttcaaagtgcgtcggcgcagcgatcaactgtactacgagaacttctcccaggtggccgtgatgtttgccaccatcgagaactacgaggcggataagtcgggtctgcgagctcttcacgagatgatctgctacttcgacgaactcttggttaactaccaatcctggtacaaaatcgagaagatcaaggtgatgggctggacatacttagcggcctgcggcctgcacgtcgatcactacacggacttttcggtcagcgttcccatctccaccaatcgggagtccgataaacttcagaaatctggttctgttcgctttgcccccatggatggtgatgagataatgatcaaggatctgcaccccacacaggcaactacgaacgaggatgataatacaatcctggtcatgactgaattcgctttgaacttacttcgcatcctccgagatatccgttccaagggaattttcttcgaaaaggattccaaattaactggcagcttgaagattggcatcgcacatggacctgtgatggccggcgttgtgggactctccaagccgcactacgacatctggggacacactgtcaacatggcctcccggatgacttccacgggagtgagggatggcattcacgtgaccgaaagcactgcgaacgttctgcgcgactttaacattcgctgcacttatcgagggatgacctttgtgaagggagtgggccaagtgcccacttaccttgtcgacctggacgagaatctacacttccaacagcatagcccagataacgattcgcacaagggcagcatagtctccgaagacgtggttgcctaccgctcactgagcaccgtaaaggatttggaatggcggcacttgaagaacaagtgtcagaatctacgcctggaattggcctgctctcgccttcgtgagctggccctgatgtcgaatgtggttcaaattatttggcatgtggaactattgatggtagctcacgtgattctgctgctagccctagtcaaggtagtcccatctgatatagtgtcctgcacctcgtttctgacctcctggggaccatctatagtggtgcagcgtatcccactgtgccttgctacgaccatgttgtcctgggactacggccttagacgagcaatacttagccgctaccagttggtataccaaaatattgtctatcagttggtaatgaagaaggagaatggcttgttagagtcaattttaccacgcaaaatgatacgcacattgcaggaggaaatctgtagtcgaattgaggatcaggataagaacttcactccttctaaggcgggcttacgaaaactgttcctggaaccctacccgaatgtttccattttggtagcagacatggtgaactacacgcatctgaccaccactctggaggcaccgcaactggtagagattctgcacgacctgtttgtgaactttgacctggctgccaatcgcaaccgagcgatgcggatcaagttcttgggagattcctacaactgtgtggctggcatcccgaactactttcccgcccacgcttcctgctgcgttgaccaggcgctggagatgatccatatcacgcagggtgtgagtagccggcgcgagctggacattaaccttcgaattggtgtgcactcgggtgaggtgtttgcaggaatcattgggcacaccaaatggcagtttgacatctggtccaaggacgtggacatcaccaatcggctggagtcatccgggctgccgggactggtgcacgtttcccaacggacgctgagcatgctggacgagcactatatattcagagagggcaccgaggcagccaaaaatgatcccatcctgcagcaagcggggatccgcaccttcctggtcagcaatcgacttcctgatgcagtggagcccggcgaactggacgacgaattgagcagcgcctccataaactcatgccgcctgagctacggaggatactacgaagagatccagatcaaggcgcagcgcgagataatgaaggaggtggatcaaatggcggtagggcactgcttcatagaatggagacggagcagttcgatgaagaaacaggacttcaatgaggagtacctgtttagcaaccagatccaccttgtgctgggtgtgttccgcagctggaagagggagtgggaatttcataacctgcctgacctcatgattaagtacaccatgctcttagttctttgtgctggactggccataatgagcattaacttaatcgaagaagctacataccctgatattctggtcttgctcggaattcttctcatactactgatcctgtgcattctggctggatacaaaaagcttcggctgcagtggaagaaactaacgcccatgtcgcagccctcttgtttcctgagtcgatggcttctcaggatctcggaaagaatcgaggactctctgttcgtaaggattccattgaccatggtggtactgctcctgctctacgttatgtcctctcaagcagtgttttcctgtgatgtagcgaaactggaactgagtattatcgaagcccatctctataatgagaagtcgtatgcggagtgcttcggtccatggactgtcacttactgtgtggtcatcgtgatcagtcttctgtttgtcgtcccgggatgtccgctggtgataaagatactcgccggcctgctcatccttggactccacttgggcaccgtccatttatactacgggttcgcctttgagagatcggagaccactgatctgggacttaagtcggactacgcccacacctggtatctggtggctctcttcattgttctcgtattgcgggaacgtcacgttaactaccttcggaagtttaactacttcatgcgcgtttgctacgaggaagcccaccagcaaactgatgaaaagctgcgctccatcaagatcattatggctaacatcctgcccacccacgtggctcaggtgtacaaggtgcgacgaccccacgaccagctctactacgagaacttctccaaggtggccgtgatgttcgcctccatcgagaactttaacgccgacacggcgggcctacggatcctgcacgagatcatttgctgcttcgacgacctcctggttgactaccagaccaggtacaaaatcgaaaagatcaaggtaatgggttggacctatatggtggcctgtggcctcgaaacggaccactacacggacttctccatcgacattccggtcaagcaaccggaagctgattccgaaattagacgaggatccagcgttctgactgtccattttggaagtaccgaggacgatgagatgagcggcgataatgtcagccagccctacgcccaagtgcaagatgtcgccgtcctggtgatgaccgagtttgccctggacttacttcgcatcatgcacgacattcggtacaactacgtgttctcggagtacgatacattcttaacggggagcttgaagataggcatctcccatggatccgtgatggccggcgttgttggactctcgaaaccacactatgatatctggggtcataccgtcaatatggcctcccggatgtcctccactggattgctggacaacatccaagtaactcggcacacggcaaaggtgctgcgacaatttaacatccgctgcaactaccgagggcacacggaggtaaagggagtgggcaaggtgcccacctacctggtggtcgtagacccggatctcacattccaagatcacgaccaagtgagcatgagtatgaaggactcaaaaagctgggtcatcgacactctttcactgtcattcaccccgagcttcgtgcccccaaagtcttccacttcggatgaagaggaggctgaaggagagctcgaggaaaatgtatctgaaggcgatgaactggaggtctcgatacatgagcgccaaaagggaggcatctttctggccgggaaccttcattaa

SEQ ID NO: 19176 - protein, 2086 aa, DROSOPHILA
MDPAYSKNVVDYRSLGNMPGYEWKLLRYKCRELRLEGVYHRHCHLVSVALVTQLIIVIEILMLIHVILLFSVVKNIDFLTVLPYFAVMLLTPSILMPSREPNVEQYESIAILVSCLMALLLTAMAFVKNGRAYFLGLAVSLFYFGYMALIDKISTLDKVWELTAYGAYLFFLNMLCMFLSRFQEYNMRSGILSRYQVVYQNLVFQMAMKEEKALLDSIIPVTLARSLQDAIASHIEEDPSNLMPFTKTRHLFMEPHPEVSILEADMVDFTGLTTTMEVSDLVAILHELFVSFDLAANHNRATRIKFLGDSYTCVTGIPSYFPTHANACVNQALDMIEISREVSKRRNKKIDLRIGVHSGEILAGIIGLTKWQFDIWSKDVDITNRLESSGLPGMVHISSRTLGLLDNHYVYEEGTDTAKLDPLLQRSNLSTYLIRSRLPNFEDTDDLEDDNFSLNDYRFSFSFSQDYEDIQVKAQRDMILEVEHMPVNRVQTCKIRRPMHRIAKEDINEEYRFHLESYYLFTTFRSWRMEWSFNKMRDLLMKYSLGMMVFAGATIIAMDLLVKSEAMDYTMLFSLFLLILLPLLLASYKKLWLRGRRLSPITQPTFFLSRWFIKASDLIEKSVFVRIPLAIMVLFLLYVMSSETVVSPFRTSEFHNLMLVIIGIPLIIKLGVGLAILGSHVITVHAYYGFAFERSQTTNIGVTSSLAHSWYMVAFFIVVVVREGYLNYILKASYFMSMCFEKKHELTKVKTRTIKIIMANILPTHVAEVFKVRRRSDQLYYENFSQVAVMFATIENYEADKSGLRALHEMICYFDELLVNYQSWYKIEKIKVMGWTYLAACGLHVDHYTDFSVSVPISTNRESDKLQKSGSVRFAPMDGDEIMIKDLHPTQATTNEDDNTILVMTEFALNLLRILRDIRSKGIFFEKDSKLTGSLKIGIAHGPVMAGVVGLSKPHYDIWGHTVNMASRMTSTGVRDGIHVTESTANVLRDFNIRCTYRGMTFVKGVGQVPTYLVDLDENLHFQQHSPDNDSHKGSIVSEDVVAYRSLSTVKDLEWRHLKNKCQNLRLELACSRLRELALMSNVVQIIWHVELLMVAHVILLLALVKVVPSDIVSCTSFLTSWGPSIVVQRIPLCLATTMLSWDYGLRRAILSRYQLVYQNIVYQLVMKKENGLLESILPRKMIRTLQEEICSRIEDQDKNFTPSKAGLRKLFLEPYPNVSILVADMVNYTHLTTTLEAPQLVEILHDLFVNFDLAANRNRAMRIKFLGDSYNCVAGIPNYFPAHASCCVDQALEMIHITQGVSSRRELDINLRIGVHSGEVFAGIIGHTKWQFDIWSKDVDITNRLESSGLPGLVHVSQRTLSMLDEHYIFREGTEAAKNDPILQQAGIRTFLVSNRLPDAVEPGELDDELSSASINSCRLSYGGYYEEIQIKAQREIMKEVDQMAVGHCFIEWRRSSSMKKQDFNEEYLFSNQIHLVLGVFRSWKREWEFHNLPDLMIKYTMLLVLCAGLAIMSINLIEEATYPDILVLLGILLILLILCILAGYKKLRLQWKKLTPMSQPSCFLSRWLLRISERIEDSLFVRIPLTMVVLLLLYVMSSQAVFSCDVAKLELSIIEAHLYNEKSYAECFGPWTVTYCVVIVISLLFVVPGCPLVIKILAGLLILGLHLGTVHLYYGFAFERSETTDLGLKSDYAHTWYLVALFIVLVLRERHVNYLRKFNYFMRVCYEEAHQQTDEKLRSIKIIMANILPTHVAQVYKVRRPHDQLYYENFSKVAVMFASIENFNADTAGLRILHEIICCFDDLLVDYQTRYKIEKIKVMGWTYMVACGLETDHYTDFSIDIPVKQPEADSEIRRGSSVLTVHFGSTEDDEMSGDNVSQPYAQVQDVAVLVMTEFALDLLRIMHDIRYNYVFSEYDTFLTGSLKIGISHGSVMAGVVGLSKPHYDIWGHTVNMASRMSSTGLLDNIQVTRHTAKVLRQFNIRCNYRGHTEVKGVGKVPTYLVVVDPDLTFQDHDQVSMSMKDSKSWVIDTLSLSFTPSFVPPKSSTSDEEEAEGELEENVSEGDELEVSIHERQKGGIFLAGNLH

SEQ ID NO: 19177 - DNA, 3863 bp, DROSOPHILA
ggtctttaggatgggagtgctacggcaatctgaccatccgatggcattgtgcagtggctgtcccgtctccaaattccataacaccgaggtgccccgctgatttacgataccgatggcaataatatcacgtggattgatctctagtataaccaggttcttataggcggtctgcaaatgtagtcagattagttgccgcatgatgatataacccggcgattaacaacctctatgcactcctgtgtgttcttccatatctccgacggatcgtactccatccagcccgcctggtggacaatctgtcgcagcttcagctcatggtaggccaggacctcggcatttttcgttgagtatatctatgaaaatagaatctgagtcagcggccgttttcggctttaggaccttctcaccagaaagcggcagtgggtgctgctcacgcaggcgacgccgatgagtgctccgaatctcccgtaacgaccgttggacatctttggcctgatgggtgtccacggacacgtgcttaatggtgttaaggctcgctagccgagcaaaataagcaagtcgtgttttgttgttgtcgctttttggaacgccaattgtctagtgatgtaaaaattcattttttcatcgaaaatcgatgctagctatcgatttcttagcgaatacgctaaccacaggttggagtacaattccgatcgagagtaattaatctgaccgtgggcctaggtattacaataaattcgacgcttcaaataccctttattatgtaaaacttgcaatttactaatttaaaaattgatttaaaagagcttatatttaatatggcttattataaatgcctggaatagatgtaatatctttgatgttaaagctttgatttatctattaatttatgaataaagacatttgtcacacttcaggcaactctaagaacaccctgtaagactggcatttttggctttgcacaatctggtcacacctatacttttccgggcccttctctccagaaagcaaaatagaaacaaattttccatatttcatgctaaattggcacagatccgtactactatgctcatgagtcgagcgctttgccggagctggctaccccaggtggcgtaagtaagcaggcggtgacggagttccgtatccggagtaaccccacgtaaacttacagccgcagatgtcatgctaatgtgaatgtgccaatcctgcggataaactctggtcatccggcggcgaggtcatgtcggcagattcacagcaaccgaaaacagagcagcaacctgaagccgacgactggggagcctgcggcagcggagcagaacaccccggtgccggtgaacaatgtgatcaaggcggtggccttcacgggagcagtaagatttaatcatgaccagcacttgtacggggatctcatatagtccctgattcacgcttgtagtttacggtcggctgctttgcgggtgccaccatcctggagtacgagaacacacgtagcctaatcctagaaaaggctcgccaggcgagattcggttggtggcagagtcgttcgctggcggacagggattactggacacagatcaaacaagacatccggcggcactgggactcactgacacccggcgacaagatgtttgctcctatcttactctgcaatttggtggccttcgccatgtggcgggtgcccgctctgaaatccacaatgattacctacttcacatccaatccagcggcgagtaagtgctaaaatccaatatgaaaccgaaaaagtgatatcacaacgcccagatcttgcgaaattacgtacttctaggcagtatgccaaaatggatttgattgcctttttaatcacaaaaaatagaagtataaagttatcttggttatgcattttttggccattatcgcaatgtatcagataagatgcattcaattattaaaatcgcctaaaaaaataattaaatacattacacgtgaaaagtattagacgaatagtagtcgaccggaaatccatgttatttatggttatataagaaagtggtcgaatttcttctagttatgtcagcttgttattttccatcttttttatgtaaacttttggttttacctgaataacaaatgttcaaatgttaagttcaaaaagttttggacttataaactattttttactttgtagtattttatgatatttgttttttacaacccccctaactaattgtgtttgatacccttctcgcagaagtcgtctgctggcccatgttcctgtccacattcagccattactcggctatgcaccttttcgccaatatgtacgtgatgcacagctttgccaacgctgcggctgtatcgttgggtaaagagcaattcttagcggtctacctcagcgccggcgtcttctccagtctgatgagcgtgctctacaaggcggccacgagtcaggcggggatgtccctgggtgcggtaagacagcctttattccacgtagtatctataaacttaaagctcttcccttagtctggagctataatgacactgctggcctatgtatgcacccagtatccggacacacaacttagcattctctttctacccgcgttgacattctccgctggagctggtattaaagtgctaatgggcatcgactttgctggcgtcgtgatgggctggaagttcttcgatcacgcagcgcatttgggcggcgccatgtttggcatgtaagtttggcgtgtatgtttataccatcacaggttgtcttattaatcctacggtaatttacagcttttgggccacgtatggggcacagatatgggcaaagcgcattggtctactgaattactaccatgacctgcgccggacgaagcagaaatagtacaggaggcttggggattcgccaagtgaacggacggggagctgaggcaatagagcggtagcgagtagcactacgctgtgtcaataagagtgacatcgttctgccttagaagttcattgaaatcagttaagttgaataaatcgttgacatcctgtactcatgtggtttcccggctcttttttggaacttgtgtttgatccttctgatttcttcgaatacgaaaagctacttcgtgcctgcgctgctgaatcttctccctaagttcctcaagggattctcgttctggagcgtatgatatgtgcaagattccaccatagaactgatgagcatcgagcattttcttggctcttctcgccacctcaaggcgctcgaacttcacggcaaacacatctgtaaaagcttccagatccactgaaacaaaaggaacactatataaaaaagatcttgaacagggataatcatactttttgaagccatctctgaagttaccgaaatacatgattgcactttaccaaatccttgtagtttcgtcctgagattagcttgaagatttattttaggtaccccaaagatcagcaaatgacgggactcactagcaactgtataaacctacaaaggataaaaaacacaataaaagtacaataaaacattgctattactataaagctattactaaactattactactaaacattactatttccccaccttgacagctttcaattcgcggccctgacggtatttcaatcttgtagtgcagtattccagacgtttgtggtgttcagaagaagaggcttccatattcaggatattaaaaacaaaactacaactaaacggatttgtttattattattttcaagtccacgattaaacgtacttatcgataaatatcaacagccagctgttatgttattgtactgttatttacatgattcgctgtaatggaattcattcaaagttgttgaattgagtatgttagcacctgttgcatttccaaata

SEQ ID NO: 19178 - DNA, 1121 bp, DROSOPHILA
ccagaaagcaaaatagaaacaaattttccatatttcatgctaaattggcacagatccgtactactatgctcatgagtcgagcgctttgccggagctggctaccccaggtggcccgcagatgtcatgctaatgtgaatgtgccaatcctgcggataaactctggtcatccggcggcgaggtcatgtcggcagattcacagcaaccgaaaacagagcagcaacctgaagccgacgactggggagcctgcggcagcggagcagaacaccccggtgccggtgaacaatgtgatcaaggcggtggccttcacgggagcatttacggtcggctgctttgcgggtgccaccatcctggagtacgagaacacacgtagcctaatcctagaaaaggctcgccaggcgagattcggttggtggcagagtcgttcgctggcggacagggattactggacacagatcaaacaagacatccggcggcactgggactcactgacacccggcgacaagatgtttgctcctatcttactctgcaatttggtggccttcgccatgtggcgggtgcccgctctgaaatccacaatgattacctacttcacatccaatccagcggcgaaagtcgtctgctggcccatgttcctgtccacattcagccattactcggctatgcaccttttcgccaatatgtacgtgatgcacagctttgccaacgctgcggctgtatcgttgggtaaagagcaattcttagcggtctacctcagcgccggcgtcttctccagtctgatgagcgtgctctacaaggcggccacgagtcaggcggggatgtccctgggtgcgtctggagctataatgacactgctggcctatgtatgcacccagtatccggacacacaacttagcattctctttctacccgcgttgacattctccgctggagctggtattaaagtgctaatgggcatcgactttgctggcgtcgtgatgggctggaagttcttcgatcacgcagcgcatttgggcggcgccatgtttggcatcttttgggccacgtatggggcacagatatgggcaaagcgcattggtctactgaattactaccatgacctgcgccggacgaagcagaaatag

SEQ ID NO: 19179 - protein, 351 aa, DROSOPHILA
MLMSRALCRSWLPQVARRCHANVNVPILRINSGHPAARSCRQIHSNRKQSSNLKPTTGEPAAAEQNTPVPVNNVIKAVAFTGAFTVGCFAGATILEYENTRSLILEKARQARFGWWQSRSLADRDYWTQIKQDIRRHWDSLTPGDKMFAPILLCNLVAFAMWRVPALKSTMITYFTSNPAAKVVCWPMFLSTFSHYSAMHLFANMYVMHSFANAAAVSLGKEQFLAVYLSAGVFSSLMSVLYKAATSQAGMSLGASGAIMTLLAYVCTQYPDTQLSILFLPALTFSAGAGIKVLMGIDFAGVVMGWKFFDHAAHLGGAMFGIFWATYGAQIWAKRIGLLNYYHDLRRTKQK

SEQ ID NO: 19180 - DNA, 3945 bp, DROSOPHILA
tgattgcactttaccaaatccttgtagtttcgtcctgagattagcttgaagatttattttaggtaccccaaagatcagcaaatgacgggactcactagcaactgtataaacctacaaaggataaaaaacacaataaaagtacaataaaacattgctattactataaagctattactaaactattactactaaacattactatttccccaccttgacagctttcaattcgcggccctgacggtatttcaatcttgtagtgcagtattccagacgtttgtggtgttcagaagaagaggcttccatattcaggatattaaaaacaaaactacaactaaacggatttgtttattattattttcaagtccacgattaaacgtacttatcgataaatatcaacagccagctgttatgttattgtactgttatttacatgattcgctgtaatggaattcattcaaagttgttgaattgagtatgttagcacctgttgcatttccaaataattcgagatttccaaaaaaaaaattaattttaagtcaatgtccttggaaaaaaattttaactttgtttcaccttgattttttatctaattgtagcaagaggaccaaattttttcactcaaaactaattaagtggcgtttcatcagctgttttctggattagtctagggttgtctcattgcatgaaatatcgatgataaaaaaatttcaaaatttatttagtatttgaaactattaatattaatatttttcaagtgacaagctgggaagctaaacataaaattgtgcagtaaggattcgatttatggtttaagaaaagaaaactaccaccccataattgcattagatttaccctaaatttataaaaagtgaattgacgcactcgacagccctgattttcccatagttttcccatcaccaaaaatggcggcaaatcgaaacagtttgccgcccggcataaaacccaatgtagctgtatttcccagatcatttgccacacaactttcaaactgtacacttaatacacgtcgtggtttaagtgaattttaccagagaatcagagaagcgcccctacctgctaataataatccattcaaaaacatctcaaatggcgtccaaggaaaacattgctgacaacatggagaagttctcgcttaaggtaatcgacacgcaaataaagttcacagctatacatagacgtaataccgcgatcagtgcgcttgtgttgatttccctagggaaaagtgctacgcagcggaaaaatactcatgctttagttggccttctttgtttttcgttgttaacagagcccgagcaagaagattctgacggatagcaccaacaacgttcgcaagatgtccattggacacgaggcaaacggacagttggccaaggagtcctccaccgtgaatggcatcggcaagtctgccaattccctcatggagaagtccgtaacccccttcgacccgtcgctggagccccttctgcgcgagaatccccgacgcttcgtcatctttcccatccagtaccacgacatctggcagatgtacaagaaggtgtgtataccatacatatagcaaaacactgtccatttgcattggtggtgaaaatctattttttgggcggcaaaatatcaaaagggcgggcatttcgagataaagcgcgccaaaagccggtcacgtactcaacgtggttgattacacgaatcagactttatgatagcttcgtttggttaaacaaccccctcccacatttctcgaccctccctttccgctgattcactgcatcacggtttactcaatgtcaacaatagccttcgtttttggcgggaaatgcagcacataacgatcacatactataccattttatgtagccaattacatttccccgccgcttttaattgctttgtagtaactttgtttacattttaattgcattttaattgataagctcgttgtgcacgatgacatttcttgaaaacttgttaaagtggaaaatgaaaaataataaatttatacagtaattatctcttttaaaattgtaacttttttttttaatgtgcaggctgaggcttctttctggactgtcgaggaggtggatttgtccaaggaccttactgattggcaccgcctgaaggacgacgagcgccatttcatctcgcacgtgcttgccttcttcgccgcctccgacggcatcgtaaacgagaacctggtggagcgcttcagtcaggaggtgcagatcacggaggcacgttgcttctacggctttcagatcgccatggagaacgtgcactcggagatgtacagtgttttgatcgacacttacatccgtgatccacaccagcgagagtacctgtttaacgctatcgaaacgatgccggctgtgaagcgcaaggcagactgggccctgtcctggatctcctccaaatcggccaacttcggggaacgcatcatcgcctttgccgccgtggagggcatcttcttcagcggcagcttcgcttccattttctggcttaagaagcgaggtctgatgcctggattgaccttctccaacgagcttatctctcgcgacgagggcttgcactgcgactttgccgtgctgatgttccaacacctggtgcagcgacccaagcgcgagcgcatcatcgagatcatccgcgacgcggtggccattgagcaggagttccttaccgatgccctgcccgtcaatttgattggcatgaattgcgacctgatgtcccagtacattgagttcgtagcggaccgtttgctcgtggagttgggcgttggaaagatctacaacaccaaaaacccctttaacttcatggagatgatatcgctggatggaaagaccaacttttttgagaagaaggtgggggagtaccagcgcatgggagtggtcagcaaccccctggacaacgtgttcaccctggacgcggatttctagggctggccccggacatcattgttgcaatttaaacctctcaagggctggcttctcatcctttatattttaatctgacggcaattatatgtagtccgttttaattttaacataggctaagaacaatcacagaccttcaacacattcacctaatcatttacttggacctccaattacgtttataatactatctacacacttgacttttacgaggagcgtaccttttccgaattcattgtacatacaacattttaaataaatttatacatagacaattattaagcactacaagtaaaattgagttttaattattctgaaaaaaatcttcaaaaattactgtttatgcacgattatataataagaaaatcaatttcaaaaaaatttataaaaaggattgggaaaatttaagaatttaaataattcgaatttcaaattttcgatttcagttatatatatggtaggtaaacttatcgatagtcacgggcatttttactatcagctgtgctgaacaatcccattcgctgtttttatcaatttggataaaattcttgttattcagttattaccataaaaagtattagatgtcaataacaggagtgggcgattaaatcaacccaattcagctaggcgccctaatagttgataaaatgcgaacagtgcattaaattgtaggcggaggaccagtggcgataagtgaatccagtcacatggacagaaggtggaatccagaaaaaatcgaggagcagagctccctcttggcagcggaatattcctccagctcgggagcagctgcttccggatccgaggacgagacggtcaccactagtggagcgctacgcagcaaagcaaagctgaggaagcggcagctaagaaatcgcatgccgcttcccaggatgttaagacgccttggctgctacacgctgagcgccttcctaatctgtgggctgctcctcgtctacctgccgctcgtctacttggatgtacacaagcgtagtggtaggac

SEQ ID NO: 19181 - DNA, 1289 bp, DROSOPHILA
actttcaaactgtacacttaatacacgtcgtggtttaagtgaattttaccagagaatcagagaagcgcccctacctgctaataataatccattcaaaaacatctcaaatggcgtccaaggaaaacattgctgacaacatggagaagttctcgcttaagagcccgagcaagaagattctgacggatagcaccaacaacgttcgcaagatgtccattggacacgaggcaaacggacagttggccaaggagtcctccaccgtgaatggcatcggcaagtctgccaattccctcatggagaagtccgtaacccccttcgacccgtcgctggagccccttctgcgcgagaatccccgacgcttcgtcatctttcccatccagtaccacgacatctggcagatgtacaagaaggctgaggcttctttctggactgtcgaggaggtggatttgtccaaggaccttactgattggcaccgcctgaaggacgacgagcgccatttcatctcgcacgtgcttgccttcttcgccgcctccgacggcatcgtaaacgagaacctggtggagcgcttcagtcaggaggtgcagatcacggaggcacgttgcttctacggctttcagatcgccatggagaacgtgcactcggagatgtacagtgttttgatcgacacttacatccgtgatccacaccagcgagagtacctgtttaacgctatcgaaacgatgccggctgtgaagcgcaaggcagactgggccctgtcctggatctcctccaaatcggccaacttcggggaacgcatcatcgcctttgccgccgtggagggcatcttcttcagcggcagcttcgcttccattttctggcttaagaagcgaggtctgatgcctggattgaccttctccaacgagcttatctctcgcgacgagggcttgcactgcgactttgccgtgctgatgttccaacacctggtgcagcgacccaagcgcgagcgcatcatcgagatcatccgcgacgcggtggccattgagcaggagttccttaccgatgccctgcccgtcaatttgattggcatgaattgcgacctgatgtcccagtacattgagttcgtagcggaccgtttgctcgtggagttgggcgttggaaagatctacaacaccaaaaacccctttaacttcatggagatgatatcgctggatggaaagaccaacttttttgagaagaaggtgggggagtaccagcgcatgggagtggtcagcaaccccctggacaacgtgttcaccctggacgcggatttctag

SEQ ID NO: 19182 - protein, 393 aa, DROSOPHILA
MASKENIADNMEKFSLKSPSKKILTDSTNNVRKMSIGHEANGQLAKESSTVNGIGKSANSLMEKSVTPFDPSLEPLLRENPRRFVIFPIQYHDIWQMYKKAEASFWTVEEVDLSKDLTDWHRLKDDERHFISHVLAFFAASDGIVNENLVERFSQEVQITEARCFYGFQIAMENVHSEMYSVLIDTYIRDPHQREYLFNAIETMPAVKRKADWALSWISSKSANFGERIIAFAAVEGIFFSGSFASIFWLKKRGLMPGLTFSNELISRDEGLHCDFAVLMFQHLVQRPKRERIIEIIRDAVAIEQEFLTDALPVNLIGMNCDLMSQYIEFVADRLLVELGVGKIYNTKNPFNFMEMISLDGKTNFFEKKVGEYQRMGVVSNPLDNVFTLDADF

SEQ ID NO: 19183 - DNA, 3752 bp, DROSOPHILA
ggtatgagttcgtccgtagtgtagtgcggtcgctctgagtccgtgtccacatctaatggctctaatttctccacgcttaggcgatgtttcgtcagctttgagctcacccacgaataccatctcttggtgctgacggcggtggccaaaactggagcctgcccctcgctgacgcacacctccacatcgaagacaagtcccttctccagtgggtgatccaccggcgtggctgttccatcctctggatcataagctgtccagccggtatggaaagcccatcgcttcggacgcttcggcagctgctcgcattggaccaggggaagtagtaactcctcgtatggctgcacttgctccttggcaatgttgtggaagtgctcttcaatattggcgcccctaagcgcgggcaatttcaactggacatccgaaacaggagcagaactttcgatatcgactccgtgccggcgcaactcgtctttgtaaaccttagcggaggccacctgctgctccgaaatgcttcgcggcgcttgtgggaacagttgggcgtgcaaattccgcgagatcatctgcaccttgaccagattttccgcatattccgttgggccattctccacattctccggcttctttggtttgtttaccttttgcggaggcttgacccgccgaaagatcttcacgctactgctggcgtagtgctcccggctaactttgctggcgtactttctgatcaggtggaactgcatcctcgttttaataaaggaaacatcctttaaggcaactgaagtccaacctgcgaccacacactcctccgtaagattgccgccagcctaggtatttttgtgcgcttgcgcggcggtcacattgatttaattcaaatttatttccgttaaattaataataaataaatataaaacattttcaaaaaattccaacaaatcaaatttcttgctgcttgaaacgattaattattaaaaaacaaacacttaacatttgattttacgaataaaaaacattttattcagtttgctataaaggtgaaacactttaaaacacacacacactttcggaaccattatggaagttggtggggggggggggggggaaagaacaatctcttcggttaatttatgtaaaaaggctttcgcacggtacagaacaatgggaaaagcgattttggaaaacattttggcaaatacttcgctcctggccaggccaacacactcgctaacagacaataacacgtaacgctggtccgttccgggccgcactagatctgcaggttgcgcatgccgccattgatgccgccctgctccacattccaaatgaccagctgcccgtcgacgcccgaggtggacaccttggtggcgctcgccttgtcgccggcatacagtcgcacgctggtgatggcgttctgatgtatggaatcgaccaccgtgtccgtgttctccgtgcgcatgttgcggtccatcgactgaaagattctcatggcggtaatgccgctcgactccttcttctgcgacttatcgagcttgccgctcagcaccagctttccatcggcagtcagactgtagagcagtggcacacagctatagccggccaccacgacggacgtgggcgagacccattcgcatgacaggaagggcagatagccggtgcggcatcgaatgaccgtattgccattggtagcgtccgcgatgctcacgcagctgtcgtggcccacccagcagaccttgttaccgtcgctggagaagctcacgctgttaatccagccgccacccgaggtctgcgagttgcggaactcggccattagctggccaaggggcttgcgattgccccacggcgtcggcgtcggtggctcctcgatgtccttgatgaaggccgagaaaacgcgcaccttgtagtccgtggagccggccagcagcagaacgttgttcggatgccagtccagcgaagtgaccgtagagcggatcggcttcttgatgtgcttcgacacccaccagtcgttctccgactcgaaatagcacacggatatgagtcgggcgcccgaacccacagcgaacttgttctccgccggcgaccacttgacgcaggttgccgcccgattgatgcgcagcagcaccaacgccggcttccacttgccatcgtcgccctgcgtccacacataggcattacggtcggcggcacagctcacaatccgattggtgttcttggcccagtcgatgcccatgacgcgcagatcgtgctggttgagcacgtccgccagcttccagtcgctgccctcccggctgtatatgtggatctcatggttgttgggcgataaggcaatctctgcgaatttttgggagtgggtggtggtgagtcacactgtgccggatgagtaatttgggtcgcacttacgggttcgatccttgttccatgcgtggcaggtgatggaggccagcgaggtgccaaaggtgtatgtctcggccatcgtgggtggctaaatgcgctcggaatgtgcagtgttcgctcgtccaaatccaaccacacgcgtagtttcttcggttcggttcgccggattttcggattttggatatcgctgtgtagcaattgggcgttgtttccgctggattttagcttcgctctcgttttaatcgcggactctgggccgtcaacacgattaagctggcgttgctgggatggattctggctttgcctgggccggaagagtagagcgttgtggaaaaaactctttggaaaagtaatgcacaaaattaatcacccgaaattagagctggaacaaaaatcgatggccctcaatactatcgttatttcgttatatcgatatttttcgattgtttgaaaaatgctaaggtaccagtgctgttacgcacgttcggtatataccagagggaataatttggcgccatttcaatggtcacactaaacagaaaccatttcttgtaaacaaatttttaataactggctggctcgtaatttatttttgttattttataaaccgaggaagtattttcccttttgaaagcccgtttaaataacaccacttcgcctgtgggtagctgaggaaacttaaaagcagacgacagctatggaagccatctgctcctccttggagccgctgtttccctgtcgggaggcggccattgaaacgctgggcgagctgataggagattcgagtgagacatatccctcggcaatttacctattcggacacagtggaaccggcaaaacagctctgaccagagctttcctcaaagaatgtggaaaacggcaaaatgtccgcacagcgcatttaaatgccatcgaatgctacaccaccaagataatgctggagatcctgttagactcgctggcacccgatcaaggtgatgcgctgaaggtcgacaacatgctggactttgtggagcagctgcgtcggcaggccgctacacgcgtggaggatcagggatttctcatagccgtggataacgcggaaaggctgcgcgacatggatgccaatgtgttgcccgttcttctccgactgcaggagctgaccaacctgaatctgtgcgttattctgctctcccagctgccctttgagaagttctacaacaagaccggacttagtgaaatcgtctgcctgcacttggcgcagtacaacaaggcggagacacagcgcatcctgggatctgactttcagcaggtgcgaaatcaactgctggaacagttcgcccaggataagaagcgtctggagatttgccaggaagccgtaactgaag

SEQ ID NO: 19184 - DNA, 1683 bp, DROSOPHILA
attaattttgtgcattacttttccaaagagttttttccacaacgctctactcttccggcccaggcaaagccagaatccatcccagcaacgccagcttaatcgtgttgacggcccagagtccgcgattaaaacgagagcgaagctaaaatccagcggaaacaacgcccaattgctacacagcgatatccaaaatccgaaaatccggcgaaccgaaccgaagaaactacgcgtgtggttggatttggacgagcgaacactgcacattccgagcgcatttagccacccacgatggccgagacatacacctttggcacctcgctggcctccatcacctgccacgcatggaacaaggatcgaacccagattgccttatcgcccaacaaccatgagatccacatatacagccgggagggcagcgactggaagctggcggacgtgctcaaccagcacgatctgcgcgtcatgggcatcgactgggccaagaacaccaatcggattgtgagctgtgccgccgaccgtaatgcctatgtgtggacgcagggcgacgatggcaagtggaagccggcgttggtgctgctgcgcatcaatcgggcggcaacctgcgtcaagtggtcgccggcggagaacaagttcgctgtgggttcgggcgcccgactcatatccgtgtgctatttcgagtcggagaacgactggtgggtgtcgaagcacatcaagaagccgatccgctctacggtcacttcgctggactggcatccgaacaacgttctgctgctggccggctccacggactacaaggtgcgcgttttctcggccttcatcaaggacatcgaggagccaccgacgccgacgccgtggggcaatcgcaagccccttggccagctaatggccgagttccgcaactcgcagacctcgggtggcggctggattaacagcgtgagcttctccagcgacggtaacaaggtctgctgggtgggccacgacagctgcgtgagcatcgcggacgctaccaatggcaatacggtcattcgatgccgcaccggctatctgcccttcctgtcatgcgaatgggtctcgcccacgtccgtcgtggtggccggctatagctgtgtgccactgctctacagtctgactgccgatggaaagctggtgctgagcggcaagctcgataagtcgcagaagaaggagtcgagcggcattaccgccatgagaatctttcagtcgatggaccgcaacatgcgcacggagaacacggacacggtggtcgattccatacatcagaacgccatcaccagcgtgcgactgtatgccggcgacaaggcgagcgccaccaaggtgtccacctcgggcgtcgacgggcagctggtcatttggaatgtggagcagggcggcatcaatggcggcatgcgcaacctgcagatctagtgcggcccggaacggaccagcgttacgtgttattgtctgttagcgagtgtgttggcctggccaggagcgaagtatttgccaaaatgttttccaaaatcgcttttcccattgttctgtaccgtgcgaaagcctttttacataaattaaccgaagagattgttctttccccccccccccccccaccaacttccataatggttccgaaagtgtgtgtgtgttttaaagtgtttcacctttatagcaaactgaataaaatgtttt

SEQ ID NO: 19185 - protein, 377 aa, DROSOPHILA
MAETYTFGTSLASITCHAWNKDRTQIALSPNNHEIHIYSREGSDWKLADVLNQHDLRVMGIDWAKNTNRIVSCAADRNAYVWTQGDDGKWKPALVLLRINRAATCVKWSPAENKFAVGSGARLISVCYFESENDWWVSKHIKKPIRSTVTSLDWHPNNVLLLAGSTDYKVRVFSAFIKDIEEPPTPTPWGNRKPLGQLMAEFRNSQTSGGGWINSVSFSSDGNKVCWVGHDSCVSIADATNGNTVIRCRTGYLPFLSCEWVSPTSVVVAGYSCVPLLYSLTADGKLVLSGKLDKSQKKESSGITAMRIFQSMDRNMRTENTDTVVDSIHQNAITSVRLYAGDKASATKVSTSGVDGQLVIWNVEQGGINGGMRNLQI

SEQ ID NO: 19186 - DNA, 3537 bp, DROSOPHILA
gatttctttcatgtgcgggatgtgcttgtgctgtgcgaacatggttataagaattccctgcagctgcttcgagtccacctttacgaactggtgatcgctcagagagtccgcgatcttcagcacccacggatcgtcattgaagatttttagcacctgcggtgtggtgctcacctcctggaatccgattacatagatatcgggcagctggttatccggacaagtggtggtgccattaagggacaaaagggagctcagatcctgatttcgcggcgtatgggtgcccacgttccaggtcaaaaggaagatgcacagatccgcaatcgccgtggccgtaaccatttttccgccgtctaattatctatgattaatacttgttgttttggacgtcacaaggtggctgttgatgagttcatgggcatccaaaacaggtttacggatttggcagcatcagcaaataaagcgaaaggcgttttgcacacgcaactttcatttatgtaaccgttaattcttcagcactaattttttaagccgctttaattggactaggaagcgctagttgcccgtattatttatagaatactcagatgtcgttatttatgtttatttgtccgtccgttgcgtgagcttagtgtgaccgcagcacaactatttaaatataccttaggcggcggcaaaaattttatggtatctcgatagtaacggagctctgaagctcatcgaaaacatcggctaacatgagcttctcatctaatttagatttttatttgaaacacattagatattataaaagccaaaaatcaatttaagaaatataaagatataagattaaaagttgtactgtgcgtaagttcctttaaaataataatactcttatttcattgtttttttttttacgcgagaatgcccctttgcatttgcttgtgctaaaccgatattatcggcaactagtcaattgtgtgtacacactggctaaggatttttcataaaaataaacactttgtataaacttaccttccgaactattttacttaagttaaaagtatggctaacagctacgacatacccagttggtgcgttgtcaaattcagccgctgccttgccacaaaatcacgtagcattttatttattttagggctggaaaaccgcccactggcttacatctggatgtgctaaaggacgacaaactagtacaaaaactgatggtggatgaaaaaagatgctatctatttggtcgcaacagtcaaatgaacgacttctgcatagaccatgcctcttgttcgcgggtccactcggcgtttgtctaccacaagcacctcaacatagcctacctcgtggatctggggtccagtaggtactaagatatctgggattcggagtaagcttatccatttacttttgacagctcatggcacctttattggaacactcagattggaagcgcacaagcccacacagctgcagattaatagcaccttccactttggggcttctacccggaactacatactcagggaacgaccctctggccaccacagcaacatcatggaagacctgccgctcagtgaaaccagcgatggagctctcctgggcctacccgaaagccaaacggagcttgatgtgcgtttggttgaaaagaaaagctaaatactatgtaaactaaccttccattatcctgcagaatctcacagaatacaacacagcccacaatcggcgcatctcaatgctgggcatcgatgatgataccaatatgcgaaagcaaaacgccttgaaacagggacggcgcactcgaaatgtcacatttaacgatgaggagattgtcatcaatcctgaggatgtggatcctaatgtgggacgcttcaggaacttggtacaaaccactgtggtgcccgccaagagggctcgctgcgacgtcaatcatatgggcatccattcgggcaacagcagtttgtccagtgccaatgccgcacatgtacaccaaatgttccagcagagcctagttgacatgaagcagcagcatagggaaatgcctccgcccaatgcggtgctccactcgcctactaattccctatatcaaggtctaccggccgaaatgcatggcaagggtgacctagagcccatctccccgctgagcattggttccaagttgggcctattgctcccgaatcctgcgcctgaagtgctgccagtctatgacgaagctgtggagacctcgacattggctcaaaagttggccgtcgctaatgcaaacggtaatagttctcgcgactatttgtttaaaaacttactgattgtttataacaccattttagttcgtcgctttggtgaggatccgcatgactcgagtggcgaaggcgattcgctgtgcccacagaaaaagaaatacgccaaggaagcatggccaggtcgcaagcccatgttggggcagctgtaattgcgtattaacaaaataattaagattccacctacgattttctcaagcatatgattgacaacacactctggagtaatatttgtttattagacttttaacgtaaaacaaaacatttaatatctttatctgatcacatcttgcagctgtgtggatacctggggaagggtatcacatcacgaatgtttttaacgcccgtgacaagctgcaagtaacgctcaaagcccattccaaatcctccagttggaactcctccatactttcgcaagtcaacgtaccattccagatccttcggcagatgcggatgggattttaatatagcaggatcgctttcacgcaggctcccgccgcataattctccaacagctggcatcagtaggtctagggcatgaactcgattgggatttgaacgcgagactttcatgtaaaaaggtttctgctgagctggccaatccacaacgaatacgggagcaccacaatgggccactaaaaaaagttcttggtccttggagaatccttcgttcaggctaataggagtcttaagactgtccttgttttcctgcagtacttgcagggcttcatcgtagctcattatcttccacggtacttgcagccaagggagatcggagttagagtttgaattccgttgacagaaacttaggtcctcgccactcgtttccagcaaacggtttgtcacagatttcagcatctgttcaatgaactgcgctaacttctccatctcctccaaatgggcaagttccgcttcaaacatatagaactctgctaaatgcaacggagacttggagttctccgctcggaaggctggtgagagagtgtatgtcttgcctaaaccgtatgtcatggcctccaggtgcagttgaccagagacgctgaggaatactttgctatcaaagtagctttgttccatgggaatatttggtcggttcatctgcttgagcaggtcttgggagtccggttgtacccgaaacacttctcctgctccctcgcaatcgttggttgtgagcagaggagtgttgatctgcacgaaatcctgatcatccatgtagtcgtgtatagctttttgtgctttgtgtctgaccctcatctgg

SEQ ID NO: 19187 - DNA, 1299 bp, DROSOPHILA
tataaacttaccttccgaactattttacttaagttaaaagtatggctaacagctacgacatacccagttgggctggaaaaccgcccactggcttacatctggatgtgctaaaggacgacaaactagtacaaaaactgatggtggatgaaaaaagatgctatctatttggtcgcaacagtcaaatgaacgacttctgcatagaccatgcctcttgttcgcgggtccactcggcgtttgtctaccacaagcacctcaacatagcctacctcgtggatctggggtccactcatggcacctttattggaacactcagattggaagcgcacaagcccacacagctgcagattaatagcaccttccactttggggcttctacccggaactacatactcagggaacgaccctctggccaccacagcaacatcatggaagacctgccgctcagtgaaaccagcgatggagctctcctgggcctacccgaaagccaaacggagcttgataatctcacagaatacaacacagcccacaatcggcgcatctcaatgctgggcatcgatgatgataccaatatgcgaaagcaaaacgccttgaaacagggacggcgcactcgaaatgtcacatttaacgatgaggagattgtcatcaatcctgaggatgtggatcctaatgtgggacgcttcaggaacttggtacaaaccactgtggtgcccgccaagagggctcgctgcgacgtcaatcatatgggcatccattcgggcaacagcagtttgtccagtgccaatgccgcacatgtacaccaaatgttccagcagagcctagttgacatgaagcagcagcatagggaaatgcctccgcccaatgcggtgctccactcgcctactaattccctatatcaaggtctaccggccgaaatgcatggcaagggtgacctagagcccatctccccgctgagcattggttccaagttgggcctattgctcccgaatcctgcgcctgaagtgctgccagtctatgacgaagctgtggagacctcgacattggctcaaaagttggccgtcgctaatgcaaacgttcgtcgctttggtgaggatccgcatgactcgagtggcgaaggcgattcgctgtgcccacagaaaaagaaatacgccaaggaagcatggccaggtcgcaagcccatgttggggcagctgtaattgcgtattaacaaaataattaagattccacctacgattttctcaagcatatgattgacaacacactctggagtaatatttgtttattagacttttaacgtaaaac

SEQ ID NO: 19188 - protein, 383 aa, DROSOPHILA
MANSYDIPSWAGKPPTGLHLDVLKDDKLVQKLMVDEKRCYLFGRNSQMNDFCIDHASCSRVHSAFVYHKHLNIAYLVDLGSTHGTFIGTLRLEAHKPTQLQINSTFHFGASTRNYILRERPSGHHSNIMEDLPLSETSDGALLGLPESQTELDNLTEYNTAHNRRISMLGIDDDTNMRKQNALKQGRRTRNVTFNDEEIVINPEDVDPNVGRFRNLVQTTVVPAKRARCDVNHMGIHSGNSSLSSANAAHVHQMFQQSLVDMKQQHREMPPPNAVLHSPTNSLYQGLPAEMHGKGDLEPISPLSIGSKLGLLLPNPAPEVLPVYDEAVETSTLAQKLAVANANVRRFGEDPHDSSGEGDSLCPQKKKYAKEAWPGRKPMLGQL

SEQ ID NO: 19189 - DNA, 6997 bp, DROSOPHILA
tcatccgcgacgcggtggccattgagcaggagttccttaccgatgccctgcccgtcaatttgattggcatgaattgcgacctgatgtcccagtacattgagttcgtagcggaccgtttgctcgtggagttgggcgttggaaagatctacaacaccaaaaacccctttaacttcatggagatgatatcgctggatggaaagaccaacttttttgagaagaaggtgggggagtaccagcgcatgggagtggtcagcaaccccctggacaacgtgttcaccctggacgcggatttctagggctggccccggacatcattgttgcaatttaaacctctcaagggctggcttctcatcctttatattttaatctgacggcaattatatgtagtccgttttaattttaacataggctaagaacaatcacagaccttcaacacattcacctaatcatttacttggacctccaattacgtttataatactatctacacacttgacttttacgaggagcgtaccttttccgaattcattgtacatacaacattttaaataaatttatacatagacaattattaagcactacaagtaaaattgagttttaattattctgaaaaaaatcttcaaaaattactgtttatgcacgattatataataagaaaatcaatttcaaaaaaatttataaaaaggattgggaaaatttaagaatttaaataattcgaatttcaaattttcgatttcagttatatatatggtaggtaaacttatcgatagtcacgggcatttttactatcagctgtgctgaacaatcccattcgctgtttttatcaatttggataaaattcttgttattcagttattaccataaaaagtattagatgtcaataacaggagtgggcgattaaatcaacccaattcagctaggcgccctaatagttgataaaatgcgaacagtgcattaaattgtaggcggaggaccagtggcgataagtgaatccagtcacatggacagaaggtggaatccagaaaaaatcgaggagcagagctccctcttggcagcggaatattcctccagctcgggagcagctgcttccggatccgaggacgagacggtcaccactagtggagcgctacgcagcaaagcaaagctgaggaagcggcagctaagaaatcgcatgccgcttcccaggatgttaagacgccttggctgctacacgctgagcgccttcctaatctgtgggctgctcctcgtctacctgccgctcgtctacttggatgtacacaagcgtagtggtaggacaatggttttcttgatacccgcatttattttaaaaatgatccattgacgctttcacagctggtctgccggattggacgtcagagacctcccgcagcatagctgactacctggatatcgggctcagttctggcgtcattgttcccaaggacttttgccggaataagaccttcctggtaatcgccgtatgcaccggcgtggacaacttcattcagcgacataccatccgtgagacctggggcaataccaccgagttcaactacccagcgtttggaaagctccatggtcatctcaagggtcactacctgccgccactgccggatcgcttaaagatgtacggggattatttgagcggcgaggggcagtctctgactgcctcagtgcgcattgttttcattgtaggccgccagaaagatgaggccatgttgggcaatgagaccctgaatcgcattcacattgaatcggaaaagtacaacgacatcattcaggagaacttcgtggatagctacaacaacctgacgcttaagtctgtgatggctctaaagcacattagccgcagttgctttaataccgcggtctacttcctcaagtgcgacgacgataccttcgtaaatatacccaatttgctgaactttctgctcggaggaactataccgttgtacaatgataccctagattaccacgaccggtccacctatttagtcactgcaccgcaaacccgattgaaagccagcagcgatgtgttgtacggccatcagttttgcaacgtggtgccggttagcgaagtaagcagcaagtggtacatgccctcatacatgtataagccggagtcgtatccaaagtatctttccggagccggctatctcatgtccatcgatgtagtgcagcgcttgttcgaggcttcgcttaatacgacgctggtctatctggaggacgtgtacatcactgggttgtgtgcacaaaaagctaagatcaatcgacaccaccacccgctcttcagcttcgcccactcgaaacagatgtgcgctttcaagggcaccatcacacagcatcagttaaaagacgatagcatggtatccgcctggaactacgtgtccaactactccatcaaatgtccgcctcctgggcggtactttagccaggtgcgactgcgcaagcggcctatctgttagatgtcctaacctagaacttcacggtaaatttatccactaccccttcccatttctcctgctctctggataaaaaccgatatactatatgtttaaagcttcggcatagatttttgacattcagttcctataatttcttgcggaccacattgggataaaatgtaatcaacttgaattgaacagtgataattaatcctaaaaaggtcatacatacaatgattttgatttcatattagtttatgacgataacttcgcttgtcaaggcatgtatatacaattttagatggcctagcactctcaatactccatatcaatgttaaaagtaatgcacgagctaaatatctcataaatccatattcttataatcttaagaaattatttaacgacatagtgtttataatagaagagaaagtatttatttttggacatgactcgccacatatatgtatccttatttaccatatgctgtaaattagtttttagttggcacacatcatcactatcttttctcttctaaactaaaactatcaactatctattgaattgacgcacagcagtgttctttaataagaaaccattttcttaatttatgatacgttatagaactatattaatttaatatgaaagattgccaaataaacaaattgtttctgttcaaaagagcgaataaattttaaaaccagtcctacaaaaattggtttccattttcttggttttacactttcgaaactctccttttcgaaagctgtcgatttggggttttttaagactaaataaatgcatattaggctcgtagacgagcttaagcggctctatcggatcgtggccagaatctggctatttatcagaaggtacaaggctattattatcctagcagtgttcttggcctacaggatatttaattttaagccagatccaagcaagcggaccggtaagttaattattgttgcgtactgcttatatttactgctaatatttattttgtacagcatctttggcgggatggagtcgtgatgcgcccagaagtgtagccgattacttggatccaaccaaggacacggcgctcattgttccgcgacatttttgtcgtagcaaggcgttgctgacaatagcagtatgttcctatgtgcatcactttgaacggcgacgtgccatccggaagctttggggcaacttcacggacttcaactattctgtctttgtaaaactgcatggccatcttaaaggacgttaccaggacgtgctgcccgagcgtctgaaactgtatagcgagtatctgagtggtgagggggactccctaagggcctccatacggctcgtcttcattgtgggccgcagaaacttggcttccctgctggagaatgaggcggtggccatcgaggcgcagaagtataatgatgttatccaggagaacttcattgacacctacaacaacttgaccatcaaggctgtgatggcgctaaagcatatcacccagagttgtctaaacactacagcgttctacttcaagtgtgacgacgacaccttcgttaatgtgcctaacatactgcacttcctgctcggaggaacgattcctgtgaacgtggtaacggcaggcttccattacggcaacacatacgaggtcacttcgccgaggaaacgattgacggctcgcagggagatgatgtacggacgccagcactgcaatgtgccgccggccaccaataagttgaacaaatggtatatgccatcgtacatgtttcggggtggagtgtatcccaggtacctgtgcggatccggctacttgctgtccattgatgtggtcccacgtctgtacaaggcgtcgctgggcactagaattgtgcacttggaggacatgttcgtcaccggactgtgtgcagagaaggctggcattaagcgaacgaaccacccgctcttcaggtccagctatccctatgagggggatgaacagtgcgcccttaagggaagcttcactgttcaccgtgcaaaggataacgtgatgtgggaggcatggtaccgagtcaccaacttcagcagcaagtgccctccaccacaaaaagacttccacttgaggctgcccaagatgcaaaggtgctagatttcacagaaggctaatagcaacatatacatatgtactcattaattttaatcattagattgataaaaaagactagtggcctttttatatttcttcaaatttgaataatttcttgttaaaatacaattgaagttattagaatgttacgccgattgcaattgcatctgtcagggatctgtcggcttatccatcggtataagctggtcctgctcgttatgtttgtactgcttttaatgtacctgagtccacgaccggtaccggatgtccacgaccgaaaaggtaggataataggattaggaactattattatttctcaccatcgaactcttgacagctgaattgagcggttgggaacgagagaagccgctgaaaatcggcgactatctggaccaagggaaaaatacagctctcattgtgcctcgggatttttgcaagagcaaagcattgctggttatagctgtttgctcaggtctggaccactttgagcagcgaagtgctatccgccaaacatggggaaataccaaatcatttaactatggagaatttgtgagactacatgggcacctcgaagggaagtacctgagcgtaatgccaggtcgcctgaagctgtactcaatgtatctcagtggattggatgactctctgactgccaagatacgtatcgtattcatcttgggacgatccaagaatgattcgaagcgggaacttgataagctattcagggagtcgatccagcataacgacatcatccaggagaacttcgtagacagttaccacaacctgaccctgaagtcggtgatggccctgaagcacatcagccagagttgcgcagacagggccgccttcttcctcaagtgtgatgacgacacctttgtaaatgtgccaaatctactccattttctgctgggcggtacaataccgctgtacaaggatacggtgggctatcactcgcgcactacctacaaggtgaaatcgccatggaatcgcttaaacggcagcagaggtctgatgtacggtcacaagttttgcaacatgaagaccgtcgacgacgtgaagagcccttggtacatgccgtattatatgttcaagggcgccaagtacccgaaatacctatccggtaccggctatctgatgtccatcgatgtggttaagcggttgtacgcggaagccctaaccacatctctcgtccatctggaagatgtcttcgtcactggcatctgtgcgaagaaagctggaatccggcgacgtcatcaaccactttttaactatgttcacgggaagccactttgcatctttaagggaaccattacaatgcatcctgtacctttgcacagtatgctggacgcctgggctttcgtttccaactatagcattaaatgtctgccgccaaggaagcattttgtcaaaacagaattatcaaagaaatcacactgttaagattttcattacacagctttaatgctaaatcttaagaattttccctcgtcatgggataagcttagaactacacatttatattaattttaatcaatagcttaagtactatttcatattcaaacggtatatttccacacaattcggttttgctcattagaaatgaacattaaagaagtcggaaaatgtttttttaaatcttaaattgctttacaagtttcgtgggcgttatctttaggctttttaagcggttcggaaacataacaatatgcttagaatacaatttagaatacaaatagaaagtcaacaattgtcttttgtttactctgtgccgtatttttgtttttattttgtttgtacaaaagaattttacaatctgaaaaatattaacgaacttatacgagctacgtgcccgacttatattcacaggaatacgcgattcagttaatataatggtgttaatgtcgaaaaaacaattccttaagcattaaacaatattgtttaaactataaacagatcaaagtatttacataaaatgttgcgctatttttgttttttgtttggttttaaattctagtacaaatactaaatggcacgttttgagggccacagctaccaatcttcttcggcgggacctcaaatgatcaccataaactagccaacaatctcagccgtggcgaactcgtctggcgcagagtcactggcttcaagtgtggattccatttctgtgtcaccattttcggcggggctgggtgctcctacttgtgaaatccctgttgtcttttccaccttgcactcatcctccttcaagagaatctcaggtggctccgttgtttcgagtgggagatttccaataaaatcgtttgcatccaaatcagtctcattatcctttgtattttgggaaggcaggacgctggggctgcccaaggcttttatcagatcttctgtatcatcacttagttcgatgccctccatgggaattacttcgtctaaggcgcaatct

SEQ ID NO: 19190 - DNA, 3771 bp, DROSOPHILA
atggacagaaggtggaatccagaaaaaatcgaggagcagagctccctcttggcagcggaatattcctccagctcgggagcagctgcttccggatccgaggacgagacggtcaccactagtggagcgctacgcagcaaagcaaagctgaggaagcggcagctaagaaatcgcatgccgcttcccaggatgttaagacgccttggctgctacacgctgagcgccttcctaatctgtgggctgctcctcgtctacctgccgctcgtctacttggatgtacacaagcgtagtgctggtctgccggattggacgtcagagacctcccgcagcatagctgactacctggatatcgggctcagttctggcgtcattgttcccaaggacttttgccggaataagaccttcctggtaatcgccgtatgcaccggcgtggacaacttcattcagcgacataccatccgtgagacctggggcaataccaccgagttcaactacccagcgtttggaaagctccatggtcatctcaagggtcactacctgccgccactgccggatcgcttaaagatgtacggggattatttgagcggcgaggggcagtctctgactgcctcagtgcgcattgttttcattgtaggccgccagaaagatgaggccatgttgggcaatgagaccctgaatcgcattcacattgaatcggaaaagtacaacgacatcattcaggagaacttcgtggatagctacaacaacctgacgcttaagtctgtgatggctctaaagcacattagccgcagttgctttaataccgcggtctacttcctcaagtgcgacgacgataccttcgtaaatatacccaatttgctgaactttctgctcggaggaactataccgttgtacaatgataccctagattaccacgaccggtccacctatttagtcactgcaccgcaaacccgattgaaagccagcagcgatgtgttgtacggccatcagttttgcaacgtggtgccggttagcgaagtaagcagcaagtggtacatgccctcatacatgtataagccggagtcgtatccaaagtatctttccggagccggctatctcatgtccatcgatgtagtgcagcgcttgttcgaggcttcgcttaatacgacgctggtctatctggaggacgtgtacatcactgggttgtgtgcacaaaaagctaagatcaatcgacaccaccacccgctcttcagcttcgcccactcgaaacagatgtgcgctttcaagggcaccatcacacagcatcagttaaaagacgatagcatggtatccgcctggaactacgtgtccaactactccatcaaatgtccgcctcctgggcggtactttagccaggtgcgactgcgcaagcggcctatctacgagcttaagcggctctatcggatcgtggccagaatctggctatttatcagaaggtacaaggctattattatcctagcagtgttcttggcctacaggatatttaattttaagccagatccaagcaagcggaccgcatctttggcgggatggagtcgtgatgcgcccagaagtgtagccgattacttggatccaaccaaggacacggcgctcattgttccgcgacatttttgtcgtagcaaggcgttgctgacaatagcagtatgttcctatgtgcatcactttgaacggcgacgtgccatccggaagctttggggcaacttcacggacttcaactattctgtctttgtaaaactgcatggccatcttaaaggacgttaccaggacgtgctgcccgagcgtctgaaactgtatagcgagtatctgagtggtgagggggactccctaagggcctccatacggctcgtcttcattgtgggccgcagaaacttggcttccctgctggagaatgaggcggtggccatcgaggcgcagaagtataatgatgttatccaggagaacttcattgacacctacaacaacttgaccatcaaggctgtgatggcgctaaagcatatcacccagagttgtctaaacactacagcgttctacttcaagtgtgacgacgacaccttcgttaatgtgcctaacatactgcacttcctgctcggaggaacgattcctgtgaacgtggtaacggcaggcttccattacggcaacacatacgaggtcacttcgccgaggaaacgattgacggctcgcagggagatgatgtacggacgccagcactgcaatgtgccgccggccaccaataagttgaacaaatggtatatgccatcgtacatgtttcggggtggagtgtatcccaggtacctgtgcggatccggctacttgctgtccattgatgtggtcccacgtctgtacaaggcgtcgctgggcactagaattgtgcacttggaggacatgttcgtcaccggactgtgtgcagagaaggctggcattaagcgaacgaaccacccgctcttcaggtccagctatccctatgagggggatgaacagtgcgcccttaagggaagcttcactgttcaccgtgcaaaggataacgtgatgtgggaggcatggtaccgagtcaccaacttcagcagcaagtgccctccaccacaaaaagacttccacttgaggctgcccaagatgcaaagtccacgaccggtaccggatgtccacgaccgaaaagctgaattgagcggttgggaacgagagaagccgctgaaaatcggcgactatctggaccaagggaaaaatacagctctcattgtgcctcgggatttttgcaagagcaaagcattgctggttatagctgtttgctcaggtctggaccactttgagcagcgaagtgctatccgccaaacatggggaaataccaaatcatttaactatggagaatttgtgagactacatgggcacctcgaagggaagtacctgagcgtaatgccaggtcgcctgaagctgtactcaatgtatctcagtggattggatgactctctgactgccaagatacgtatcgtattcatcttgggacgatccaagaatgattcgaagcgggaacttgataagctattcagggagtcgatccagcataacgacatcatccaggagaacttcgtagacagttaccacaacctgaccctgaagtcggtgatggccctgaagcacatcagccagagttgcgcagacagggccgccttcttcctcaagtgtgatgacgacacctttgtaaatgtgccaaatctactccattttctgctgggcggtacaataccgctgtacaaggatacggtgggctatcactcgcgcactacctacaaggtgaaatcgccatggaatcgcttaaacggcagcagaggtctgatgtacggtcacaagttttgcaacatgaagaccgtcgacgacgtgaagagcccttggtacatgccgtattatatgttcaagggcgccaagtacccgaaatacctatccggtaccggctatctgatgtccatcgatgtggttaagcggttgtacgcggaagccctaaccacatctctcgtccatctggaagatgtcttcgtcactggcatctgtgcgaagaaagctggaatccggcgacgtcatcaaccactttttaactatgttcacgggaagccactttgcatctttaagggaaccattacaatgcatcctgtacctttgcacagtatgctggacgcctgggctttcgtttccaactatagcattaaatgtctgccgccaaggaagcattttgtcaaaacagaattatcaaagaaatcacactgttaa

SEQ ID NO: 19191 - protein, 1256 aa, DROSOPHILA
MDRRWNPEKIEEQSSLLAAEYSSSSGAAASGSEDETVTTSGALRSKAKLRKRQLRNRMPLPRMLRRLGCYTLSAFLICGLLLVYLPLVYLDVHKRSAGLPDWTSETSRSIADYLDIGLSSGVIVPKDFCRNKTFLVIAVCTGVDNFIQRHTIRETWGNTTEFNYPAFGKLHGHLKGHYLPPLPDRLKMYGDYLSGEGQSLTASVRIVFIVGRQKDEAMLGNETLNRIHIESEKYNDIIQENFVDSYNNLTLKSVMALKHISRSCFNTAVYFLKCDDDTFVNIPNLLNFLLGGTIPLYNDTLDYHDRSTYLVTAPQTRLKASSDVLYGHQFCNVVPVSEVSSKWYMPSYMYKPESYPKYLSGAGYLMSIDVVQRLFEASLNTTLVYLEDVYITGLCAQKAKINRHHHPLFSFAHSKQMCAFKGTITQHQLKDDSMVSAWNYVSNYSIKCPPPGRYFSQVRLRKRPIYELKRLYRIVARIWLFIRRYKAIIILAVFLAYRIFNFKPDPSKRTASLAGWSRDAPRSVADYLDPTKDTALIVPRHFCRSKALLTIAVCSYVHHFERRRAIRKLWGNFTDFNYSVFVKLHGHLKGRYQDVLPERLKLYSEYLSGEGDSLRASIRLVFIVGRRNLASLLENEAVAIEAQKYNDVIQENFIDTYNNLTIKAVMALKHITQSCLNTTAFYFKCDDDTFVNVPNILHFLLGGTIPVNVVTAGFHYGNTYEVTSPRKRLTARREMMYGRQHCNVPPATNKLNKWYMPSYMFRGGVYPRYLCGSGYLLSIDVVPRLYKASLGTRIVHLEDMFVTGLCAEKAGIKRTNHPLFRSSYPYEGDEQCALKGSFTVHRAKDNVMWEAWYRVTNFSSKCPPPQKDFHLRLPKMQSPRPVPDVHDRKAELSGWEREKPLKIGDYLDQGKNTALIVPRDFCKSKALLVIAVCSGLDHFEQRSAIRQTWGNTKSFNYGEFVRLHGHLEGKYLSVMPGRLKLYSMYLSGLDDSLTAKIRIVFILGRSKNDSKRELDKLFRESIQHNDIIQENFVDSYHNLTLKSVMALKHISQSCADRAAFFLKCDDDTFVNVPNLLHFLLGGTIPLYKDTVGYHSRTTYKVKSPWNRLNGSRGLMYGHKFCNMKTVDDVKSPWYMPYYMFKGAKYPKYLSGTGYLMSIDVVKRLYAEALTTSLVHLEDVFVTGICAKKAGIRRRHQPLFNYVHGKPLCIFKGTITMHPVPLHSMLDAWAFVSNYSIKCLPPRKHFVKTELSKKSHC

SEQ ID NO: 19192 - DNA, 2851 bp, DROSOPHILA
acaggtagctaaaagcaggtaaatgtcggccaaaaaccaaaagaacctgaccaaatgtataaactatgttaaagaggcgccacagtatcgcatattactgatcccatatttgtgaaagttgagctagacgaatctttatgacccacaggtcgagtttatgtctaaaatgtattttatatttatgtcctttcgtctgcatttatatgtataacattttatatgtataactacaaataccatataccccactctatatttcaaatacaattttatcacagctttggaaaatatcggaactcttatttcaaaagcttcttagagtccatgtccattataatatggtaaatactttatttgggttattatatcttttaaatgatatattacatattgcatagatacataatattttgcttgaagtaactgcggttaaaaagcatatgcaataatcgctgtttaagatatttgctggtgaatccaaaattatgccatgttcagttgctggcgcacactctctatttcatcaggactcatgacatccgagttgaagtctgctttgtgagtttgtatcaaatgcccagtcgcatcgttcacactatcctgaacactgtagtcgtatagggttctcaacatgccattcatcactttctgggatcttgattgtgaactagactgaacgcttataaagggggcagcatcgctaaattgccaaaggcaaatgcaggctaagtgatgaaaactaaattaggcaaactctaagaacctcgaagatccttacgaacttacagaaaatgcagatcaccgcgaagtagttcattgtggaaacgtattctctagactgtaaagaatccaaccagcacttggcctaagcgttatgaatcgcatttattacggctaacaagatcagaaaaataagtaagtgcgcaattagaaggtcttgcaatgactcaatactattgtttctgttcttaaatgatgggaaaccatatgattttaactattaaagtgttggtagattcccttgggaaggatttgtctccgtgggtacatcggtagcgactttcgcgatttcgttattgatcttctgactaagttctttcagaagtgttagatatttgttacggtaagtgttcctgacgttggcttcctgaaactgattggcggcaggtggggcgctatccttactagaacgtttcttacacggctttgtggactttcgagtgttttgcagttgcccattcaattccaaaagtctgcggttcacagtatttagctcgagctctaaatcgaggtttaactgtcgtactttgataatatccgtttttctggcctctatttctttcatcaagtatatggaatggttccggagaagtaaactattgttctgctccgttagtaacctctgttgcagggccttgagcgcactttgattggatccttgatttttttcttttgccgggaaatcatctagtcctttattgaaaggaatattattcaagtcaatggaagagctttttagtgatttggacctattgattggataatcatccagcggcaaatcagaaatatcgatatccattatataatcgccctttttcgcatctttcagagctacatcatctttggctattttggcctgtgtctcatcattcttgggagcaacatttttcagagatgcacttttcgtagaatcacttttcaggtgcatagctgaatcgagttgttgctcactatcgcagcttgccactgtaaaaagcagcactaaacgaaaagatactcgttcttaaatgtgctcaaaaatgcataagtcaacttacgtaaaattggagagcataataaaatctggttcatttcgaagaagtggcttcagctgaagtaaggtattattgcattccttatatatacgaatttcatgttacataagcgcttttgcaacggctcttgtttcgttctgcttgatatttataaatatgatcttgtagtattgcaattttcaaaaaaaaaaaaaacatcatcaaaatatataaatattcgttgaatatacattttagtcctgtagtattctagatattaagatatatacatttttctggcctccggacggatatcttcggttttttttataagattcttcttggcatcgggtgctttagtcgaggctaacaattttaagacttacgcagttcaaacaaatatacaaagaaaaatgccatagtcgagtatttattgaaataatatatgtaaatatcaaattcttagacaatcaatttaacatggttttcaacaatataaaagcgagaaaagtgttggtttctttgaattgctggtcgattaaggaaaataccgtgttaattatacaaaatatgtttttactataccttaaaatagttgctatgtagttatagatgctgtacataattaattacataaaatccggcaatgtatatctgagatcattgaagtcacgatatatgtgttaccgatgcaaacgcaattcccaagccaaattaaagaaaaataaaaaaaaagcagatcataaaaacgaaccattgtctttagctaaaagtgaaactgcaattgaaaaaactttcagcatccgcagagcggctagaatgagaaaaaattatactaaaatttcgcccacatgtccacatatgtaaattgaaaggttgcgcctgcgcacgcgtcaaattgaaagcgaaattgaacgtgggattcagaaaactgaggcatggccatctcgtgggcgatcggtcactctgtgaatcgttttggatcccccattttgggtaggtggccactgttaattgtttaaaacatagcgatttatgcgcaagttgctcgcattttg

SEQ ID NO: 19193 - DNA, 795 bp, DROSOPHILA
atgaaccagattttattatgctctccaattttactgctgctttttacagtggcaagctgcgatagtgagcaacaactcgattcagctatgcacctgaaaagtgattctacgaaaagtgcatctctgaaaaatgttgctcccaagaatgatgagacacaggccaaaatagccaaagatgatgtagctctgaaagatgcgaaaaagggcgattatataatggatatcgatatttctgatttgccgctggatgattatccaatcaataggtccaaatcactaaaaagctcttccattgacttgaataatattcctttcaataaaggactagatgatttcccggcaaaagaaaaaaatcaaggatccaatcaaagtgcgctcaaggccctgcaacagaggttactaacggagcagaacaatagtttacttctccggaaccattccatatacttgatgaaagaaatagaggccagaaaaacggatattatcaaagtacgacagttaaacctcgatttagagctcgagctaaatactgtgaaccgcagacttttggaattgaatgggcaactgcaaaacactcgaaagtccacaaagccgtgtaagaaacgttctagtaaggatagcgccccacctgccgccaatcagtttcaggaagccaacgtcaggaacacttaccgtaacaaatatctaacacttctgaaagaacttagtcagaagatcaataacgaaatcgcgaaagtcgctaccgatgtacccacggagacaaatccttcccaagggaatctaccaacactttaa

SEQ ID NO: 19194 - protein, 264 aa, DROSOPHILA
MNQILLCSPILLLLFTVASCDSEQQLDSAMHLKSDSTKSASLKNVAPKNDETQAKIAKDDVALKDAKKGDYIMDIDISDLPLDDYPINRSKSLKSSSIDLNNIPFNKGLDDFPAKEKNQGSNQSALKALQQRLLTEQNNSLLLRNHSIYLMKEIEARKTDIIKVRQLNLDLELELNTVNRRLLELNGQLQNTRKSTKPCKKRSSKDSAPPAANQFQEANVRNTYRNKYLTLLKELSQKINNEIAKVATDVPTETNPSQGNLPTL

SEQ ID NO: 19195 - DNA, 3474 bp, DROSOPHILA
actattttaaatatataaatatataaatagacatttatatataagaatttctttattacaaagtcaattgatagtcgctcatcgtttctatgttacaattactgtttacttttcttgacttcttcaaaatatttaaaatatgaacatatggatcacattagaaatttaataaatcttttatgtctggtatttacgatataagcaaatttataactagcccgaagcaaattctgaatcctttgaaataccttgacaattatgttgctagtattaagttaatgtttttattatttatttatatatttttattaatgtttgttctactctcacaaaattttgtatattaaaagatttaatatatgaaatctgtatcgataactatatcgataaatcacattgagatattagaaaattgaaaaaggcaataaattttttccagttttaataaatagtgatgggaaactatcgatagttgcgccattcgatattttcgatgtttggagagcaaattttcgatataactttaaaataataaaaatattagcaattttaaatgtttttctcaaataggtatagttaccttccaatattctagaggatctgtattttcctctgagtacttcggattaaaaagcattacaaaatttttcaatgtcctacgagatggaagcttatatcgcgtatcaaatgctttcagtatatcgcgaaatccattgtcctccactactgaaaatgtgcgcatatcagtggctatgtacatacttcatgataactcgccgagttctgctatccgacgagaactcgagtcgtagcttggagtcacacattaaaacttttccacattgtgaatatttcgcggtcttaccatcagttgatttaacaaaaatgaacagcactatcgatagcgacaaaaaaccatcgatagtggctcagaaaagtaaatatccgatacctcgataatatcgattatcccagcactagttctattttcacaaagatgcagcaatattaacaaagtcatttataatttattattatttaaacaatatagatccttttaaaaaacattgagctaaggtacgtccaaaagatttaaaataaaaattgagaatgtggtggtaacttgctaaaaacaacttctcgctctttcctcattattttgtttacaaaacttttaaagcaaaggttgtcttggaaatttattcagtatttatactttctgtagtgggcttcagatattgaaactgacgtcgctccaagcaaacgaaatgtaaacatatttatatatactaagcataaattagaacgttccattcgttctgtttactcccacccagattttgtaaaggattatcggtggccgcaatggaaagtgggtcgactgccaagacgggcgatttcttttacggttgggatctgctgtacaagaccgttaaggctgatgtctccaagaagtcagaccttttgattgccctcgtccattttcttttgaccaagcattacaacttccgatgcgttggcgttggcgatgatgtgagtatgattatggccacgcatattagtgaaatcatctggaattccatagaaaaccttgccggaggaggagggcagtgagctgctgccggacagctggaatgatgacgataccaagtactcgctgcgctacgtgcacgataagatgctgtatttgctgctgggccacatcaccgagggctccctgctgatcaacctgttggacatcaacactaagaaggtatccaacatctgcgtagaaccagagaccctggtacctgaggtcaagggaggcatcaccaccataatgccgagtgcctcagagattgttgaacgctaccgtagggagcttctagaccctgtattcacgggaaactcgcgcgaagttaccacgcagacgaccaactcaccacgccccattggatcggatccagatcccttgcgcatcggcgagccaaggcgtggcgggtaagaacacttgtggatagttttttatacactcgttaatcgtttcccctcgtttagatccttcattccaagtgcattcgagcctcgcccttttggatttccggacgttggacgcggggatctcgatccactgggtcgcggtggtcatggtaacctgttcagctttccatcacgcccaaatatgggcccgggacccgtgccccgcttcgacccgttcaatcccctgaacccgaataggccgggacagggtggaatcaatccagatcatatgcgcccaccagattggaatcccgattactacatgtaattaccaggaatgccatgtatagtgagcaattcaaatctttagtttaaagcaatgaaaaaagttttcattttagaagaccaaaattaaacggattgttttaaaagattatttttattacgttgcatacacaatacagaatattacagaattttacagatataaaataaaaaacagcagcctgttagacaacgcttgtttgagtttttactagaaaaattcgtagttaagaacatttatcaagtaaatacgcaaacaggccagttgagttgacggctgctcaagagaaatttacaatatacttaaaagcttaactgaactcgtgatgtaatggctattcattcatttcgtacaacagggtaaacaaaattggctcaagtgcgtaatctcaaaattgctaggggaaaagcgcgaaaaatcacggcactaaatgttacaatggtttgcgattactcttgttttttttgttgctgcttatgcctagcctaatattattttaccataatattttgctaaattaatataatgtaaataatatttcaagctgtgtgcagccggttgacttaaattagctctgcacggtaggcgtcgttccctctcacgccgggatgtgcaagtgttgtggtgtgttttgtgccttggccgctcaaaatccggctaaaatcccgcccaggtgcggtgtgaactacgctcagtcccattccccgatgaacatgcgtggcgtgggcacgtagccgcgcgttggcagcggtaaatggcgtccgtagatgtgattgtagggtgattcaacaagctccgaatctacaagaagcacagaaatccgtggttaaaaatcgggtgcgtgtacaattgtcgggataattatgtgtgctggggtgggtggattctattggtagacccaagcgggtacttggttgtaatctggtgaaggtattatctgtttaattgcattatctcttttttgggatataatgtaatgtaagtgtattattccacagattacaacccactcgtttgaactttggactacctctaaaatcagtaacccactcccacttggtgtatgtacatttgcgtttcgtgactgtccaggctagaggagtccaaggtgctatgttagtaaaagtatcgtacagtttagtggttctgttcaccgggcaaggaggtaaccgagatgcgtttgtgggtat

SEQ ID NO: 19196 - DNA, 1105 bp, DROSOPHILA
cagcaatattaacaaagtcatttataatttattattatttaaacaatatagatccttttaaaaaacattgagctaagattttgtaaaggattatcggtggccgcaatggaaagtgggtcgactgccaagacgggcgatttcttttacggttgggatctgctgtacaagaccgttaaggctgatgtctccaagaagtcagaccttttgattgccctcgtccattttcttttgaccaagcattacaacttccgatgcgttggcgttggcgatgataaaaccttgccggaggaggagggcagtgagctgctgccggacagctggaatgatgacgataccaagtactcgctgcgctacgtgcacgataagatgctgtatttgctgctgggccacatcaccgagggctccctgctgatcaacctgttggacatcaacactaagaaggtatccaacatctgcgtagaaccagagaccctggtacctgaggtcaagggaggcatcaccaccataatgccgagtgcctcagagattgttgaacgctaccgtagggagcttctagaccctgtattcacgggaaactcgcgcgaagttaccacgcagacgaccaactcaccacgccccattggatcggatccagatcccttgcgcatcggcgagccaaggcgtggcggatccttcattccaagtgcattcgagcctcgcccttttggatttccggacgttggacgcggggatctcgatccactgggtcgcggtggtcatggtaacctgttcagctttccatcacgcccaaatatgggcccgggacccgtgccccgcttcgacccgttcaatcccctgaacccgaataggccgggacagggtggaatcaatccagatcatatgcgcccaccagattggaatcccgattactacatgtaattaccaggaatgccatgtatagtgagcaattcaaatctttagtttaaagcaatgaaaaaagttttcattttagaagaccaaaattaaacggattgttttaaaagattatttttattacgttgcatacacaatacagaatattacagaattttacagatataaaataaaaaacagcagcctgttagac

SEQ ID NO: 19197 - protein, 270 aa, DROSOPHILA
MESGSTAKTGDFFYGWDLLYKTVKADVSKKSDLLIALVHFLLTKHYNFRCVGVGDDKTLPEEEGSELLPDSWNDDDTKYSLRYVHDKMLYLLLGHITEGSLLINLLDINTKKVSNICVEPETLVPEVKGGITTIMPSASEIVERYRRELLDPVFTGNSREVTTQTTNSPRPIGSDPDPLRIGEPRRGGSFIPSAFEPRPFGFPDVGRGDLDPLGRGGHGNLFSFPSRPNMGPGPVPRFDPFNPLNPNRPGQGGINPDHMRPPDWNPDYYM

SEQ ID NO: 19198 - DNA, 5003 bp, DROSOPHILA
aatgacgcagtagtgaactctggcaattacgcaaaaagccgttccatccgtgccgtggagtactcactgtattcaccaggtgggtctgcaccgccctgcagctaaccgaattcaagatctcgacgaagctcaacatctgaccactgcgggccgctaggtgaaggttgtttagctgggagaaacgtagacgcggctcgtggggaaacttggcccggatctcctcggagatctccaccagcattccgtgggccatgttgaagtagccgaaatcgggcggatagccgtcgtatatggacgtatgtgcctcgtctagaggcgcctcttctgcgggatcgacgtccattctggccgggaaatggacgatgctgcactgatcggtgatcactgatcaccaggtatgggtatggaagcaatccacacaggcccactctttccaggccaggcggcaatacggtcacacctagcggtgcacctgcgagagtgaaaacagtgactcggcgcgataggctgaccgttagtttatcgttcgtttattcgcgccctttgcagatattacatatgtttgttgattcgttagtttatcgttcgtttattcgcgccctttgcagatattacatatgtttgttgattgtaaatatgaaacatatatgaaatacagcttgaaatactggatatgttcacaagtgttgggttagattaagtgtgcgaattgaatatgctttctgtgtgcgtgcgtgtgcgtgcgtaaggttaactgtattagattggtgtatttttatatcgtgctttctttagcttcaatgtgaaagttttctacattggaccaggcctggatcttgggttttattcatagagttttgatagtgtgcgtcgacaggcccgtccaatggaaaattttcatcgaggcgtttcgttttggatcatattttcccaatctcccatttgagtgcggcgatgtgcatcggttcgccgggaaaactatgcctaaacgcagcgagttcttaattgtacatcatatttgttgttccttcttctccatcattatttctagcatacgctgctttaaagtgtggatatatagtctcttgagtttacagtgggctcagcatcctccctatgctggacaatatagttttcaaacgtctcgattaacaattcactcgtttcaaaaatgtcgcttgaagcttgtgtcatcactattcaacagtcactgtttacgtcacagtcacggtttactcacactatcgatacaccaacgtgctcgtgagttgtgcgcggatgtgtttgttgtgttcacgggaaatttgcttccactggaatttaaagcttgtctgcactagatcttctaaaaggaagaaagttcgtatgtggtttaaatctccattctctgcccttgtcttcttgtgttttgatcatccattttttgatatactgaaatggcaaaatgtcggttaggaaactcaatcccgaaaatcccaaagtgatttgaatgattagcttaagcgttgtgagtttatattgaaaatatgtaataaaaccttttacatttagctaaaaaaggctacatttttatcaatatatttgatgcataaaattcattaaaaatacaagcaagtgtacgcaattcataaaattaatcaacaatctacatgaaggcttacccctcgttaactacgttatctacaaagcaaatggcagaagtatctcaatataagatatttactttacggatccaccagaactggattttagttggaggccgtgatggccaccggtgtcggtgagggttgtgccacgactgggcttatggttacggcaggtggagcgctattgttgagctcagacacgcctgaggaggatatttcagcagcaaccttgagtccattgggggttgcacccaagctttgacgcgagttgcgcttacggtgcatacgcggcttgtttggcgagggagtcttggtagtagagtcgggcaacgaggaaacgctgcgcgacttgtcacctcctgctccaaactcggtgctagccgatggggagctggatggcctagcgtccttcaccgattggcggccgccgcgtcgattgcgacgacgataattgttattattgttgctgttacccttgacaaccggcttcaccgtggtcttcttgggatcgaaatagctgtccagaagctcgagcagctccgccttgtccttgctctttagccggccaattgactgcagggctatgtccaggccctcgatgtttttctctgcccagatggcacttagcgtgttcaaatcgaacccattctcggccagcacaatgcggaactttacggcacgcacacgatggtacagagtggtcttgaagtagttcaggaacaccggacggaaggagttttgacgctccaaattttcgatctggatatccagctccaggacatcggacaccaccaacttggcaaacggacgtatggcattaaacatattctccaatgcctccgagctttttggttccggcttgccgtcggagttgctcagctgaagggccacatcaaaggccaatttggcacgaacactggcattgccatcaaacagttcccgcttaccctgaacggcgttcttgctagattgcttatcgtcaccattggtcacggtactgtccctgggggatatcgataccgaatcggacaccatactagatccagatcccaagccagatccagatccagatgtggacgcagagcaagccgcgtcttcctccttggtcgtggacaagatcttggaaagctttcgcagactgtagttctttatgttggcatcgccaatggaagccttggccagattgatgctgtttgcaaacgacttcaccgacgcggtgaagcgctccaacaggccgtacttcttcaacgactccaggatcatgtagggaatgaacttgcgctcttcatgatagataagcacaatcccgtccgagctgggacccgccttggtcttcagttgctcaagccagttgaggaagtccttgagggcagcgatctcagacttggatttaatgatctgagaggatattgtatgttgaattgtggatgcttcaatacttgactgccactattaaatggactggactgcactggactcaccttataagtctgcatcgacttcagcatacgataaaagccaatcgaaataacacgaacttgatgacgctggcgagcagctggattcagattcatatatggcatgatgtactgctcgaagtggtcggtgggtgtataagcggccagctggacaatctgtgggtttatcgcaagtggggttaggaccgaacgacgaacgatctaacggcagtcagggggtattacctcatccattagacgacgtccagtggtgtcgatatccacgcccaccaggatataattaccggccggcagctcaactttatcgcccacgggcgacgaggattgatcggcgacggcaatggccactccggcatcgatgttatcggcaaccattttcttatatgatctgcgaaaagcaatctagaaaattcggataacgaaattagctgagtcactagaattttttttttttaaggaaccgatttcctttgcaaaacgcgaaccgctttcactagattttcgatatgaagtgacgggctacgaattttcaagagtctattaaacccaaagctacaactaacggttttcttccagtggcgccatcttttacacagatgtttttatgtgtatgtatgtatgttcactttcaccacactttagcacttttcttttgggctcacctttattgaactcctttttcgtgttggtttcgatgggctctttcgctttttacgaactttttcctttatttttcaaaaggttaaagcgaaatttgcttctgttcgacgagctttcacaaataagaaacaattcgtacgactaactaaaacgtaatgaataatttcctgatgcacccgacggcctaggaaaagtgcgcgaatttgacatatgcaaagcctgctaatcgaggtttttgacttaagtacgatgggttagacagctgcaactcgtccacatcttgccacaacgcccactgtgcaggtgaaaactttttgcagaatatttttaccgctgctataataaaatatagtctttcagcttgtaaataaatttttttccaattattagccggcaaaattggtgggtaaacaacaaatatttggacaaaagcgcagacaagaactgataagaggatcagggatgacgaatttcaaatggttgcgccagagatgacagggtatcgatatcactatcgatagacttatcgaagacggcttagcacttatacctactctgcagccctggtcggcagaaaaacaataatcagctgatgccatcgcttatttccaacaatttgcaccgcaaaagtgaagaattaccaagcaaatagatcgcctgccgaccgaattatgctgctgtaatcacccaagcacacaacggtaaagataaaaccaggcgagataacaccacgcacaggtgccacaacatgctgtcctacataaagcgcaagctctccgaatccgacagcggcgtcagttcggtcgcaactgtgacgtcgtcgtgcggcggcgatagtgggagagcgggcggaacgggcagcagtgaaagcggtacgggcagcagcagcgccagtatcagcggacgcagccagaacgccgacgagttagtgcgcaaaacgagccagatgtcgatggatgatgaggccattgccttcggggaggacgcactgctccatgaactgggctacaagaatcagacggaactgcaggaaaccatctacggttcgatatttaatggcattctttttcactttggcctagttatgtaatttctcttgtcgttacacagatctgttgcgcggcattcgcgatcccgagaagccgtgcactttggaggacctcaacgttgtctacgaggatggaatctttgtgatgccgcccacgcgctccaatgtctc

SEQ ID NO: 19199 - DNA, 2484 bp, DROSOPHILA
gctttgcatatgtcaaattcgcgcacttttcctaggccgtcgggtgcatcaggaaattattcattacgttttagttagtcgtacgaattgtttcttatttgtgaaagctcgtcgaacagaagcaaatttcgctttaaccttttgaaaaataaaggaaaaagttcgtaaaaagcgaaagagcccatcgaaaccaacacgaaaaaggagttcaataaagattgcttttcgcagatcatataagaaaatggttgccgataacatcgatgccggagtggccattgccgtcgccgatcaatcctcgtcgcccgtgggcgataaagttgagctgccggccggtaattatatcctggtgggcgtggatatcgacaccactggacgtcgtctaatggatgagattgtccagctggccgcttatacacccaccgaccacttcgagcagtacatcatgccatatatgaatctgaatccagctgctcgccagcgtcatcaagttcgtgttatttcgattggcttttatcgtatgctgaagtcgatgcagacttataagatcattaaatccaagtctgagatcgctgccctcaaggacttcctcaactggcttgagcaactgaagaccaaggcgggtcccagctcggacgggattgtgcttatctatcatgaagagcgcaagttcattccctacatgatcctggagtcgttgaagaagtacggcctgttggagcgcttcaccgcgtcggtgaagtcgtttgcaaacagcatcaatctggccaaggcttccattggcgatgccaacataaagaactacagtctgcgaaagctttccaagatcttgtccacgaccaaggaggaagacgcggcttgctctgcgtccacatctggatctggatctggcttgggatctggatctagtatggtgtccgattcggtatcgatatcccccagggacagtaccgtgaccaatggtgacgataagcaatctagcaagaacgccgttcagggtaagcgggaactgtttgatggcaatgccagtgttcgtgccaaattggcctttgatgtggcccttcagctgagcaactccgacggcaagccggaaccaaaaagctcggaggcattggagaatatgtttaatgccatacgtccgtttgccaagttggtggtgtccgatgtcctggagctggatatccagatcgaaaatttggagcgtcaaaactccttccgtccggtgttcctgaactacttcaagaccactctgtaccatcgtgtgcgtgccgtaaagttccgcattgtgctggccgagaatgggttcgatttgaacacgctaagtgccatctgggcagagaaaaacatcgagggcctggacatagccctgcagtcaattggccggctaaagagcaaggacaaggcggagctgctcgagcttctggacagctatttcgatcccaagaagaccacggtgaagccggttgtcaagggtaacagcaacaataataacaattatcgtcgtcgcaatcgacgcggcggccgccaatcggtgaaggacgctaggccatccagctccccatcggctagcaccgagtttggagcaggaggtgacaagtcgcgcagcgtttcctcgttgcccgactctactaccaagactccctcgccaaacaagccgcgtatgcaccgtaagcgcaactcgcgtcaaagcttgggtgcaacccccaatggactcaaggttgctgctgaaatatcctcctcaggcgtgtctgagctcaacaatagcgctccacctgccgtaaccataagcccagtcgtggcacaaccctcaccgacaccggtggccatcacggcctccaactaaaatccagttctggtggatccgtaaagtaaatatcttatattgagatacttctgccatttgctttgtagataacgtagttaacgaggggtaagccttcatgtagattgttgattaattttatgaattgcgtacacttgcttgtatttttaatgaattttatgcatcaaatatattgataaaaatgtagccttttttagctaaatgtaaaagtatatcaaaaaatggatgatcaaaacacaagaagacaagggcagagaatggagatttaaaccacatacgaactttcttccttttagaagatctagtgcagacaagctttaaattccagtggaagcaaatttcccgtgaacacaacaaacacatccgcgcacaactcacgagcacgttggtgtatcgatagtgtgagtaaaccgtgactgtgacgtaaacagtgactgttgaatagtgatgacacaagcttcaagcgacatttttgaaacgagtgaattgttaatcgagacgtttgaaaactatattgtccagcatagggaggatgctgagcccactgtaaactcaagagactatatatccacactttaaagcagcgtatgctagaaataatgatggagaagaaggaacaacaaatatgatgtacaattaag

SEQ ID NO: 19200 - protein, 532 aa, DROSOPHILA
MVADNIDAGVAIAVADQSSSPVGDKVELPAGNYILVGVDIDTTGRRLMDEIVQLAAYTPTDHFEQYIMPYMNLNPAARQRHQVRVISIGFYRMLKSMQTYKIIKSKSEIAALKDFLNWLEQLKTKAGPSSDGIVLIYHEERKFIPYMILESLKKYGLLERFTASVKSFANSINLAKASIGDANIKNYSLRKLSKILSTTKEEDAACSASTSGSGSGLGSGSSMVSDSVSISPRDSTVTNGDDKQSSKNAVQGKRELFDGNASVRAKLAFDVALQLSNSDGKPEPKSSEALENMFNAIRPFAKLVVSDVLELDIQIENLERQNSFRPVFLNYFKTTLYHRVRAVKFRIVLAENGFDLNTLSAIWAEKNIEGLDIALQSIGRLKSKDKAELLELLDSYFDPKKTTVKPVVKGNSNNNNNYRRRNRRGGRQSVKDARPSSSPSASTEFGAGGDKSRSVSSLPDSTTKTPSPNKPRMHRKRNSRQSLGATPNGLKVAAEISSSGVSELNNSAPPAVTISPVVAQPSPTPVAITASN

SEQ ID NO: 19201 - DNA, 3540 bp, DROSOPHILA
agtgtatctcagttaatcagaacatttcgccatttcagaatgatcactttggctggccctaatttattcatcgtctagcgttaattctaaaattatttagtcaaagcctacgattaagtttggtcagtgaaggatcatcgattcactggatcactgtggagtgcatttcgctcagttttgtgataaatgcagcgaaatgcagccatttagcgtacgtcacttaatacgcactaactctaattaaccgcagttaactttaagtcaagcagagagatttaatgattatgcaatttgtaatgagtaattaaaattttgccatagtttcttaaatcgtttaagactgagagaatgtcctagagcccacgataagcgcacggagagtttggctgagattcaggatgggggcagataatgtcatatgcaaattaattgctactttaggcaagttcaatttattattttcttattatttttctgtacatacacttcatatgtaaataagatcaaattaaaaacatgtaatcgatattagtacgcattaaaaaagagttatgaaagtcaatataagtgttttactttaaacgggttacaatctacgctgctgaaactgaataataaaggtattttgtataattgtgtgtagtttgattttcatttacgagaacatttaaacatatctatatctatatatattttccgacatttttgcatttactaattgtgtttaaatatcggaacttaaaatttattaaactgctttgcctctttctaagataaacattggtggtgaaaagtaaacctgcgctatcacaagattttttgtctcctaaattaaatacataataaaatgccgccaaattcgtcatcgaactaaaatcttaatgtactaaacggagaccatataaaaacaatcgattttcggtgagaacgataaccgattgccagtgagtgatcttgtagcattgaggttacccggtcacactatcacattgtgttgcactttttgtgaggtttggattagaaaattattggcgcctcttttgcagagttttgcgaccgacttcattgcaataaggagcgccagagtgcggagaacatagcccgtgaccatggacaagtttctgttgcgcaatcccacgtggaagacgaagacgtacggatcggtcgtggccagttccgccgcagctgccaagaaaacagcggcgtcatcgacccgccgaccgttgcacgattcaaatctgggcgacttcaggtccaaagcagcggcaccgtctcccaaatctctatcccaggccccggcaggttggctgtgcatgcctattttacattttgaacacccaacccagtagttttagttccggatacgtagctcacccaaaattcgtagtattcaaaaaaaaaaaaaaaaaacagattaccatgtcgacaaacgaaccgagcattactaacaagttgcgttccctcctgctagatgaccaggcggccagggatcggctgatgctcaagccggcattagccgtctccaaagcgatcagccagcaccgctccgagttccaccaggacgagaacgaggcgggagcagaaggatctgcagcaaaaccagatccacccatcggagcagccacgccaaccaggcaggaaggacactgggcccgactgcagcaagatctcaacagccccaacgctgcactccgattacgcgccattcgtgcattaaagtaaggacaaaaattggttattgcaattgttatttatacaacctaaaggtcaactagtgaaaacagctcagattcttgactaatccatccttttatagccattttatcgctaattttgtaaagttagattctttagatgcaatccctaataattccatatccatcaataactattatattaacaagccaggtttttttgccaaaaccaagtattgattattattattattaattattgttttgcaatgcaatctaatctgatttgagaagaaactgatcataataaaaaaaatgcattcgcttttacattgtatacatttttagaagccccaccaagtcggcatacaataccttcgatgtgcctttagccgaacaaagcatcatcacgatggaagaacgcaatccccaggagccgccctccctccccgagttgctcaaggacatagtcgtatatgtggaggtgcgaactggaaacgacaatcgctctgagggcgtaaaatcaattattgccaagatgggagcccaggtcaaagatcgcctaacgcggtaagctaagggattacaattgattgactaaaatatattcaattaaacatttttcgtttggcttgtagaaccaccacacacgttgtcttcaaggatggcctgctctccacctataaaaaggccaccgagtggaatataccagtcgtttccattctgtggattgaagcttgcaaggtgcagctgaaaatatgcgatcccaagcaatttccaatcagcaatatacgcatgtacgagtatcccgagctctttggcaaaatgccggtaagttattactaattgtggcttctgttgcatcatcgatcttatttatatattcaaatggggataaatggggcttaagaagataacttttaattgtcaccattcggctttataatttagcttgccttctcataatactaagctcactgcaaaatacccaataacacattgcaaaaataggcttgtatgtacgtagatattaaaagttgacttatcaaggtcttcatacaacttttaatattcttatcatatcattatttgttaggcctaacaacttcccaaaagctttatcagatctaagacgacaatgtactttcgagttcatcaactctgcattacattttggttggaaatggcagctttaacttacacttcgattacaaaagaaataggtctttaattagtctaatcgttgacactatcaatttatggcattgcggacacagaagcattaactccacttgagatatgcccccaactaataggccattcataccgagtttatggttttatggcgcacataaagaactatatggaaattgtacaacagatagccggcaagaggtcttatcgaccacttttcctgatgaccacgatcacagtgggtggactgtggcccaaagcacttgtgcgagtacaaacatacatatctgaaatgattagttaatccagaaaatggcgaacagaaacgcaggaccgcgggccgtctgaaactgcacgtatctcaaacacggaatacgcgcaatattgggaactcttcgtgtcggacagattcttatcacttatcactggctgacagcgagtcaaccagctgttgttgttgttggcactccgggttatctaagtgaatttacttgcccttatcagctatcgtacggccaaagaaacggtcaggaagttgtccggacggagacagctacatttgtgagggaaaaaagcgagtgggtgcaactgagagatgttcatttgaattcgtttagtttattacttagacattagacggttaaaaaagaca

SEQ ID NO: 19202 - DNA, 979 bp, DROSOPHILA
tttttgtgaggtttggattagaaaattattggcgcctcttttgcagagttttgcgaccgacttcattgcaataaggagcgccagagtgcggagaacatagcccgtgaccatggacaagtttctgttgcgcaatcccacgtggaagacgaagacgtacggatcggtcgtggccagttccgccgcagctgccaagaaaacagcggcgtcatcgacccgccgaccgttgcacgattcaaatctgggcgacttcaggtccaaagcagcggcaccgtctcccaaatctctatcccaggccccggcagatgaccaggcggccagggatcggctgatgctcaagccggcattagccgtctccaaagcgatcagccagcaccgctccgagttccaccaggacgagaacgaggcgggagcagaaggatctgcagcaaaaccagatccacccatcggagcagccacgccaaccaggcaggaaggacactgggcccgactgcagcaagatctcaacagccccaacgctgcactccgattacgcgccattcgtgcattaaaaagccccaccaagtcggcatacaataccttcgatgtgcctttagccgaacaaagcatcatcacgatggaagaacgcaatccccaggagccgccctccctccccgagttgctcaaggacatagtcgtatatgtggaggtgcgaactggaaacgacaatcgctctgagggcgtaaaatcaattattgccaagatgggagcccaggtcaaagatcgcctaacgcgaaccaccacacacgttgtcttcaaggatggcctgctctccacctataaaaaggccaccgagtggaatataccagtcgtttccattctgtggattgaagcttgcaaggtgcagctgaaaatatgcgatcccaagcaatttccaatcagcaatatacgcatgtacgagtatcccgagctctttggcaaaatgccggtaagttattactaa

SEQ ID NO: 19203 - protein, 289 aa, DROSOPHILA
MDKFLLRNPTWKTKTYGSVVASSAAAAKKTAASSTRRPLHDSNLGDFRSKAAAPSPKSLSQAPADDQAARDRLMLKPALAVSKAISQHRSEFHQDENEAGAEGSAAKPDPPIGAATPTRQEGHWARLQQDLNSPNAALRLRAIRALKSPTKSAYNTFDVPLAEQSIITMEERNPQEPPSLPELLKDIVVYVEVRTGNDNRSEGVKSIIAKMGAQVKDRLTRTTTHVVFKDGLLSTYKKATEWNIPVVSILWIEACKVQLKICDPKQFPISNIRMYEYPELFGKMPVSYY

SEQ ID NO: 19204 - DNA, 4839 bp, DROSOPHILA
tttgcatgtgtttcaaactacatataaatattgggaaatattcaatgctctgctcggcgcttttgcttttattttgtattgttatgtgatttctgtcttggttatttttattcgatgctcttccaaatctatagatgtgtaagttaatctgattgctgaatcatctttatatctttttttcatctcccgaagaagaatcatcttctatcgtccgcctaaacgtataaaatgcatgtaaatctaaaatcttatttaatcaactaactctgtcacgcccatcccttcgttatgtgtatatatatatatataacttctatatatatatatatataatgctctgattatgatttgcagtaacgaaaagtgaccagaagaaagagtattaatatctagttctttttccttccgcataggtttatatttatatttatatatatatatatatttatatatatatgtatttatgtatatatatgcatatacgtaagtgtaaagttaagtgtactcgattcggtcttcggtgttatatatggatattatcttcataaaagccgcgtgccgtcagtggcatcgccagacggccatgccctcgccgcccatccagagatccgggaatcaccgccaggcggtccgcaaccgtctgtccgccttgccacgtccagccgacgttagattggccccgatctccaggctccgcacatcccggcagccagatggtgaacctctcctcgatcgaagcgataaaggcgaggcaggcgccttaaagatcacggattacctggaaaccgaagcccgccagctggacagttgttggagtggttggtggcggatgttgcaggcggacaggcgacaacggccgcccggtggtattccctccttccaaaacgaagaggtggacccggatttggagaagaaggagcacggcgcaacgtacacggtgacaccgacgacgcacaggcgagaaaaaaaacttaaaaactaattgataatagtaataataagagttataaaataatttttaagcattacagtaatgttgtgtgttgttttgtgtgtggtgtttttcttatcgacaacgtcatgctgacgattcgattgaacaacaaaaggatgataaatgtatacatgtaaatatgaatgatagattggatcaatgtgtcgctggtatagctccttggcgtgcacctctcctacaacggtacgtgaatggtctactgttcgggaatggacgacagtgatcgaatctggcgttcctgctgatccaccttaagcacgctcgccacggatgcggcgcgccaactggatgtccttaggcatgattgtcacgcgcttggcgtggatagcgcacaagttggtgtcctcgaagagacccaccaggtacgcctcagatgcttcctgtaagtcaagagaaattcatatgagttggataaccaagttccttttagatattagtagcccccccttcataatcccatgaatcctgtcatttttagttaagttaagccactctgattctttggagcataattctcacctgcaaggcaccgatggcagccgactggaaacgcagatcggtcttgaaatcctgagcgatttcacgaaccagacgctggaagggcagcttgcggatgagcaactcggtcgacttctggtaacgacggatctcacgaagagccacagttccgggacgataacgatggggcttcttcactccgccggtggatggcgccgatttacgggcagccttggtggctagctgcttacgaggagcctttcctccggtcgacttacgggcagtctgcttagtacgagccatgttttcttagcttttttttttaaactgcaattaagagaatgggaaatgcaaatgttagattttgcgcgttccagattgacacagattaaataaacacttctacaatcattgtttggttggtacccaaaataaacacgctgatcctcgccagatgagaaagacaactcgatgaactgggcacaaactctaaactattcgtccagcacaggcgcagtgcacgatgcaattggccaggatacgattgtgctgtgtcgtggactcttgacggatatacacggatggatatcgctgggagccaaagtttggaccgatgcacagcgccgaagcgctggcggccaactgacgaggaactttggttcgtggtcataacgataacgagggttgaaggtgaaatttttttgaggcagctgcctgcttttccttcttgccccccatttcaaatattttcccatcttctgggaacgaggcactcgagaaacttccacttcagtggcaaaggaataaatcgtgcctcggcagcaaaacactcagaaaaataatagtgtgatccatatttatattggtgtgcaaatgaagcttagctaagatgattctaaagttttcacattacttataattaaaaaaacttaagaaacatttctgataattcataaaggtggtccataaaaaaaccctaatttatccgttctaaatagcaataggaataccatctaattctcaattggtggtatagatatattacatctgcttttctcgctgtgtagttgttccacgatggaggaccacttgaaaatctcatttcttttcttcgcgggcaaacatcgtgagtcgccgttttttgtgttccccttctttttatgtacagcctcttgagtttttttcgcgctttatgcggaatcaatcacgctgaagtaatgagttgtagttttcaatttataattacttgtgcaggcaagaggaaaatatcaaataaaaggaagccaaagaaaacgaaaaaaattcttcgactggtagcgccaaaagagtaaacataaacaaaaggaaggaaaatcaagcggtaaaaacttggcgcgcattgaaaggcggcaagtcgaagggagatgcctataggggcacgttcgcgttagaaagagaagaaaggtgtgccagcagttaattgcgtcgtttctccgctaaacagcatgtgtgtgcgtgtagatgtgacagctgcacatcctcacaaaagagaatgccaaaggaaaaagaaaataaaaagcaattatgcaataacatacgggaaaagctggcggtgggaaagagagatggcacacactgcgcatgacaagcgcagccatgcacatttgcatttgttaaccaatgtgcgtgtttagtatacacacacatcaacgcgcgtgccacttaagaaataaataaataacttttatatgtttatgccaaccagcataaatacgattactcatactttttggcgccagttttcgcacattggcaaatcgtttttatttatttttttaattttctttttgccaatttcatcaacgactgcaacttttttatttcttgctattctcctgcttggcggccattttggaaaaaaaaaaaaagcagcgcacctcaccattacaactaaaacaacaatgcaaccaacagtcgtgcgaatacgagacctctcacatcttcgtgtatttgtgtatgtatccaccagcgagaatgcgcctgtgtgtgtgcggtgaaaaatagggctccgctggacggccggcggagccccaaaaacggcaaaacataaactcaggcgattcacaacgaaaaaaaaatttggaaaacagtgcacacacgcacatattcagcggccacaagcacgtgcgttttaagaaccacacttagtattataagtatttagcaataaaaaaaaactcaccgttaaacacggaataaagttattcttcacaatttgtcactttcaacacgagacgaacaaattcggacgagagaaattttcacaatgatttcgtttcgttgagatctagagatggtagcctagtaggcgaaggcctacttcgattgtattcgattacactcgattgtctgacaagaccatgcccgccaaatagtttggttctgttctttgctaattacatttttataactttttaaaatttttttaactccaacctaagattaaaaatgaatatgttttaatgggttggactctgctaattttaatgaaatataagcttcattaagcaaaaaaaaagccaagttcttttatggattgtgggtttctctctgcagagaactttattttagtgcattgtgtgttacatttgagttgaacgaacgtgcatactactgcgacttcttgtcctccttggcggccctgcccacgggctcatccttgaagtgaaggaacacgaatgagaagacaaacacgccgatcatcattgagaaggcgctggtgtagtaggggaatgcgctcgggataaagcgctcgtactgtgtgtgctccagcggacgcaccgacacctgggtggtgctgtacagatgcgtgtagcccacgcgattgtagtccaccttgaactgataaacgccgtagacgtcgggtatcttgaatttggcctggtaggcgcccgtgttcgtttgcttcagataggtgcggacgaagggatcgatgcgcacgaactccagttgaatgtcgctggccttaaaggcgcgccactcgccctgcaccagctcctcgatgccgatggtgtagacgaccggatcggtgatggtgtacgcctgatccggtggcagcagctcgccctccttgtgatgttgcacggatgccacgcgcaagcggccagtctctccaaatacccacttgctaatggactcggccacgtcgcgattaccggccagcttgtggaacacaccgctctgtgcgtactgcacggccgttgtgaagctctcgtcagagaagaagagcagcgagccggagaacactacgcgggcattgttcctcgcctgcagggcggcgattagca

SEQ ID NO: 19205 - DNA, 806 bp, DROSOPHILA
atctcaacgaaacgaaatcattgtgaaaatttctctcgtccgaatttgttcgtctcgtgttgaaagtgacaaattgtgaagaataactttattccgtgtttaacgtttaaaaaaaaaagctaagaaaacatggctcgtactaagcagactgcccgtaagtcgaccggaggaaaggctcctcgtaagcagctagccaccaaggctgcccgtaaatcggcgccatccaccggcggagtgaagaagccccatcgttatcgtcccggaactgtggctcttcgtgagatccgtcgttaccagaagtcgaccgagttgctcatccgcaagctgcccttccagcgtctggttcgtgaaatcgctcaggatttcaagaccgatctgcgtttccagtcggctgccatcggtgccttgcaggaagcatctgaggcgtacctggtgggtctcttcgaggacaccaacttgtgcgctatccacgccaagcgcgtgacaatcatgcctaaggacatccagttggcgcgccgcatccgtggcgagcgtgcttaaggtggatcagcaggaacgccagattcgatcactgtcgtccattcccgaacagtagaccattcacgtaccgttgtaggagaggtgcacgccaaggagctataccagcgacacattgatccaatctatcattcatatttacatgtatacatttatcatccttttgttgttcaatcgaatcgtcagcatgacgttgtcgataagaaaaacaccacacacaaaacaacacacaacattactgtaatgcttaaaaattattttataactct

SEQ ID NO: 19206 - protein, 136 aa, DROSOPHILA; identical to SEQ ID NO: 12318

SEQ ID NO: 19207 - DNA, 5448 bp, DROSOPHILA
cactacgcgcgaatgaagcacttcattttattgaaatttaagtgattgaaagtggcaaaatacaataacctaacgattgagggatttaaaaaaccttgtttgctcgacattgtttttatatgaaaaactaaataatcagtgattccaaaaatattttctacaaaacgatgtctataatttctatacgtaatattggaacacatatctcttaatatttaaaaactataacaattgcattagtagtccgcattttgaacttttagactagaacctgaactttaatttgtatgtgaaccctaacgtaatagaactttaaataacaatagaagcttgagatcgtttaaatttatgtaatacgtttcatttatttatacattttttggcgtccgttgctacaactaaaatatgctacaaataaaactataagtaatttggtattgtatcaatttatacaatattgtaaaaatttataacttaagatctcacgttttaatactttttcttctggaattcatcagaatgctaatatttatttgaatttgtaacttactgcttaatattttttgttagactattttttcactcagttttcacttgtactcaataaatttattcattgtgcatagaacaaaagttgttagcctgccccttatataggacgcaattaaaagttcctaagtgttttcctaattttgtgaaattaattaattagttattaataatatgattattgttatgcttgcgaaatcagttaacaataaatgcaattaccatcttttatgaaatgataatttgacaaaattttattataaatcggtatcaattaaattaatttaaatctagatctcaacttttctgtgtgactggaaagaattatagctaaagcatttaaaacccacacatatagacattagtcattaataaatgatgagccatctttatttattgtttacatatgcaggaaagctcacaactgagagctttttccaactttagacattttcggcctagccccacctggccacactacgacgaaacagaataagaagcgacgtggcgaaagaggcaaaaagcgaattcaatcgttgaaaaataccgaaccggtccggtactcagtttttgttgtagaagtaggcgttcgacggcctagttgaacttgaattattcaccgatatcgcttcaagtgaacccaaataatgatgtggcgccttgctggagtgctcctactaggcttcatcgccatctcgtccggagcggagcaggatgtcctggaactgggggacgacgactttgccaccaccctaaaacaacacgagacgacgctggtcatgttctacgccccctggtgagttagtgagtgggcgtggccgggcgccatcctacaacaaatgcattgcgtgtgcgattcgcgtataatccgcttgttgcgtccgcaacttaattcgattcccaatgcccagtgccgaccgatgcccgattttccggccatcgcaagcgcaaagtacacgtcagcgtttgccttgcttttgccggcaaataaagaaggaacgagtgacggaacgaaacgagacgcaaagagaggggcaatgatgatatgccagtattggtgccgtcggccattttagagcgcggggtgccaaagtgcctagttggtacaatttccgtgcaattcctgctccacttgtccactggctaatgatagtgagcaggcataggggccccagtgtacatagcgcatcttttattatagtttcttatgcctatgcattatacccataatcccaggaatgtgtaattctaagggttaacttagatttagcttgaaactggttatcatagtctgaaacactcacagttctcatacaaatgtaatttcccaacagtttacaccaaccatattaaaacttcaattttaattgcctgcctactcacaaaagttatgctgattgtgctataaatttctcatgtcagtagacacatttttaacttccatcgtaatccacactgaacacaataaccttttaatacatttttgtttagtacataacacatatttactgtgcctatttactctcttttgagccatttgtttgcccattatcaggggtaaactataagctcacacttggacaatgaactaggtaaattattagcgttttttttgccggccggctttcgaaatccccaaagagctgttgaactacttggcatggagacttgattccctcatgacgaaccttatcagtattcaagcataaatacacagggatgaagttgaaaaagttgtacactgcaataaaactgctcttttcattataacatagttaacttaaggcatcacttatctttatcaaaaatgaattattatctgcactgctaagagtgcagactatactctgctgtttcaaataagtaccaagtcgtttttctctctgtatgcctaatgggcacttgtacttgtgtgataagacagttgataattccagcacccttactttaattacaagctagttttttgggaacttgtcttcccgttgccttgataacaaatgatgaattagatagtattgttaccaacataatgtttaagtgacgtgtcctaacagagtgttttttcctgtttaaggtgcggccactgcaagcgattgaagcccgagtacgccaaggcggcggagatcgtgaaagacgatgatccgccaatcaaactggccaaggttgactgtacggaagctggaaaggaaacgtgtagcaagtactccgtcagcggctacccaacgttgaagattttccgtcaggatgaggtgtcgcaggactacaatggaccacgcgaagccagcggcattgccaagtacatgcgcgcccaagtgggacccgcctccaagaccgtgcgcaccgttgccgagctgaaaaagttcctggacaccaaggacaccacgctgttcggctacttcagcgacagcgactccaaactggccaagattttcctgaagttcgccgataagaaccgcgaaaagtaccgcttcggacattcaagcgaaaaggaagtcctcgataagcagggcgaaacgtaagtgggaggctctaatcaagactcgtacatctgtgtattatgtgtttttcgttttatatattttctaagtgttaataaactagagcctagttgggattttcatatttgtttaaatgtaatgaaaggttcatccatttcattgttcatttaacttgctccaaagttttctccaaaaagtttccacttttaggtttttatgttaaaatgtgttaatgtaagtaattaaaatatctgtgatgcttttcaatccgttccagcgacaagattgtgcttattcgtgccccccatctgagcaacaagttcgagtcatcttccattaagttcgagggtagctccgagtccgatctgtctacctttgtcaaggagaacttgtaagtagtttggaaatgttgttaccttctggcacatgtccactattattgctctctactccagccatggtcttgtgggacaccgcactcaggattcggtcaaggatttccagaatcctttgatcactgcctactacagcgtggactaccagaagaaccccaagggaacgaactactggcgcaaccgtgtgctcaaggtggccaaggagtttgtgggtcaaatcaactttgcgatcgcctccaaggatgacttccagcacgagttgaacgagtacggctacgatttcgttggcgacaagccagtggtattggctcgcgacgaaaagaatctcaaatacgccctgaaggacgagttctcagtggagaatctgcaggactttgtcgagaagctgctggcgaatgagctggagccgtacattaagagtgagcctattcccgagtcgaacgacgctcccgtcaaggtggccgtcgccaagaacttcgacgatctggttatcaacaatggcaaagacacgctgattgagttctacgccccatggtgcggccactgcaagaagctgagtcccatctacgaggagctggccgagaagctgcaagacgaagatgtggccatcgtcaagatggacgccaccgccaacgatgtgccgccggagttcaacgtgcgcggcttccccaccctcttctggctgcccaaggacgccaagaacaagccagtcagctacaacggaggtcgcgaggtagacgacttccttaagtacatcgccaaggaggcgaccacagaactgaagggcttcgaccgcagcggcaagcccaagaagaccgagctctaagctgcacgccgggtagaactggccgccaactagcatttccatatttttgtaaaatcgaatgcattctccacaatacttgagcaaaaaatgtattaaattatttgatagtgatgaaacgcgtacgaacacaatttgatgattatgtcgcaataaacttaaatcttcatttaattagttaaccacttttgttctgctatttcggtattcatatttctttgccagttctcattgttattgttaaactatagaagacatggtttgcaaattcggtgtcttacacatatcgttcgtgtgatcgtccagcatcatccggaaccagtccgaaacgaacgtgtactgattgcgccctcgcaagcccttgtatgatactgttccttggctcgcgtcgaactgaaaaaggtaaacggtgctggggcagtcgatcggcgccataacttgggaaatacaattgagtaggtaaatcatgaagttggcgcacactgtgggcgaccaatctttttcctgtaaatgaaaaatttagtttcttaagttagtagaacaagaaatgttcctcgaaagttgcaaaactgggcgataaacttgcataaaatgcttgatttaagtatactaacgcaagacttccataaatcccgcaccaaagtcttttcaatgttgtgcacatgggcgttttcatcgcggcgggctatatagaggctttcgattcccaacagaaaacacttgacccaccacttaagggcctctgtgcgattgtgctctggccaatccagtcgactcatgaacatagggcgtatctgcaggtctacccagcttagagcagacccattccttaaaattgaaaactaaatggtttagcaatgcagcttgtaagcctgggaagctttggcaaagacttacaatgttgtgcttggcatctcggctagtactggagaatcaaatagaactcgattaccattcaaatcaaaggaaaatacaccatgaaagcgtaaatgttcttcagaagattgattgtgctggtgcatcttaatgccgttttctaaaagaatacaaaatacgtgagcgatttgaagggccatggatgtttcatgagacttcataccaaaaacacaatgggttcgaagattcctaagccaaaattcttgcatggccctcttcagattgtcctgatcaatggggtcgg

SEQ ID NO: 19208 - DNA, 1843 bp, DROSOPHILA
tttcggcctagccccacctggccacactacgacgaaacagaataagaagcgacgtggcgaaagaggcaaaaagcgaattcaatcgttgaaaaataccgaaccggtccggtactcagtttttgttgtagaagtaggcgttcgacggcctagttgaacttgaattattcaccgatatcgcttcaagtgaacccaaataatgatgtggcgccttgctggagtgctcctactaggcttcatcgccatctcgtccggagcggagcaggatgtcctggaactgggggacgacgactttgccaccaccctaaaacaacacgagacgacgctggtcatgttctacgccccctggtgcggccactgcaagcgattgaagcccgagtacgccaaggcggcggagatcgtgaaagacgatgatccgccaatcaaactggccaaggttgactgtacggaagctggaaaggaaacgtgtagcaagtactccgtcagcggctacccaacgttgaagattttccgtcaggatgaggtgtcgcaggactacaatggaccacgcgaagccagcggcattgccaagtacatgcgcgcccaagtgggacccgcctccaagaccgtgcgcaccgttgccgagctgaaaaagttcctggacaccaaggacaccacgctgttcggctacttcagcgacagcgactccaaactggccaagattttcctgaagttcgccgataagaaccgcgaaaagtaccgcttcggacattcaagcgaaaaggaagtcctcgataagcagggcgaaaccgacaagattgtgcttattcgtgccccccatctgagcaacaagttcgagtcatcttccattaagttcgagggtagctccgagtccgatctgtctacctttgtcaaggagaacttccatggtcttgtgggacaccgcactcaggattcggtcaaggatttccagaatcctttgatcactgcctactacagcgtggactaccagaagaaccccaagggaacgaactactggcgcaaccgtgtgctcaaggtggccaaggagtttgtgggtcaaatcaactttgcgatcgcctccaaggatgacttccagcacgagttgaacgagtacggctacgatttcgttggcgacaagccagtggtattggctcgcgacgaaaagaatctcaaatacgccctgaaggacgagttctcagtggagaatctgcaggactttgtcgagaagctgctggcgaatgagctggagccgtacattaagagtgagcctattcccgagtcgaacgacgctcccgtcaaggtggccgtcgccaagaacttcgacgatctggttatcaacaatggcaaagacacgctgattgagttctacgccccatggtgcggccactgcaagaagctgagtcccatctacgaggagctggccgagaagctgcaagacgaagatgtggccatcgtcaagatggacgccaccgccaacgatgtgccgccggagttcaacgtgcgcggcttccccaccctcttctggctgcccaaggacgccaagaacaagccagtcagctacaacggaggtcgcgaggtagacgacttccttaagtacatcgccaaggaggcgaccacagaactgaagggcttcgaccgcagcggcaagcccaagaagaccgagctctaagctgcacgccgggtagaactggccgccaactagcatttccatatttttgtaaaatcgaatgcattctccacaatacttgagcaaaaaatgtattaaattatttgatagtgatgaaacgcgtacgaacacaatttgatgattatgtcgcaataaacttaaatcttcatttaattagtt

SEQ ID NO: 19209 - protein, 488 aa, DROSOPHILA
MWRLAGVLLLGFIAISSGAEQDVLELGDDDFATTLKQHETTLVMFYAPWCGHCKRLKPEYAKAAEIVKDDDPPIKLAKVDCTEAGKETCSKYSVSGYPTLKIFRQDEVSQDYNGPREASGIAKYMRAQVGPASKTVRTVAELKKFLDTKDTTLFGYFSDSDSKLAKIFLKFADKNREKYRFGHSSEKEVLDKQGETDKIVLIRAPHLSNKFESSSIKFEGSSESDLSTFVKENFHGLVGHRTQDSVKDFQNPLITAYYSVDYQKNPKGTNYWRNRVLKVAKEFVGQINFAIASKDDFQHELNEYGYDFVGDKPVVLARDEKNLKYALKDEFSVENLQDFVEKLLANELEPYIKSEPIPESNDAPVKVAVAKNFDDLVINNGKDTLIEFYAPWCGHCKKLSPIYEELAEKLQDEDVAIVKMDATANDVPPEFNVRGFPTLFWLPKDAKNKPVSYNGGREVDDFLKYIAKEATTELKGFDRSGKPKKTEL

SEQ ID NO: 19210 - DNA, 5767 bp, DROSOPHILA
ggatgcggcttggggtggcggtgcgctcatgtccaagaagtatcgccatctgctcaatggcatcgaacggtgagtttcatcatatcctggttgctcatttcgaggggtaaactgaagatgtgtatattggcagggctgattcggtcacttggaatccacacaagctgctggctgcctcgcaacagtgttccaccttcctgacgcgtcaccagcaggtgctggcccagtgccattcgaccaatgcgacatacttgttccagaaggacaagttctatgacacatccttcgacaccggcgacaagcacatccagtgcggccgacgagcggatgtcttcaagttctggttcatgtggaaggcgaagggcacccagggtctggaggcgcatgtcgagaaggtcttccgcatggccgagttcttcacggccaaggtgagggagcgtcctggattcgagctcgtcctcgagagtcccgagtgcaccaacattagcttctggtatgtgccgcccggtctgcgggaaatggagcgcaatcgcgagttctacgaccgtctgcataaggtggcgccgaaggtcaaggagggcatgatcaagaagggctccatgatgatcacgtaccagccgttgcgccagctgcccaacttctttcgcctggtgctgcagaactcctgcctggaggagtcggacatggtctactttctggacgagatcgaatcgctcgcccaaaacttgtaaacggtgacgcggcgatggcatgttatgaggttaggtgttgacaacattctctttaggcttacgccgattgtatcttctagtgtatggttaactaatactactcacgtttgtatatttttctggatgttaagtattaccaaaaacaaagaacaaaaatacatatttataggtcatttcatttagattaaagtgtgtccttgccttgggaactgggaaacgtatcggcaacaggatgctttaaatgcaaggttatttaaaaacatagtgattaagtttgcaaacccttaactatttcaaatacacttgatttatgtatatttaacattttgggccttacaatttaagaggaactagtaacagcctccaagtctccttgacttcctgagtaacaacttagtacttatgatttaatctctagtatttggcagctaactcttctttatccaatcccactgactgacatcgttgcctccagccttctcgattgcctccgctacgctcaagctctgaccaggctgaataccatagccgatgcgcaggccatgcggattcgagggcgtcttgcagtccatggtgcactccttgcgcagcacagtgtctacctccacggacgagaagaaggccaccgacatgggcagatcctgcagtccgatgcgggacacacaaaaggagcgcgtcattaggtttgtgatgtgcatggccagcgccgctttgggcgatagctcttccttgaccaagtagcgcaattcatcatggaagctcaagcagaatctaacatgcgatcccatcagccatcgcatgctcaccagcatcagatgaaggaagtccactgcaccgctctgtaccacccaattgatgcgcgttggcaggaaacgttgctcctgctccggtccagtatccgcctccaatgctcgactaagacgtccgcccaggaacggcgttcgtggctgcgatcccgtggcaatctcttccaggcgattgaacatggcgctttccgtgcctccctgccagttgggacgatgaaatacctctgccagggtgcggttgcgttgaatggccagtcgggaagcctcgtagctgctgtagctgttagggatagtaatgtggttaaatgtgaagaaagatgtgggtttgtgactacttacgccctgtcctccagttcgtcatgaaactcctctcgcaatcgatacactcgcttgccctttgtgatggagaacattttcattgccttggccttcgcctcggatgcactgaatgtgggattaaactgacggagcagggtctcggcaaacaattgaccagctccgtagatccgggcatagttgatcactttggcgtgatctcgggaaatgccgaccgcctttgccgttatggagtgcatatcgctgccattcgacttactgccgctgagggtcatccaaccgagtggcgtggcaccgtgctcaccgcaggcgtaggcatcacccagcacggaagcgatccacagctcctgcgaatcgacatcggcaccaacgagtctataacccggtggtgcctgtaccatcgagcgcagctccgatcccagccgatcaggtcgcgaattggaggccgtcatccatgtgggttccatcgcgcgacgtgttaaagtgccacaggcaacaacttgtggacaaatggctccgtaggctattggctggcacttttcgccagtgaattcatttggtagttgctgcgaatccagccagaccaccatctgacccataattcgatccctattgttgcgccagtaggacatcatgcgggcaatgtcgatgacgcgggcggcagcttgacaagatggatcaccactgctcagcacgttttctgcgaacttgttaaggaagtccttggatagggggttgcccacccgaaaggaaggtccattcttgtggggcagcttgaggaagaagcagcaatcatccagtactttgttgcaccacacgccagagcctgaaaacatgaaaatgatgaacccacacacacgtaagttacataacatacgtaccttggtactgggtttccagacgttgttgcttctgggacaacttcttgtagtgttcccgctttcccaaatgctgctcaacctgaccaggcagcatgtcaaaggccatatcactttccgccttcgaggcgctgaggcgagcaaactccggcactggacagtgcgccagaagttgctccatgggcagtcgatctactccttctgaatcgctgcgaaatggaaccaggaagccccagccttgctccctctcgtagtgcaagggatatccttcccagcagagggaaagcagcttgggggcaatctgcatgccggtgctaatctcgctggctcccggggaccacggctcttcgtcatcctctagaatttcatctgcccttttggctggtggtttgcggcacagtttgcgataccacagaggataaccgggtagcaatggccgtcgagctggcagtagcgcctgttgatcatagaggtgctgaaacttggcctgcagacgtcgctcctccggtgtgtttccagaatccttaagctccacagtaggcagaggcttgcgcttcggcggctgctttagtttcagttcctgcacactccaatcctcgtcccagagccacaaattctggcggtactgatcgtcgagcagcaaggagcacgcttcctcagctctgcggcccaaatggtacttggcctcgatgctgaggtcctcgtaggtgagctgcgcctcacgtatgtagcgctcccagttggaattgactggcaaataggcggatcccatctccaacatgccagccaaggaggcaggatgcggaaatcgttctgcgtacaagggatacaggactcggagtatccgatgtgtagcctccacatcgctggcgcagtagttggttaacgactgaaagctctgacgtacttgctccagagttccctcgacgaaaatgttcctcggctccttggatagcgtatccccaccgcagtagaggcgatgcacctccaccagactgttaagagagctctgctccagccagcccagatcctcggcagccggttccttcttggatttgagcatggcccgctggtagctggtcactccactgacacacatgtgcagcgacattgtgtccacgaaccgagtgcccgtgtcctcggtcaaatactgctccttcagtcgcgccctgtcgtaggagacattgtgacccaccaccaggccaggtccagtggtgcccagtggtatgagttcgtccgtagtgtagtgcggtcgctctgagtccgtgtccacatctaatggctctaatttctccacgcttaggcgatgtttcgtcagctttgagctcacccacgaataccatctcttggtgctgacggcggtggccaaaactggagcctgcccctcgctgacgcacacctccacatcgaagacaagtcccttctccagtgggtgatccaccggcgtggctgttccatcctctggatcataagctgtccagccggtatggaaagcccatcgcttcggacgcttcggcagctgctcgcattggaccaggggaagtagtaactcctcgtatggctgcacttgctccttggcaatgttgtggaagtgctcttcaatattggcgcccctaagcgcgggcaatttcaactggacatccgaaacaggagcagaactttcgatatcgactccgtgccggcgcaactcgtctttgtaaaccttagcggaggccacctgctgctccgaaatgcttcgcggcgcttgtgggaacagttgggcgtgcaaattccgcgagatcatctgcaccttgaccagattttccgcatattccgttgggccattctccacattctccggcttctttggtttgtttaccttttgcggaggcttgacccgccgaaagatcttcacgctactgctggcgtagtgctcccggctaactttgctggcgtactttctgatcaggtggaactgcatcctcgttttaataaaggaaacatcctttaaggcaactgaagtccaacctgcgaccacacactcctccgtaagattgccgccagcctaggtatttttgtgcgcttgcgcggcggtcacattgatttaattcaaatttatttccgttaaattaataataaataaatataaaacattttcaaaaaattccaacaaatcaaatttcttgctgcttgaaacgattaattattaaaaaacaaacacttaacatttgattttacgaataaaaaacattttattcagtttgctataaaggtgaaacactttaaaacacacacacactttcggaaccattatggaagttggtggggggggggggggggaaagaacaatctcttcggttaatttatgtaaaaaggctttcgcacggtacagaacaatgggaaaagcgattttggaaaacattttggcaaatacttcgctcctggccaggccaacacactcgctaacagacaataacacgtaacgctggtccgttccgggccgcactagatctgcaggttgcgcatgccgccattgatgccgccctgctccacattccaaatgaccagctgcccgtcgacgcccgaggtggacaccttggtggcgctcgccttgtcgccggcatacagtcgcacgctggtgatggcgttctgatgtatggaatcgaccaccgtgtccgtgttctccgtgcgcatgttgcggtccatcgactgaaagattctcatggcggtaatgccgctcgactccttcttctgcgacttatcgagcttgccgctcagcaccagctttccatcggcagtcagactgtagagcagtggcacacagctatagccggccaccacgacggacgtgggcgagacccattcgcatgacaggaagggcagatagccggtgcggcatcgaatgaccgtattgccattggtagcgtccgcgatgctcacgcagctgtcgtggcccacccagcagaccttgttaccgtcgctggagaagctcacgctgttaatccagccgccacccgaggtctgcgagttgcggaac

SEQ ID NO: 19211 - DNA, 3653 bp, DROSOPHILA
tggtcgcaggttggacttcagttgccttaaaggatgtttcctttattaaaacgaggatgcagttccacctgatcagaaagtacgccagcaaagttagccgggagcactacgccagcagtagcgtgaagatctttcggcgggtcaagcctccgcaaaaggtaaacaaaccaaagaagccggagaatgtggagaatggcccaacggaatatgcggaaaatctggtcaaggtgcagatgatctcgcggaatttgcacgcccaactgttcccacaagcgccgcgaagcatttcggagcagcaggtggcctccgctaaggtttacaaagacgagttgcgccggcacggagtcgatatcgaaagttctgctcctgtttcggatgtccagttgaaattgcccgcgcttaggggcgccaatattgaagagcacttccacaacattgccaaggagcaagtgcagccatacgaggagttactacttcccctggtccaatgcgagcagctgccgaagcgtccgaagcgatgggctttccataccggctggacagcttatgatccagaggatggaacagccacgccggtggatcacccactggagaagggacttgtcttcgatgtggaggtgtgcgtcagcgaggggcaggctccagttttggccaccgccgtcagcaccaagagatggtattcgtgggtgagctcaaagctgacgaaacatcgcctaagcgtggagaaattagagccattagatgtggacacggactcagagcgaccgcactacactacggacgaactcataccactgggcaccactggacctggcctggtggtgggtcacaatgtctcctacgacagggcgcgactgaaggagcagtatttgaccgaggacacgggcactcggttcgtggacacaatgtcgctgcacatgtgtgtcagtggagtgaccagctaccagcgggccatgctcaaatccaagaaggaaccggctgccgaggatctgggctggctggagcagagctctcttaacagtctggtggaggtgcatcgcctctactgcggtggggatacgctatccaaggagccgaggaacattttcgtcgagggaactctggagcaagtacgtcagagctttcagtcgttaaccaactactgcgccagcgatgtggaggctacacatcggatactccgagtcctgtatcccttgtacgcagaacgatttccgcatcctgcctccttggctggcatgttggagatgggatccgcctatttgccagtcaattccaactgggagcgctacatacgtgaggcgcagctcacctacgaggacctcagcatcgaggccaagtaccatttgggccgcagagctgaggaagcgtgctccttgctgctcgacgatcagtaccgccagaatttgtggctctgggacgaggattggagtgtgcaggaactgaaactaaagcagccgccgaagcgcaagcctctgcctactgtggagcttaaggattctggaaacacaccggaggagcgacgtctgcaggccaagtttcagcacctctatgatcaacaggcgctactgccagctcgacggccattgctacccggttatcctctgtggtatcgcaaactgtgccgcaaaccaccagccaaaagggcagatgaaattctagaggatgacgaagagccgtggtccccgggagccagcgagattagcaccggcatgcagattgcccccaagctgctttccctctgctgggaaggatatcccttgcactacgagagggagcaaggctggggcttcctggttccatttcgcagcgattcagaaggagtagatcgactgcccatggagcaacttctggcgcactgtccagtgccggagtttgctcgcctcagcgcctcgaaggcggaaagtgatatggcctttgacatgctgcctggtcaggttgagcagcatttgggaaagcgggaacactacaagaagttgtcccagaagcaacaacgtctggaaacccagtaccaaggctctggcgtgtggtgcaacaaagtactggatgattgctgcttcttcctcaagctgccccacaagaatggaccttcctttcgggtgggcaaccccctatccaaggacttccttaacaagttcgcagaaaacgtgctgagcagtggtgatccatcttgtcaagctgccgcccgcgtcatcgacattgcccgcatgatgtcctactggcgcaacaatagggatcgaattatgggtcagatggtggtctggctggattcgcagcaactaccaaatgaattcactggcgaaaagtgccagccaatagcctacggagccatttgtccacaagttgttgcctgtggcactttaacacgtcgcgcgatggaacccacatggatgacggcctccaattcgcgacctgatcggctgggatcggagctgcgctcgatggtacaggcaccaccgggttatagactcgttggtgccgatgtcgattcgcaggagctgtggatcgcttccgtgctgggtgatgcctacgcctgcggtgagcacggtgccacgccactcggttggatgaccctcagcggcagtaagtcgaatggcagcgatatgcactccataacggcaaaggcggtcggcatttcccgagatcacgccaaagtgatcaactatgcccggatctacggagctggtcaattgtttgccgagaccctgctccgtcagtttaatcccacattcagtgcatccgaggcgaaggccaaggcaatgaaaatgttctccatcacaaagggcaagcgagtgtatcgattgcgagaggagtttcatgacgaactggaggacagggcctacagcagctacgaggcttcccgactggccattcaacgcaaccgcaccctggcagaggtatttcatcgtcccaactggcagggaggcacggaaagcgccatgttcaatcgcctggaagagattgccacgggatcgcagccacgaacgccgttcctgggcggacgtcttagtcgagcattggaggcggatactggaccggagcaggagcaacgtttcctgccaacgcgcatcaattgggtggtacagagcggtgcagtggacttccttcatctgatgctggtgagcatgcgatggctgatgggatcgcatgttagattctgcttgagcttccatgatgaattgcgctacttggtcaaggaagagctatcgcccaaagcggcgctggccatgcacatcacaaacctaatgacgcgctccttttgtgtgtcccgcatcggactgcaggatctgcccatgtcggtggccttcttctcgtccgtggaggtagacactgtgctgcgcaaggagtgcaccatggactgcaagacgccctcgaatccgcatggcctgcgcatcggctatggtattcagcctggtcagagcttgagcgtagcggaggcaatcgagaaggctggaggcaacgatgtcagtcagtgggattggataaagaagagttagctgccaaatactagagattaaatcataagtactaagttgttactcaggaagtcaaggagacttggaggctgttactagttcctcttaaattgtaaggcccaaaatgttaaatatacataaatcaagtgtatttgaaatagttaagggtttgcaaactta

SEQ ID NO: 19212 - protein, 1145 aa, DROSOPHILA
MQFHLIRKYASKVSREHYASSSVKIFRRVKPPQKVNKPKKPENVENGPTEYAENLVKVQMISRNLHAQLFPQAPRSISEQQVASAKVYKDELRRHGVDIESSAPVSDVQLKLPALRGANIEEHFHNIAKEQVQPYEELLLPLVQCEQLPKRPKRWAFHTGWTAYDPEDGTATPVDHPLEKGLVFDVEVCVSEGQAPVLATAVSTKRWYSWVSSKLTKHRLSVEKLEPLDVDTDSERPHYTTDELIPLGTTGPGLVVGHNVSYDRARLKEQYLTEDTGTRFVDTMSLHMCVSGVTSYQRAMLKSKKEPAAEDLGWLEQSSLNSLVEVHRLYCGGDTLSKEPRNIFVEGTLEQVRQSFQSLTNYCASDVEATHRILRVLYPLYAERFPHPASLAGMLEMGSAYLPVNSNWERYIREAQLTYEDLSIEAKYHLGRRAEEACSLLLDDQYRQNLWLWDEDWSVQELKLKQPPKRKPLPTVELKDSGNTPEERRLQAKFQHLYDQQALLPARRPLLPGYPLWYRKLCRKPPAKRADEILEDDEEPWSPGASEISTGMQIAPKLLSLCWEGYPLHYEREQGWGFLVPFRSDSEGVDRLPMEQLLAHCPVPEFARLSASKAESDMAFDMLPGQVEQHLGKREHYKKLSQKQQRLETQYQGSGVWCNKVLDDCCFFLKLPHKNGPSFRVGNPLSKDFLNKFAENVLSSGDPSCQAAARVIDIARMMSYWRNNRDRIMGQMVVWLDSQQLPNEFTGEKCQPIAYGAICPQVVACGTLTRRAMEPTWMTASNSRPDRLGSELRSMVQAPPGYRLVGADVDSQELWIASVLGDAYACGEHGATPLGWMTLSGSKSNGSDMHSITAKAVGISRDHAKVINYARIYGAGQLFAETLLRQFNPTFSASEAKAKAMKMFSITKGKRVYRLREEFHDELEDRAYSSYEASRLAIQRNRTLAEVFHRPNWQGGTESAMFNRLEEIATGSQPRTPFLGGRLSRALEADTGPEQEQRFLPTRINWVVQSGAVDFLHLMLVSMRWLMGSHVRFCLSFHDELRYLVKEELSPKAALAMHITNLMTRSFCVSRIGLQDLPMSVAFFSSVEVDTVLRKECTMDCKTPSNPHGLRIGYGIQPGQSLSVAEAIEKAGGNDVSQWDWIKKS

SEQ ID NO: 19213 - DNA, 7564 bp, DROSOPHILA
tttccgctgccatctgcagctgtagctgcctaacaaatgcaattaaaatctttgcgcaagaaaattgttgcagcaggcacgcagagatactcgtactgtatgtgctgcaatagtttggtggcagcaacggggcggcagataacatattgcccacgtccggctgaaattgtacggacaaggcgaactcaaaaaaaaaaaaaaaaaaaaggaatccctcaaaaggagaaccaagaaaaatgggatttatctctggccaagctccagccatacaaatctaatttagaccacacgacggcttcagatattttatattccccactcagttgcggtccatcctgatctcctccagcttgcttgatgagcccagccgttggccaaatgaaattatttatgggcagtcctaggtcagtgagaatttggttttttaagggtttgaactttgcggctcaacaatgcctgtgattttttttttttttattatttttttgcattgcatccattagagaaagcactcctttggcattctactcagctacttgccacataaatatctacggagggtagctaactagtccttatctcaacttccccatttatcctcgccgcaagtgcacttttcctgctgctaattaagttgcaaggcagctttctcagcaggcgttgcacgaagtagataaaaggaaaagcccccgatttgcagacactatgctgggaaagatatatatatatatatattttgccagcattcgctaatcggcttagggcagccaccatgcgaccacaacaacaacaacaacagcagcagcagtgtgctccatgcaatatttaatcacattagttgatggggtaacggccatgtacgcaacaatttacaacttgcattaattatacgtctagttggacaatggcgcctctaactatcccactctaaatgtatctctatctctatccttatttgcaggggacacccgttgataataaattattaatgcatctgctgggaaggcggcactgcacggctgtccttggcagcaaatccagttgcaacatcggtgagtgacgggcggcaatcacaaaggacttgcaacagttgccgttgcttctgctattgctgttgctgttgctgttgcaacaatggccagtggcaacaatgaaactgagccgctctactgcggcagcggcatggataattttcatacaaggtaagcgactttcaccaatgtcacgatcaaggccaaggggcttttccaccagacatggcgacaacaataccataagccaacagttgggggcgtggtcgggggcggaggcgatggtggcaacatcatagccattagctgctggcgcaagggaaccgttcaaaaatcgattatcgccccatttcgggggagcttctattttgatttgccgtacaattttctcgggcgattaaacgacgaagcagaacgaaaacaaaaaacagatttgtcaacagcaaggtcaacaattgatggctgaaatcaatttaattgaccatatcctacgggccctccaagtggccatctgctgcacctataaaaaagtgaatccggtctgcgattatttatatattcgttgcatggcaggcggtcgtaaaacctcgagatgatgattaaaagcggccctaaaaacttaatggcggtttaggaaattcaattcctgtaatttaagccgagtcaccattcttcgaagttcttacatgtaagcgataataaatagttaagtcaattggccaataaacctattaatattgtgcatttaccacgattagactttgattaaagtgacaatgctgatttctgtagaggaaatctagttctagtcttcccacaaagctatttagttactcttgaataaatatgttacttttcttttgccaaaaccaacagaattttaaatttaataatttggattttttgcaataaactgtactgattaatgggccacacaaaaatgtctagtttattatggagctcttggtttcataaattaagaacataatccaatcggcatataaatcattgatagcaatttattttccgtgatgaaactgtgctccgtgtgaactgcgaattactcattctacggttgcaaaaaaagccaccaacggtcaacatttagaccaggacttttagttttaattagagccagcctggccaacagcagtgttaatgaccacaaagtggctggccacaggatcagcatcccagaatgcgatgccgcatttgctttaattaaaggtagtagctggagtttgaaagatgactgtatggcaattagatgtgtagccagaacacttggccatttacttttgtgtcaaagtcgtgccaaattgccagcggaggcgacacttgacgctgtcacgccccagacagacgcagaccggcccaaaagcacccactcagccgtctccaggcgccactcaagcggcaaaggaacgccaaaacactaggacacagaacgccagaagactcgaaaaaaaagtataaaattcaaacgcgtatacaattcaatgtgtcacatcgaagaagaaccctttctctggcggcaacgtgacgtatacgcaatattaatggcaaagcgaaaagggcctcaaaagctaacgaaaaaccgcagcataacacgcacaaaacaagcaattaacataaataataaagaacgcacaaaggcgttcggctctccgttgccaaagagaaaagccaacgaaaggaataaaaaacgccaaaaagcccgaaaaaaaaaccgaagacccaaaaaatgtgtaaaattgatttcggaaaatatttaatttaccaaatgcatgctcgctttttgcggccgtgtacgccccgaacaaataaaacaaataggcacacatcgtctggcatttcatgttaaaggcttctcatgctgatggacaggatacagaaaatatatatacgaagtgaggtgtgtgtctacgtgccacaaaaacagcgaaattgaaacgctttccgaatgccggcgacactttttggcggcacaaccctcgtcttgtcgaccaactcctggggaatttacaactccattcatcaaactcacaaaaactttgcctggtgtacggtcttgggttcgtcgtcgcaggatttcacctggctaaaaatccagactcccagccatccctgagtctaatttatggcctttgataatccatgttgatgaatggcggcaacgacaacaacgtcgacgacatgaatgaagtcctggaattgttttgcaccaggatggcatcggggctccaggtgggacgtactggctcaaagttattggcccagaaatcaggcatagttagctgccgaaatgaaacccaaataccgagaaaactaggcaaaacaaacagtagtacaccggaaatgcatatcattgtaaaaactacatcagtttacctaaaaggcttggcttttaagctttcacatttataaaatattgaaaatgcatataaaagtatgaaattaattcccttttgtcaataaactttctttctttctttctgtgtaatatgggggataccggttttttttttttttcaatgaaatcccttcgaaaggtataagttcagaatcgagagttttatgccaagttgggcacagttttttttttccccagctacctaaaataatagagacattttcctcccactacaactgattgcattgccggtgcagaaagttttttcagttggttcggaaaaatttggttcgcaaacaaattaatatgaactggcaagcatttttcgggcaaaaagctctcatctatgtagattggaatggaaattccggctagaattgcataagaccacctgcagtgtgggctaacatgactaaaaagttgtccacaaatttggcttagattctccaataaaactgtcgttcggccaggaatccccttttttgtttcgagtgaatggggaatttcgcacgacagacagcaataaagaatttaactaaagtcctgacaccgacagcaccagcaggacgcacacgtgtcactccatttggagagcttggagtatattaaacattttttccccaccagtcagccgcaggacttgcatcggtctcgcctcgcattttcctatataaattttatgctaagtctaatttgttggctgcaacttgcacaaaggcaaaaaataaacaagggcgaaatgccgaaagccaaaacccaaccgaaaccgttgagggctgcctcgcttttttcctgtgccgaattccctaaaactttgcacataaatttgagtcctgcgcctgggcttttcctcttccacctttttttttagcctcaaagcgctcgacgaaaactaaacaaaagctggtaaaatgtttatcccagaagggggcggtgtgggcgtggcttgcttaagccctagacacccgagagtttattgcctcagtgttgcaaacgctgctgcttggcaagtcaacggaaatggctttcggatggttttattgcctacttttgctgcgagaaagcggactagacatggaagtaacaaattggttaaggctaactagagcataataacagaaacatcagaaacataatttgggaaatgcctgccactcaccgacaacatttcgatttgtgtctttattacacttctctgccgtgatgggttataacttttggatccttgcagagagttgggaaattgcttaaaaataaaatttgtttaatttaatttgaggtggtttttcaaacaattttaatggattaataagtttaggaagttaagtatatacatctatctattataccatcttcaaatattgttgaattgaagagataactcggagctaatcccatatttttcatttttttcagctacaagaacatgcatggctatgtttcgctggtggtctgcatcctgggcaccatcgcgaataccttgaatatcattgtgctaacccgacgggagatgcgctcccccacgaatgccatactcacgggtctggccgtggccgacctggcagttatgctggagtatataccctacaccatacacgactacatcctgacggacagtttgccgcgggaggagaagctcagctacagctgggcctgcttcatcaagttccattcgattttcgcccaggttctgcacaccatttccatttggctgacggtgaccctggctgtttggcgttatatagcggtgggttatccgcaaaagaatcgcgtatggtgcggtatgagaaccaccataataacgataaccaccgcttatgtggtgtgtgttctggtggtgtcgccgtcgctctatttgatcacggctataaccgaatatgtcgatcagttggatatgaatggcaaagtgataaactccattcccatgacccagtacgtaatcgattatcgtaatgagttactgagtgccaggacggctgccctgaatgccacgcccaccagtgcaccactgaacgaaactgtgtggttaaatgcgagcaccttgctgacatcgacaaccaccgctgcaccacccacgccatcgccagtggtgcgaaatgttactgtctataggctataccacagcgatttggcgttgcacaatgcctcgctgcaaaatgccacatttctcatatacagtgtagtgattaagctgataccatgcatagcactcaccattctgtcggttcgattgatcctggccttactggaggccaagcggcggcggaagaagctcaccagcaagcccgccactccgggtgccagtaatggaaccaaatcaccggccaatggtaaagcagcggataggccccggaaaaatagcaaaactctggaaaaggaaaagcagacggatcgcaccacgagaatgctgctggcggtgctactcctctttctcatcactgaatttccacaagggattatgggtctgctgaatgctgtgctcggagatgtcttctatctgcagtgctacctaagactgagtaagtaaatatgtactatgcataacgccacagtaaattccacagattcccatttcactttaagatgtaataacccaatgccttttgccttttgccaccaggtgacctgatggatatcttggccctgatcaactccagcatcaacttcattttgtactgctccatgagcaagcaattccgcaccacgttcacgctgctctttcgtccaaaattcctggacaagtggctgccggtggcgcaggacgaaatggcagctgctcgagctgaacgctctgcggtggcaccggtcctggaaaagggacgacagcagccgcaggtggtgatggccagcacgaccaccaacatcacgcaggtgacaaatctgtagcacaggaggagtcgtggtcgccgaactttgctcagtcgcctgctgagtgtcctgaaacgcggcagaaggcgctcctccggcgaaggaggaggcgtgggaggaggtggtgcgccgttggccggcaacgatgcggtggaaccagcgttccaggccatcgtggtggtggtggacaaggtgagcggtgccacggagaatcagctgtacaccgccgagcaagctcgtattgtgacgtagtaaccctgatagtagtacatattatatgcctagttatccttgtaaaaagtaaactagttgtgtaagaatcgcagataaccacaagttatgtgcatactttggtgggaaatcgtaaaacccgtacagtcataataataaaatgctggttcatcactcatacgcaccgtttgacttcactctattccacattcacagtcaagtaggagctgtaaaaatgctgtgcataaacgagctcgtatacgctacagctggcgtcacaataatagttaccattgggttggcttcacaacatagatcaaagtcaaaaaatatatagttttgtaaaatgtttcataaatctatcttcatatttaactaacacaattcagaaactttcgcttgcatggaaaatgttttattttccccacttgacccaattgtgcgcaactgttcagcttttcggcatgaatcaaatcaaatatagtaaacttttgcatcttttccactttgatcccatgcgttttcatgttgatttcattcgcataaagtatgcagcacacgtactcactcaaaactacgaattttcggcaacgatttgagcagaatatttgccatttgttgtacagattatatatacacacacacacacttatgtccgtatctttaataatggcaattaagtcctagaaattttgacctgatattgatgcaggcattggaaaaataagtggcagttgcagtgcggtgcgttgataaatgaaatactttgcgaattctattattggaaatcgcaatttgggctgtgaatgaaattatagttttcttgaacgcaattgagaattcagttccgtttcgtgggttactgaatttatgggaaataatttaaggcagtcactgcagctgaccgaataatccaatgaaacattgcataaacagtttgcagtttttccacacttgcgaaaattgtaattgcaaatcgcttaagccccacgacgaatgacaaatggccagcgaacgcata

SEQ ID NO: 19214 - DNA, 1757 bp, DROSOPHILA
ggaaggcggcactgcacggctgtccttggcagcaaatccagttgcaacatcggtgagtgacgggcggcaatcacaaaggacttgcaacagttgccgttgcttctgctattgctgttgctgttgctgttgcaacaatggccagtggcaacaatgaaactgagccgctctactgcggcagcggcatggataattttcatacaagctacaagaacatgcatggctatgtttcgctggtggtctgcatcctgggcaccatcgcgaataccttgaatatcattgtgctaacccgacgggagatgcgctcccccacgaatgccatactcacgggtctggccgtggccgacctggcagttatgctggagtatataccctacaccatacacgactacatcctgacggacagtttgccgcgggaggagaagctcagctacagctgggcctgcttcatcaagttccattcgattttcgcccaggttctgcacaccatttccatttggctgacggtgaccctggctgtttggcgttatatagcggtgggttatccgcaaaagaatcgcgtatggtgcggtatgagaaccaccataataacgataaccaccgcttatgtggtgtgtgttctggtggtgtcgccgtcgctctatttgatcacggctataaccgaatatgtcgatcagttggatatgaatggcaaagtgataaactccattcccatgacccagtacgtaatcgattatcgtaatgagttactgagtgccaggacggctgccctgaatgccacgcccaccagtgcaccactgaacgaaactgtgtggttaaatgcgagcaccttgctgacatcgacaaccaccgctgcaccacccacgccatcgccagtggtgcgaaatgttactgtctataggctataccacagcgatttggcgttgcacaatgcctcgctgcaaaatgccacatttctcatatacagtgtagtgattaagctgataccatgcatagcactcaccattctgtcggttcgattgatcctggccttactggaggccaagcggcggcggaagaagctcaccagcaagcccgccactccgggtgccagtaatggaaccaaatcaccggccaatggtaaagcagcggataggccccggaaaaatagcaaaactctggaaaaggaaaagcagacggatcgcaccacgagaatgctgctggcggtgctactcctctttctcatcactgaatttccacaagggattatgggtctgctgaatgctgtgctcggagatgtcttctatctgcagtgctacctaagactgagtgacctgatggatatcttggccctgatcaactccagcatcaacttcattttgtactgctccatgagcaagcaattccgcaccacgttcacgctgctctttcgtccaaaattcctggacaagtggctgccggtggcgcaggacgaaatggcagctgctcgagctgaacgctctgcggtggcaccggtcctggaaaagggacgacagcagccgcaggtgcacaggaggagtcgtggtcgccgaactttgctcagtcgcctgctgagtgtcctgaaacgcggcagaaggcgctcctccggcgaaggaggaggcgtgggaggaggtggtgcgccgttggccggcaacgatgcggtggaaccagcgttccaggccatcgtggtggtggtggacaaggtgagcggtgccacggagaatcagctgtacaccgccgagcaagctcgtattgtgacgtag

SEQ ID NO: 19215 - protein, 540 aa, DROSOPHILA
MASGNNETEPLYCGSGMDNFHTSYKNMHGYVSLVVCILGTIANTLNIIVLTRREMRSPTNAILTGLAVADLAVMLEYIPYTIHDYILTDSLPREEKLSYSWACFIKFHSIFAQVLHTISIWLTVTLAVWRYIAVGYPQKNRVWCGMRTTIITITTAYVVCVLVVSPSLYLITAITEYVDQLDMNGKVINSIPMTQYVIDYRNELLSARTAALNATPTSAPLNETVWLNASTLLTSTTTAAPPTPSPVVRNVTVYRLYHSDLALHNASLQNATFLIYSVVIKLIPCIALTILSVRLILALLEAKRRRKKLTSKPATPGASNGTKSPANGKAADRPRKNSKTLEKEKQTDRTTRMLLAVLLLFLITEFPQGIMGLLNAVLGDVFYLQCYLRLSDLMDILALINSSINFILYCSMSKQFRTTFTLLFRPKFLDKWLPVAQDEMAAARAERSAVAPVLEKGRQQPQVHRRSRGRRTLLSRLLSVLKRGRRRSSGEGGGVGGGGAPLAGNDAVEPAFQAIVVVVDKVSGATENQLYTAEQARIVT

SEQ ID NO: 19216 - DNA, 3683 bp, DROSOPHILA
caaatgggcaagttccgcttcaaacatatagaactctgctaaatgcaacggagacttggagttctccgctcggaaggctggtgagagagtgtatgtcttgcctaaaccgtatgtcatggcctccaggtgcagttgaccagagacgctgaggaatactttgctatcaaagtagctttgttccatgggaatatttggtcggttcatctgcttgagcaggtcttgggagtccggttgtacccgaaacacttctcctgctccctcgcaatcgttggttgtgagcagaggagtgttgatctgcacgaaatcctgatcatccatgtagtcgtgtatagctttttgtgctttgtgtctgaccctcatctgggcggcaacgaaatctacgcgtgatcgaagatgtagatgctcacgtacatattccggtggatgtttctgtttgggactgaagggataaccctcctgcagccgtccttcagctggggaaagaaggcaaagctttaaaagatcgcttcatcttgttatcaaacatacttagttacccaacatttccacctgattcgcatgcaactcgaagctgccatttggagccacttgaattttaccgacagctgcaatgacgcttcccggagccaagtgctggttttccggagtccggggcacgaccacctggaacctactgctcgtggaaccatcattgatgtccagaaatgtgttgttcttcaaccggcgaacgtttttgatccatcccttttcaaacgtgcgaattgtaaatgaacagagagttgaatttggtattcatggagcccacctgtatggccaaagagtcgcctggcttattagtctttaatatttgagctatccgtccggatttgctgtaaaatcgtctcaagaataacatctttattcttattttgattctgttgcagtcagcgctgccagatcgttcgaattgctattgctgtgatatatttaaacggccgcatgacggtcacactaacaattcgtcactggcgcttgtaaagtaaaattccagttttattagttctttaatgaaatagcatttaaatatgtcatcattggacgcagacaccgtgctgctgagcattttgttcctcgtagtcatcgagaatgcgctagagatctatatatcgctgcgccaggtaagtttttccgttgtgccggcatgttctagccaggcgacatttggcgaggaattttatcaatgcgaatgataaatttagagtggcaaatgttaattggccgcctcatgtcttgcccccattaaatgatttaccctgccgtcgccaccaggtgaaagtgtaccaaactgcactgaaggtaccggccgaactgaagtcacacatgggcgaggatacgttccataaggcgcggaaatatggtctggaccaggagaaattcggcatcttcaaagctgttgttatggatgtggccctgctttgcatggagctgtacatcggactgatcgctgtgctctggcagctgtccgtccaggtggtggataaactgcaatgggactccaaaaacgagatcatcgtcagctgcgtttttgtgctcatatcgaatgtattgagcactttcaagggactgcccttcaagatctacaagatattcgtgctggaggagacgcatggctttaacaaacaaacagcgagattcttcgcctgggatcagctcaaaggcttcctagtcacccaggtcctcatgattcccatcacagcggctattatcttcatcgtgcaacgcggcggcgacaactttttcatatggctgtggatcttcacaggcgttatctcgctggttctactcactttgtatccgattttcattgctcccctgttcgacaagtatactccgctggagaagggtgctctgaggcaatcgattgaggatctggccgcatcgctcaagttcccgctcactaagcttttcgtggtggagggatccaagcgctcctcgcacagcaatgcctacttctatggcctctggaactcgaagaggatcgtgctattcgacacgctgctgctaaacaaaggtaaaccggacgactccgagttgtcagaggaagaaaagggaaagggttgcaccgacgaggaggtgctggctgttttgggacacgagctgggacactggaaactgggacacgttaccaagaacattattatcatgcaggttcatctctttctgatgttcctggtctttggaaatgtcttcaagtatccaccattctacgtggccatgggattccaacctggtactcggcccattctcgtcggtttgctaatcgtctttacctacgtactcgcgccatacaatgccctcatgaacttcgccatgacaattttgtcgcgacgattcgagtatcaggctgatgagttcgctttcaagttgggattcgctgagcagttgggtcaggccctcataaaactgaacgttgacaaccttggcttccccgtttacgattggctgtactcgacttggaaccactcacatccgactcttctccagcgcctgaatcgactcaaggagctcaaggaagagaagaaactgaactaagacagctcacttcacataagaccaaagtttacactattccctttgatttaacgtacacaaaataaagtaaggggacttaccccaacaagctatttaagattttgcaatgtggaaacgtgtatcttatgtgattcccaaaacatgtaagctagtagttaaaaatccgtcaccaatagattcaaaatgatttcctaacggagcttcaaaattaaggaaatatgactaacatgtcaagccgttgtcagaggaacccaacatgtctgcacatttctgggatgatccactagcaatactctacataatcatagctttcttggttctggacaatctatggggcgtatatctgatgctgcgggacgtaagtgatgattacatctttcgagtacattttggattaaattgctctttcagatacaagtggcctacaaaacgcaacaagtaccgaatgttatcagcccctatctaccacaggagctctacgacaagatgcgcgtctacaagattcacaagggctggttcaccattgtcaacaccctgctttcggcagttatattgggtattatggaactatacttcggcttctatgcctggctgtatggagtggctggaaagtgcgccttgtccaagtggatggagcatgaggcttgcgtatccgtgatctttgtgcttctcctgagcgtgtatttttggcttaaaagcgtaccggccatgatctacgagagctgttgcatcaagagcttgcaacccaggccaaaaccaccgtggtggtcccgcatctgtcactttgtcgttgacctggttgtgggagcgatgattaccaccttggtggtggtcgccctcgtgtacatgtttatcggcttggggccatatgctcccctgggcttgtaccttcaatcgctgatcctgacaatgatcgtactcctcttgattccatttatgatccatccatttgtgggccaaagtgtacccctggaaaactcaaacttgcgcacccaactggagtaccttacgcgacaagtcggctttcccatgagtcaggtgcgcatcatccgggtgcatgaccctaacacgggaagtaatgcctttttctacggatgctgctgcctgaaaag

SEQ ID NO: 19217 - DNA, 1532 bp, DROSOPHILA
gtcactggcgcttgtaaagtaaaattccagttttattagttctttaatgaaatagcatttaaatatgtcatcattggacgcagacaccgtgctgctgagcattttgttcctcgtagtcatcgagaatgcgctagagatctatatatcgctgcgccaggtgaaagtgtaccaaactgcactgaaggtaccggccgaactgaagtcacacatgggcgaggatacgttccataaggcgcggaaatatggtctggaccaggagaaattcggcatcttcaaagctgttgttatggatgtggccctgctttgcatggagctgtacatcggactgatcgctgtgctctggcagctgtccgtccaggtggtggataaactgcaatgggactccaaaaacgagatcatcgtcagctgcgtttttgtgctcatatcgaatgtattgagcactttcaagggactgcccttcaagatctacaagatattcgtgctggaggagacgcatggctttaacaaacaaacagcgagattcttcgcctgggatcagctcaaaggcttcctagtcacccaggtcctcatgattcccatcacagcggctattatcttcatcgtgcaacgcggcggcgacaactttttcatatggctgtggatcttcacaggcgttatctcgctggttctactcactttgtatccgattttcattgctcccctgttcgacaagtatactccgctggagaagggtgctctgaggcaatcgattgaggatctggccgcatcgctcaagttcccgctcactaagcttttcgtggtggagggatccaagcgctcctcgcacagcaatgcctacttctatggcctctggaactcgaagaggatcgtgctattcgacacgctgctgctaaacaaaggtaaaccggacgactccgagttgtcagaggaagaaaagggaaagggttgcaccgacgaggaggtgctggctgttttgggacacgagctgggacactggaaactgggacacgttaccaagaacattattatcatgcaggttcatctctttctgatgttcctggtctttggaaatgtcttcaagtatccaccattctacgtggccatgggattccaacctggtactcggcccattctcgtcggtttgctaatcgtctttacctacgtactcgcgccatacaatgccctcatgaacttcgccatgacaattttgtcgcgacgattcgagtatcaggctgatgagttcgctttcaagttgggattcgctgagcagttgggtcaggccctcataaaactgaacgttgacaaccttggcttccccgtttacgattggctgtactcgacttggaaccactcacatccgactcttctccagcgcctgaatcgactcaaggagctcaaggaagagaagaaactgaactaagacagctcacttcacataagaccaaagtttacactattccctttgatttaacgtacacaaaataaagtaaggggacttaccccaacaagctatttaagattttgcaatgtgg

SEQ ID NO: 19218 - protein, 451 aa, DROSOPHILA
MSSLDADTVLLSILFLVVIENALEIYISLRQVKVYQTALKVPAELKSHMGEDTFHKARKYGLDQEKFGIFKAVVMDVALLCMELYIGLIAVLWQLSVQVVDKLQWDSKNEIIVSCVFVLISNVLSTFKGLPFKIYKIFVLEETHGFNKQTARFFAWDQLKGFLVTQVLMIPITAAIIFIVQRGGDNFFIWLWIFTGVISLVLLTLYPIFIAPLFDKYTPLEKGALRQSIEDLAASLKFPLTKLFVVEGSKRSSHSNAYFYGLWNSKRIVLFDTLLLNKGKPDDSELSEEEKGKGCTDEEVLAVLGHELGHWKLGHVTKNIIIMQVHLFLMFLVFGNVFKYPPFYVAMGFQPGTRPILVGLLIVFTYVLAPYNALMNFAMTILSRRFEYQADEFAFKLGFAEQLGQALIKLNVDNLGFPVYDWLYSTWNHSHPTLLQRLNRLKELKEEKKLN

SEQ ID NO: 19219 - DNA, 2616 bp, DROSOPHILA
atttaatgcagaaacagcattttttcaccattttacaatttttatctagacaactccataaactgattagaaaagcagagctactgtcagagaaccacagtttatattacaactagtactgttaaaaaaaaaaaaaaaaaaaaaacgtaagacatgggaacaaaccgttcttatagagtttgccaaataatagaagctacgtatctgttacttatctattaaatacgtattatcatgacatattgtgagcgaattgcgaatattccagtcgcattggtttcagtgcattatgactttcatttcgagttgggggtttttaagctaaaaagcacattgtgtgcttatactactcgaatatcacttgggactgccagcgttaaaataagtagataatttaccgaaataatgcttgttgattctacatgtcagaaatgaatttaattttcattatttcacatttggttacttcttgttcgcgggttagtaacctctttatgaagttggcgccccataaataccttagtgtagatcatggaacccaatgaccgtccctggccgaccaatgcaatgtgcgagttacataataaattacaagtgaacatcgcaatcgagcattaaggcgaatgcttttggcaaatattggccgaaaaggggccgggaagacccaaaaacagaacgtgacgacgacgggcccctccctttgatctggtttgcctgtgcagttttcagtttcgttttcatcagccgaatttcggatacgaacccgaatcggaaacggaatctatgtccacactgggcatcgaaaacgaaatcgaaatgggcacagtgcgccagctaatttgtatgcatcgcgcattgctggcggggattgaagagctgcgcgtaacgcgattgggaagccatcggaaatattatgcaagggcgggggagctacgcattgctgaggtggcggattcatataaaacactcgattgacctgcagcagtagcttcattcgcagccgaaccatcgacatcagcatgcagacgcagtgtatcctccttctcttggccgccagtctggccatatgtgtggcgcgtccggaaccacctagatcgcgttacggaccgccgccaccgccggctccccaaaaggaatacggtcctccggccccggcagcacagcctctacccgtttacggaccaccagccgccttctacggaccaccagccgcctcggaggcgctcgtgaccaagaacgtgtacgtgcatgtgccgccagaggagccagagttctatccggcctcgtcgcccatccagacggccgttcccaagaagcactacaagatcatcttcatcaaggcgcccaaccctccgacccctgtgcgccaggtgctccctcctccggtccaggatgagcacaagacccttgtgtatgttctggtcaagaagcccgaggagcagcagcccgtcatcctgcccgctccagagcccacagagcccagcaagccagaggtctacttcatcaagtataagcagcagcaggccaagccggccacccagtacggcccaccaccgtccgccccatccgaggagtacggagcaccacctgccccccgcaccgtcgagcagttctagtttgtagtgtcgtctaggtctacagcccatgaatgtaaatattatttatgatcgctgccattaaagagagtttagagaaagcaaaatcagccggatcttaaagtccttgggatattgatgaaaaaattattatagcggttacagtatttcatattactaccttgaagtcatgagcgctccattcgttgcggatccagaaatcttgagatacgatcatcaatcagtgcatcttaacaaaggcactcgatattttttttatttaccaggagcacgcattgaatacaaatgaggttactgcgcaagttattgggtaccgataattgggaaagcaataatttatattgctcaattatgcattactcgttattaacgtcgaatacaatattcaactttcaatttgtttatttggttacttaggtcaagattgcaaaagcgcattgaacaatggattacaacatggatttcccttaaaattgttaaaaatgtatgtaaagcgttaaaaatatttatcattattgcaagatgttgcagaaaaagaaagtaaaaattgaccggaaattgaagatattatggttagataatttccaaatatactatatgtttgccaaaaaaggttataaattactttattttatatccaaaatgatagaacattgaaagaataaattttataaggaccaatatttaacaatatactgtaaaatttacaagctcacgcgtcctttaagcgatcataataggagtagaccaccagccaaaagtacaagcctagaactggaaaaggatttggccaagttgaacattgtgccgaaatattgaatgcaacttacgggattgaagaatatcgaaaactagatattcattcatgatgccctctgtggctacaaacacgccctcggcaactaaaatgaagaaccgcaggcaggaaactgagaggtaaggcaacagaaaatatctcaggccctgtaattagacagctttatattgtccaccaaccaaa

SEQ ID NO: 19220 - DNA, 616 bp, DROSOPHILA
ccgaaccatcgacatcagcatgcagacgcagtgtatcctccttctcttggccgccagtctggccatatgtgtggcgcgtccggaaccacctagatcgcgttacggaccgccgccaccgccggctccccaaaaggaatacggtcctccggccccggcagcacagcctctacccgtttacggaccaccagccgccttctacggaccaccagccgcctcggaggcgctcgtgaccaagaacgtgtacgtgcatgtgccgccagaggagccagagttctatccggcctcgtcgcccatccagacggccgttcccaagaagcactacaagatcatcttcatcaaggcgcccaaccctccgacccctgtgcgccaggtgctccctcctccggtccaggatgagcacaagacccttgtgtatgttctggtcaagaagcccgaggagcagcagcccgtcatcctgcccgctccagagcccacagagcccagcaagccagaggtctacttcatcaagtataagcagcagcaggccaagccggccacccagtacggcccaccaccgtccgccccatccgaggagtacggagcaccacctgccccccgcaccgtcgagcagttctag

SEQ ID NO: 19221 - protein, 198 aa, DROSOPHILA
MQTQCILLLLAASLAICVARPEPPRSRYGPPPPPAPQKEYGPPAPAAQPLPVYGPPAAFYGPPAASEALVTKNVYVHVPPEEPEFYPASSPIQTAVPKKHYKIIFIKAPNPPTPVRQVLPPPVQDEHKTLVYVLVKKPEEQQPVILPAPEPTEPSKPEVYFIKYKQQQAKPATQYGPPPSAPSEEYGAPPAPRTVEQF

SEQ ID NO: 19222 - DNA, 3094 bp, DROSOPHILA
atctggcgaaagtgtctcaactgctgcgccatgcaacatggaatcgcaatccgatccaccatcggccccatatcaaactccagacccagacccatacccaataccaaacccaaacccatacccagttggcttatcgatcgagctgcttgttctttgtgttgcccaaaattgtttatttactttgacacgttcagttggcgtctgcgattgctgtcgctgctgcggcggaaaaatcaaataaaactggcccgcgtatttccgtaaacgaggctgcaacttgccccttttggagtcttcgttggccatcgtctgctcgatcagttggtaatttgtttatggcaacagttgcctcgattagaagtcagcgttgacagcaccatgaatgattaagtcttggaagacatggcgacatgtgtggcagcagtttttgtgtgttttgagtttgtttgttgctcctcctcacccgtcgccgccgccgccgccgactcgtggcaattggtggcaacatgcggcgacatggcatagactgccacacatttccaccctaatgattctgaccctgaacgaatttgaagtggtttcggtcgcctgcccctcgaagacgtaaacacatcgatgcggtagccttcgcgtatttatttatgtaattgcaccaaatgagttatatgtacatagttcatttgttgctgcagtcgccttggtgggagatgcaaccccagaacaacttctcccgaatgagaaagatggggtatattcataaataaaacacgtcttatttagatcttacaatgaaatttaagggattctatttatacgatttttgtctggaaatatactttgaaataaaaagtagttaatcacaggcttgaagctgttacttgaaattattctttagaatttcaatctttgctttaagttaaaaaaaaagtaaaaagtatctagatagttcgatctaatgagctacaaatgaaaaggaagaaactgtagagactttcgtcacctaaagactccagatgacggtctctccggccatgtccacggtgctccaaccaagggcgttagccaccagttgctgcagctggcgcagaggaacaccagacttttccagatcggcggccagggagcggtactccttaagttgacgcagatcgcgcagcagccgccggaattccgagccgcggatcaggcgaatggcgctcgagagctccgagtcggaggagtagagttgctggtacatattcctcaaggcggtacggggcaaggcttcacggagatcctggagcaatccgcggacacccgggcgacggttgggcaacttaatggtcggtgggtcggaaatgtgtaggtcgaggaacacgcgcacgtactccgcgtagtaggtgggatccaatttaagtcgccgacagacatagtcatggagcagctggtgctgcttggtggccttcagcagctgcacttgcgttttgaagttatcgctgcggagcaacttgatcaactcttgaacctggggatcctcaacgccattcgccaggatgttcttcagtgtggcagcaggcaaaagtgggcgagctacgcggacgaggttggtgagtccacgctcagcattggtggggcactccttgttctccttgggctgcaggacgagatccaacgtgtctttgggcgtggagttctcggcagtggctgcggtgccaactggcttttcggtcacttcccgtgcgaatcgtacatgctcctgctcctcccaaacgggcagccagttgatcttgtgcgcattcatttcaatctcctcatcggtctccgcaactatgccgggtagctcttgagattcatctggaaagccatcgacaatgtaagtggtggtgctatcggagagctcctggaaatagatattatagtagggatgccattttaagtggaaagataacgaaaaatattttttaaaatcagactctacatatgtagacaattatttttatgttcaatgattgtgcaaggatcagtctcacctggggctccacgaccgattgtcctgcgaccaaaagcaggcagaaactgaatatgaccaccaatcgatgcattatgaaatcaatgcgaaactgtgcctcctttcgtcgttgttttctccttttatagcacgagaagcactttatctgctatttacccaattcatatttacttgaaaaatttcacaggcaaatactcgcattcagagcaaagaatcaacaagaacacaccgtacccaaaataaaaagtggaacgaccttgtcgggagctcatcaaagaaagctcatcaatctttcatattgtcccaccaccatggccgaattccatcgtaaaacacagtttgcagtggaataatcagtgttttttttttattgctaggatttgtgaagagccctcacattttatacgacttccttccagttcgattataaacatacccttttactctacaatttggggggtattcaaaaatcctaatagttttatcatttaaatatggtcaaatttaaaaatccacatcaacacttaaccactcactcaggcacatgggcgataaagctgaaatatccttggccattgtataagcaattgccatcaatcttatggcccgttgagatttcactaggcatcgaggccaacaagttagctgccccataaaatcccttatatcccataaaaatcttcaccaaaacacaatcaactgaaattttatgttaatcccaaaagccccggcaacctgaagcatcttcttgctcgattgggactcgctccgccaaaggatgaatattcatgtcttacgggaatgtggaggccggaatatccttggccgccgcccggggtcttgccaatttcgatacgcaaatgtttcgctcattgtcaacaacagcgtcgtgatgaagtggaggactctggggcgaaaaataaaagttattcgttccgacagaaagggggaagccccgcctaatgagtcccccatgaatgctgtgcaaatgatttttggggttacacttttaaattttccggaaacgcctcgagcagcatatgcggtcctcggaaaattcacttaaaaatccacttaaaattttgc

SEQ ID NO: 19223 - DNA, 964 bp, DROSOPHILA
cattgatttcataatgcatcgattggtggtcatattcagtttctgcctgcttttggtcgcaggacaatcggtcgtggagccccaggagctctccgatagcaccaccacttacattgtcgatggctttccagatgaatctcaagagctacccggcatagttgcggagaccgatgaggagattgaaatgaatgcgcacaagatcaactggctgcccgtttgggaggagcaggagcatgtacgattcgcacgggaagtgaccgaaaagccagttggcaccgcagccactgccgagaactccacgcccaaagacacgttggatctcgtcctgcagcccaaggagaacaaggagtgccccaccaatgctgagcgtggactcaccaacctcgtccgcgtagctcgcccacttttgcctgctgccacactgaagaacatcctggcgaatggcgttgaggatccccaggttcaagagttgatcaagttgctccgcagcgataacttcaaaacgcaagtgcagctgctgaaggccaccaagcagcaccagctgctccatgactatgtctgtcggcgacttaaattggatcccacctactacgcggagtacgtgcgcgtgttcctcgacctacacatttccgacccaccgaccattaagttgcccaaccgtcgcccgggtgtccgcggattgctccaggatctccgtgaagccttgccccgtaccgccttgaggaatatgtaccagcaactctactcctccgactcggagctctcgagcgccattcgcctgatccgcggctcggaattccggcggctgctgcgcgatctgcgtcaacttaaggagtaccgctccctggccgccgatctggaaaagtctggtgttcctctgcgccagctgcagcaactggtggctaacgcccttggttggagcaccgtggacatggccggagagaccgtcatctggagtctttag

SEQ ID NO: 19224 - protein, 316 aa, DROSOPHILA
MHRLVVIFSFCLLLVAGQSVVEPQELSDSTTTYIVDGFPDESQELPGIVAETDEEIEMNAHKINWLPVWEEQEHVRFAREVTEKPVGTAATAENSTPKDTLDLVLQPKENKECPTNAERGLTNLVRVARPLLPAATLKNILANGVEDPQVQELIKLLRSDNFKTQVQLLKATKQHQLLHDYVCRRLKLDPTYYAEYVRVFLDLHISDPPTIKLPNRRPGVRGLLQDLREALPRTALRNMYQQLYSSDSELSSAIRLIRGSEFRRLLRDLRQLKEYRSLAADLEKSGVPLRQLQQLVANALGWSTVDMAGETVIWSL

SEQ ID NO: 19225 - DNA, 3853 bp, DROSOPHILA
ggccgcctgttgccagaaccacctacttttatttctgaaaacagctgatgaatgaattacgaattgccttacgaattaaagtcacacaaatttaacaaatgtaactttacaatttctcatgctagattttcatatacctataatttttcaattttaatcaaagtaggtgtattcgttgctcttgattactgcacggcaaatttataatataaatccaaaactaaacgagaacactttgcattgctctatagagaagtgcgtagttcttccaggcttttggtcatgttcaacgccactccaagaaatataaagctgatggccacagatgagaaaacggcagccggtaggttcttgagtagccactgcaggatcatcgtgtagacggcaatggccatgagcagcatgcacatgtatggataggccagccatttaatgaactgcaaaatcacaggattcttaagaatatttcctcaattaattttgcttcaggttaaccttccaaactgcaataatcaacaggagcgaggataatgcatagagagccgatccggtggtccacacaatctttaccgcttcagagacacctgataaactggtcatgaaaagatagccggcagccacgcccgatatacaggatacgcaggccataatggagacgatcagcctgcaagtcggcaaaagtctcttatatgagaattcctgttcgctcatgtgtttgatgtattttaagtcacttaacacaatggattttgaatttttttatattgaaagcaaatcattttcataaaaaaattttaattgttgtttttgagttgttcaacagttttctttgtttgacgttgaatagttgaaaatgttcaaaactttcgcgcccaaataagcttgcttatcggtattattgataaagcggccatcgataagttctgcaatcgattgcgattagcttttggtatttcgattttttacgcaggttaatttgcgcacaagattcccagacgtgattaatgctgatttctggtctggactacacagcattgctggtataaggagtcgggaccagaggagtaagatttcgggaaggaatcccgtccggtagggactactagcattcgcaagtgacgtccagcaaccggaggacccccaactgtagaatccgcatcaccatcctaatcccaacaaaccaatgacatcttgagacctcaccagccatggatcccttcgtgttcttcatagtactggcatcgctttatggcgttctttactttttcgaccgcttcttcaaggtgtagtatatccagccaaagtacgtccagatacttaatgtaatcccttagagttgcatgcactacccgtacgatgccttcctcaagaacaccgggctgagtataaatttcatgagcctccactggcacacgagtgcctttaacaggaccctcctacgctggggatctgccggtaacagctgcacccggagagtaatgatcaccagctttaatgtaggagtcctggtcaccttttctctgctcccgatcggtctgatcctgctcattgccactatcttcagcagtggtgaacaagacagctcttcgtctgtatcctcgcccgttggagtccctgtgcagctggaaattctactgcccggcgtcaacttgccgttggaggagatcggatactacatcacaacccttgtgctctgcttggtggtgcacgagatgggacacgccctggccgctgtgatggaggatgtgcctgtcaccgggtttggaataaaggttagaatgatatagcgtactttacaacctaatacgcttactaattaggtaaatattaatatttcagttcatcttctgcctgccgttagcatacacggagctctcccacgaccacttaaacagtctacgttggttccgcaagctacgtgttctgtgcgctggaatctggcataattttgtgttcgctggcgtgtgctatctcttaatctcaacggtgggaatcactatgtcacctttgtacgcttacaaccaacacgtagtggtcactgaactaacaaggaaatccccgctgaggggagagcgcggcttgcaagtggacaatcaaataacccaagtaaacggctgcccagtaaacagcgaggagagttgggtgacatgcctgcagaactctctgaagctcaagccgggctactgtgtgagtgcggacttcgtgcagcttaacgacgaaagcagcgccatctcacatcatagcattgatggtcagctacagtgctgtgatgaactaaatccgaacgtaagctgcttcgaggtggtggaggacgcaaatggagatgtgccggtggagctgccgcagcatgtatgtctcaatgtgcgccgcactttggaggaggtctccgagcactgctcgtccggagtttgcaacgagggattctgcctacgaccgcttatacgaaatatcactgccataatgacgttcaagcgacagaattttcgcggagagaagctgccgccggtgatctatgtgggccatccatgggatgtcactcgaactgtggaggtatccgcctttgtgccgagatatagcttattaaaggcagcctggccggatgcctggctgctgctcctcaagtataacgtggtcttcagcataggattggcgttgatcaatgccattccctgctttggtttcgatggcgcccacattaccagcaccgtgatacacagcttcttggtgggcagagtggatcagcatgccaagagagatatcatctcgttgataatcaccagcgtgggttcccttctctttgcactggccctgcttaaggtggcctggttgagttttctgcgacccctgctttaagaactgaaatggaaaactgaaatggatcctgggagttcaactccctgcaaagacgctagactgctatttcaccttcacgaaacacacaaaaacacagcgaattgtagcacctcaaagattcgatagctttttgtcatagtccttagtcttaactcgtatttattttcgtacggttgtcgagctcaaaaataaaatcaaattaagctaagatttatgttcaagactgatcctatttgccctcgctcaccccgctcagttggaggctggtccttagttctgtgaggctgcgtctgccgtgctgaaggagcatcttgatggccacctcgtcactttgatggcgattcgtctggaagtcatgccgtgcccaggattttagctccagctggctgtttttgtcgggaacctgacgaatcgttcgaaatatttcccggtagagcttcagtacttcctggcgcagcataaactacaatgtaatcaattcattcaattattgttagttttattaatatatttggaaaaccataaaaatgatttaaacctgcttacctgcttcaaactaagtgatgcttttggtaacttggacatttctgcttaattgtttttttttctttatattttctagttgaattattattattagttattcttttagttttcaagttattctgtcattttaaaaattatttgtaattagtcaagaaaaatcataacaaaaacagctgatgatagtcagatgttagaattatagagaaggaccgattattattaagcttatactgaacaatcgatatattgataggcttatacaaatgcgctaaaatttaaaattcgaaaatttaataaaaataaataataatttatatacgtataatcgaagacttttttatagtgtctgaacttaatttgtatattcttaaaaataactttacctttcattattatagtttactaactttcaattagtttaattggttttcctacatgaaattaatgttgtttg

SEQ ID NO: 19226 - DNA, 1735 bp, DROSOPHILA
attaatgctgatttctggtctggactacacagcattgctggtataaggagtcgggaccagaggagtaagatttcgggaaggaatcccgtccggtagggactactagcattcgcaagtgacgtccagcaaccggaggacccccaactgtagaatccgcatcaccatcctaatcccaacaaaccaatgacatcttgagacctcaccagccatggatcccttcgtgttcttcatagtactggcatcgctttatggcgttctttactttttcgaccgcttcttcaagagttgcatgcactacccgtacgatgccttcctcaagaacaccgggctgagtataaatttcatgagcctccactggcacacgagtgcctttaacaggaccctcctacgctggggatctgccggtaacagctgcacccggagagtaatgatcaccagctttaatgtaggagtcctggtcaccttttctctgctcccgatcggtctgatcctgctcattgccactatcttcagcagtggtgaacaagacagctcttcgtctgtatcctcgcccgttggagtccctgtgcagctggaaattctactgcccggcgtcaacttgccgttggaggagatcggatactacatcacaacccttgtgctctgcttggtggtgcacgagatgggacacgccctggccgctgtgatggaggatgtgcctgtcaccgggtttggaataaagttcatcttctgcctgccgttagcatacacggagctctcccacgaccacttaaacagtctacgttggttccgcaagctacgtgttctgtgcgctggaatctggcataattttgtgttcgctggcgtgtgctatctcttaatctcaacggtgggaatcactatgtcacctttgtacgcttacaaccaacacgtagtggtcactgaactaacaaggaaatccccgctgaggggagagcgcggcttgcaagtggacaatcaaataacccaagtaaacggctgcccagtaaacagcgaggagagttgggtgacatgcctgcagaactctctgaagctcaagccgggctactgtgtgagtgcggacttcgtgcagcttaacgacgaaagcagcgccatctcacatcatagcattgatggtcagctacagtgctgtgatgaactaaatccgaacgtaagctgcttcgaggtggtggaggacgcaaatggagatgtgccggtggagctgccgcagcatgtatgtctcaatgtgcgccgcactttggaggaggtctccgagcactgctcgtccggagtttgcaacgagggattctgcctacgaccgcttatacgaaatatcactgccataatgacgttcaagcgacagaattttcgcggagagaagctgccgccggtgatctatgtgggccatccatgggatgtcactcgaactgtggaggtatccgcctttgtgccgagatatagcttattaaaggcagcctggccggatgcctggctgctgctcctcaagtataacgtggtcttcagcataggattggcgttgatcaatgccattccctgctttggtttcgatggcgcccacattaccagcaccgtgatacacagcttcttggtgggcagagtggatcagcatgccaagagagatatcatctcgttgataatcaccagcgtgggttcccttctctttgcactggccctgcttaaggtggcctggttgagttttctgcgacccctgctttaa

SEQ ID NO: 19227 - protein, 481 aa, DROSOPHILA
MHYPYDAFLKNTGLSINFMSLHWHTSAFNRTLLRWGSAGNSCTRRVMITSFNVGVLVTFSLLPIGLILLIATIFSSGEQDSSSSVSSPVGVPVQLEILLPGVNLPLEEIGYYITTLVLCLVVHEMGHALAAVMEDVPVTGFGIKFIFCLPLAYTELSHDHLNSLRWFRKLRVLCAGIWHNFVFAGVCYLLISTVGITMSPLYAYNQHVVVTELTRKSPLRGERGLQVDNQITQVNGCPVNSEESWVTCLQNSLKLKPGYCVSADFVQLNDESSAISHHSIDGQLQCCDELNPNVSCFEVVEDANGDVPVELPQHVCLNVRRTLEEVSEHCSSGVCNEGFCLRPLIRNITAIMTFKRQNFRGEKLPPVIYVGHPWDVTRTVEVSAFVPRYSLLKAAWPDAWLLLLKYNVVFSIGLALINAIPCFGFDGAHITSTVIHSFLVGRVDQHAKRDIISLIITSVGSLLFALALLKVAWLSFLRPLL

SEQ ID NO: 19228 - DNA, 2546 bp, DROSOPHILA
aggcatccgatgccaggttttcaacggagaagatgtcaaagggcagcgtgagaatcatatcgaaggagctcgcccggaagaggtaccgataggtcctgtaggcagacagcggcaccactccgaaccaggccaaaccgaccagggtgtaatgaagccagcagcgagcgccctccaaaacggcggacatcagtcccacaaggacatcctttatcggcaggactcgcggcatatccggagcatagatgggctgaaagctgaagctgtagctgcacagctcgcagtattccttgtgcgagtagcgcatccataacatcaggcagtcctgatgaatgtacttgatcgatccagtgcagatgcacgggtagaaaagaggcctatccggctgtgcctcgcatctgcacacgcggcaaatgtcgccctgcgacaggtcgtccatactgataactttttcccggatcctgggtcttcagtttgactgaattactaaagttccactggtcatttgcgaaattcgctggacaatttccgtaattgacccgagggtacgggggttttaagacgattatacccgccttttatgtgcgccaattaacctttcgatgattacggaccgtaatgcgattgtaacacttgaattttaaccgaaaagttgggatattattacgacaaaacaaaacaagactacttctcaaaaaaaggagagccaatgtgtgcacaccatgaaattgctgattattttctcaacggagatgccaactagttcgatagattgagagaacgaaatatcgttattcattttttaatcataaattgaaaattaaaaaagattacatagttatggttaataaatataagtttttaacttaaataatataaaacaaaattatcatgaccgggaagtaacagttaatgaaacagtgtgtgcacacatcattaggcaataccaatccatctggcaaccccaccacactcattgttgttgttctgattctcttgtcattattttgcaatcaatcgctgaactttttgcactgagaaattgtagaaaataagccatgcagcgacagattattaacattctgggacagacgacgcgtcgcctggctagcggccagcaaattcgcatgctgtcagtttctgcgccgcgacaggagatcttcaaagtccagagcgccgaggactttgacaagaaagtaaagaacagccagcagcccgtgattgtggacttcttcgcaacgtaatttttatattttcaatttgaggacatggcaaattaatgtttatattgtaatccaccagctggtgcaatccctgcaagctgctaaccccgcgcatcgagagtattgtgggcgaacaggccggttccatcaagctggccaaggtggacatagatgagcacagcgaactggctctggactacgatgtggccgccgtgcccgtgctagtggtgctgcagaacggcaaggaggtgcagcgcatggtgggactccaggacgaggacaaaatccgggcctgggttgccgccgccgtcaaacaggccaagtaataattgagaaatcccaaaaaaaaagtggaggttgacctcctcgcaaataaagctgagctttaggttaattcggactttcgaaataaatgtttatttacccgttgaaacgaaaagtactacgattacacactaaaaactaaatggaaaaccagcccggcgtgccgggtcgcttcttgttcctgtccagaaatctgcggaaaccggctttcgattcatccagcgacttttcctccttggcctgcttctcagccttttcggaaaagaagtcggggaagacaaaggactcctccctgggctggaatacacaaatatcattggaaatatccattgaatcaggggcttgtagtgggccataccaatgttacataagccagcttcacgtcgtcttttttggtgatgtagccgtaggtctgatccttcttggtctcgcccatggcaatccgagtacgcacatccaccaccggcagcttgtagatcttctccagatagttacgcacatcgtacttggtcatttccatggacaccgaaaaagtgaccacattgggtggctgttcctccgtgggtcggattagcttcatccagaagttgggaaggaaaacgcgaagctgcggattgccgcgctgatagatgggataccacctcgtggacatgatctagccaggatctaagattctaattcaagaatacaaaaattaaattaattgttgtgcgtttatgaaatgcactaaaaaaggccaaaggtttcgggcggacacaggcgtagcaagggggtcgcataagattgttaactaaaacttaacgtatatattaatttaagttattacgctgtaactataaaatattccacacttttaccacttttaaaaaataatatcactaaatctagattcctctcaaagaactgttacctacacccgtgtaaaagcacgtgggttgtccaacacttgttttaaacagctgattgtcaaccacaacaatttttaaattcggtccggctgaa

SEQ ID NO: 19229 - DNA, 484 bp, DROSOPHILA
tattttgcaatcaatcgctgaactttttgcactgagaaattgtagaaaataagccatgcagcgacagattattaacattctgggacagacgacgcgtcgcctggctagcggccagcaaattcgcatgctgtcagtttctgcgccgcgacaggagatcttcaaagtccagagcgccgaggactttgacaagaaagtaaagaacagccagcagcccgtgattgtggacttcttcgcaacctggtgcaatccctgcaagctgctaaccccgcgcatcgagagtattgtgggcgaacaggccggttccatcaagctggccaaggtggacatagatgagcacagcgaactggctctggactacgatgtggccgccgtgcccgtgctagtggtgctgcagaacggcaaggaggtgcagcgcatggtgggactccaggacgaggacaaaatccgggcctgggttgccgccgccgtcaaacaggccaagtaa

SEQ ID NO: 19230 - protein, 142 aa, DROSOPHILA
MQRQIINILGQTTRRLASGQQIRMLSVSAPRQEIFKVQSAEDFDKKVKNSQQPVIVDFFATWCNPCKLLTPRIESIVGEQAGSIKLAKVDIDEHSELALDYDVAAVPVLVVLQNGKEVQRMVGLQDEDKIRAWVAAAVKQAK

SEQ ID NO: 19231 - DNA, 3397 bp, DROSOPHILA
ttgtatccgattttcattgctcccctgttcgacaagtatactccgctggagaagggtgctctgaggcaatcgattgaggatctggccgcatcgctcaagttcccgctcactaagcttttcgtggtggagggatccaagcgctcctcgcacagcaatgcctacttctatggcctctggaactcgaagaggatcgtgctattcgacacgctgctgctaaacaaaggtaaaccggacgactccgagttgtcagaggaagaaaagggaaagggttgcaccgacgaggaggtgctggctgttttgggacacgagctgggacactggaaactgggacacgttaccaagaacattattatcatgcaggttcatctctttctgatgttcctggtctttggaaatgtcttcaagtatccaccattctacgtggccatgggattccaacctggtactcggcccattctcgtcggtttgctaatcgtctttacctacgtactcgcgccatacaatgccctcatgaacttcgccatgacaattttgtcgcgacgattcgagtatcaggctgatgagttcgctttcaagttgggattcgctgagcagttgggtcaggccctcataaaactgaacgttgacaaccttggcttccccgtttacgattggctgtactcgacttggaaccactcacatccgactcttctccagcgcctgaatcgactcaaggagctcaaggaagagaagaaactgaactaagacagctcacttcacataagaccaaagtttacactattccctttgatttaacgtacacaaaataaagtaaggggacttaccccaacaagctatttaagattttgcaatgtggaaacgtgtatcttatgtgattcccaaaacatgtaagctagtagttaaaaatccgtcaccaatagattcaaaatgatttcctaacggagcttcaaaattaaggaaatatgactaacatgtcaagccgttgtcagaggaacccaacatgtctgcacatttctgggatgatccactagcaatactctacataatcatagctttcttggttctggacaatctatggggcgtatatctgatgctgcgggacgtaagtgatgattacatctttcgagtacattttggattaaattgctctttcagatacaagtggcctacaaaacgcaacaagtaccgaatgttatcagcccctatctaccacaggagctctacgacaagatgcgcgtctacaagattcacaagggctggttcaccattgtcaacaccctgctttcggcagttatattgggtattatggaactatacttcggcttctatgcctggctgtatggagtggctggaaagtgcgccttgtccaagtggatggagcatgaggcttgcgtatccgtgatctttgtgcttctcctgagcgtgtatttttggcttaaaagcgtaccggccatgatctacgagagctgttgcatcaagagcttgcaacccaggccaaaaccaccgtggtggtcccgcatctgtcactttgtcgttgacctggttgtgggagcgatgattaccaccttggtggtggtcgccctcgtgtacatgtttatcggcttggggccatatgctcccctgggcttgtaccttcaatcgctgatcctgacaatgatcgtactcctcttgattccatttatgatccatccatttgtgggccaaagtgtacccctggaaaactcaaacttgcgcacccaactggagtaccttacgcgacaagtcggctttcccatgagtcaggtgcgcatcatccgggtgcatgaccctaacacgggaagtaatgcctttttctacggatgctgctgcctgaaaagaattgtgatcttcgatacattgctgctcaatagaggcaagtcagatctctcccacctgacggcagaggagctgggtaggggacttgcggatcctcaggtggttgctgtggtggcccacgaactgggtcactggaggaatggacatttttacaaagctatcatggcgttccaagtccatctcatactgacgatcctgctgttcgcgtttctgttttctcatgggcccatttaccaggcggtgggattccctcccggtctccagccgacagtcattggatgcttaataatcttcggctttgtactgactccatacatgacactggcgaacttcagtatgcttagcatgacgcgttgctttgagtaccaggcggataggtttgcctaccagctcggatatggaggagaacttcgacaagcactgctcaaactatatgcggataatctggcattccccgtttcggatccttgctactccagctggaatcatacgcatcccaccatgctggatcggttgagtcgtctggaagaatttcgacgataggcgatatattttttatcggtgtttctcaaacatagtagcttctgattgagttatccgtcttgggtaatatagatatatacaatattttacaataagtaaacattgtttgttgggggaacatgataagttttgatggcattctacgatacttggccgaaagtagatccaatcatagtgctggtggtgttatgtctgatcgtgttagttgaccggatatgggagatgatactcaccaagaggcaggtaagtagtggattggttgttccacccatgaagaactgatcgcggatttctttcaccagcaattggtgtgcctgaatgcgattatggtgccggaggagctgagaggaatcattccgccggagatttaccatcgggcccgcatctacgagctgcataaaacggagctacagatatggaagtacctcatcgacttgattattacgctctgtgagctgatattgggcttctatccattcctctggagcttgtctgcgaagactctacagaaaataacctcccaagagatctggataaccttgatctttgttttctacctgaccatttacatttgtataaggttcctgccggttctgatctatgacaagtgcctgctggagttgcgatatgggatgtcgggcaagtttccttggtacctctactgctgcattggagcaatgtccattctcctaagccagctcgtcctgttcccgttggcggcggccattgtgttcagcgtaaagttcattgggtactacttcttcctttggttctggctgttctgggctacgttcaccctgttgctggtattttttttgccctactgctgcattccgtgcattggacgacaggtggttttaccagagggcactgccctctatatggaggtgaagcgtgtttgcgatgtggttggcttccccatgaagagggtatttatcataaagacccggacaatgcagtatagtaatgcctacttttacgggagctgctgcctgaaaag

SEQ ID NO: 19232 - DNA, 1344 bp, DROSOPHILA
atgtctgcacatttctgggatgatccactagcaatactctacataatcatagctttcttggttctggacaatctatggggcgtatatctgatgctgcgggacatacaagtggcctacaaaacgcaacaagtaccgaatgttatcagcccctatctaccacaggagctctacgacaagatgcgcgtctacaagattcacaagggctggttcaccattgtcaacaccctgctttcggcagttatattgggtattatggaactatacttcggcttctatgcctggctgtatggagtggctggaaagtgcgccttgtccaagtggatggagcatgaggcttgcgtatccgtgatctttgtgcttctcctgagcgtgtatttttggcttaaaagcgtaccggccatgatctacgagagctgttgcatcaagagcttgcaacccaggccaaaaccaccgtggtggtcccgcatctgtcactttgtcgttgacctggttgtgggagcgatgattaccaccttggtggtggtcgccctcgtgtacatgtttatcggcttggggccatatgctcccctgggcttgtaccttcaatcgctgatcctgacaatgatcgtactcctcttgattccatttatgatccatccatttgtgggccaaagtgtacccctggaaaactcaaacttgcgcacccaactggagtaccttacgcgacaagtcggctttcccatgagtcaggtgcgcatcatccgggtgcatgaccctaacacgggaagtaatgcctttttctacggatgctgctgcctgaaaagaattgtgatcttcgatacattgctgctcaatagaggcaagtcagatctctcccacctgacggcagaggagctgggtaggggacttgcggatcctcaggtggttgctgtggtggcccacgaactgggtcactggaggaatggacatttttacaaagctatcatggcgttccaagtccatctcatactgacgatcctgctgttcgcgtttctgttttctcatgggcccatttaccaggcggtgggattccctcccggtctccagccgacagtcattggatgcttaataatcttcggctttgtactgactccatacatgacactggcgaacttcagtatgcttagcatgacgcgttgctttgagtaccaggcggataggtttgcctaccagctcggatatggaggagaacttcgacaagcactgctcaaactatatgcggataatctggcattccccgtttcggatccttgctactccagctggaatcatacgcatcccaccatgctggatcggttgagtcgtctggaagaatttcgacgatag

SEQ ID NO: 19233 - protein, 447 aa, DROSOPHILA
MSAHFWDDPLAILYIIIAFLVLDNLWGVYLMLRDIQVAYKTQQVPNVISPYLPQELYDKMRVYKIHKGWFTIVNTLLSAVILGIMELYFGFYAWLYGVAGKCALSKWMEHEACVSVIFVLLLSVYFWLKSVPAMIYESCCIKSLQPRPKPPWWSRICHFVVDLVVGAMITTLVVVALVYMFIGLGPYAPLGLYLQSLILTMIVLLLIPFMIHPFVGQSVPLENSNLRTQLEYLTRQVGFPMSQVRIIRVHDPNTGSNAFFYGCCCLKRIVIFDTLLLNRGKSDLSHLTAEELGRGLADPQVVAVVAHELGHWRNGHFYKAIMAFQVHLILTILLFAFLFSHGPIYQAVGFPPGLQPTVIGCLIIFGFVLTPYMTLANFSMLSMTRCFEYQADRFAYQLGYGGELRQALLKLYADNLAFPVSDPCYSSWNHTHPTMLDRLSRLEEFRR

SEQ ID NO: 19234 - DNA, 14171 bp, DROSOPHILA
tttaaattaggtggaaatatcctacaaattatactttacgtatttcatatactttgaaatttatttaagtttaattttggcatagaatttagccaatcggatgatcaatatcgatttaatttatcctcggcacgccattttcgacctttctggctgtcaaaatgcattttctcctcgcgttacttaagatgctccccattaatttcccacagccgtttctctgatctctgaccaagtgcgtttgtctccgccggcgcacaagtattttgtgcaaattaaacaaaaattgaacataacataaatatccgatgcagaacaaaacgaaggcaggtgaagcggtgagatttatttttaactgcccaatgcgcctacatatagcaaattatgcaaaagaatctcgcgctgcagccgagtgcaatttcgttttcgttttcatctgccagagatgccagcgtctgcgccgctctcttgagtcattgcactgcgagaaaatacgcgtaagttattgaaacttttttgggtaaggaaagatcatcaatttgatattgcattttttttaaagtatatttgttaattgaaaataagataaatatgacacgctgtttaattaaacttttcttaaaccatcaaatcatattaaaaaaccgtatgaattctgaaattatcactgcaaaatgaataaatattctacttcaaattttgctagcctgtacaaacttagaaaaaactcgtagcagatctacggttatctaagttattgaaagtatataatttttcgctgtgcggctgatgttttggtcccattgggggtgggcgctacgtcatcacatcagacccacagctgcgccacaacgatgacgaaggaacgaaggcaacaacaccgagccagcgaggcagcgactcagcagcagagaagcagcaaaagcagcaaaagcagcagagaagcagcaaaagcaagtaaaatccacatgccaccggacggctggctcaaatgttcatgaaacgcgaacgcgtgtggacgtggatgtgcgcggtaccgcttcgaaaaaaaaatttgtgaacgcgaatcggtatattcggtttggtcggattaaacggttgattcgaaacgaattctcgggccgtgcatgtgtgaaagtgaaaactgaagaaagaggaatgaaaatgagcacggtgcatgagtttccttgacgttcgttgcttcggaaaatccatcgcaagaaaactgaaaagagcgtgcgaaagcagaaaggccaattgtgagtgagagctgaaaagcacacacgccaaaaatataatgttgaaaatatctggctatttttggaatatatatttgtttcttccacacgatgcattgaaaaatttgtacctcaagtgaagcaatacacaaaaaacctcgagaaatgataatgcttaaaaaatacgagatatacgctttaacttgacttgcattttattttcgaaaagctttcgaaagcaaaacaaagccatcagaaaaataagagtacgaaaaaaagaagaacgaaatgaatccaaggcaaaagaacagccagagtgaaatgtttttaatgggcaatcaaaaataatgaaatcgggtagatatatctggcagaacgaggcaagaacgcatttaagatgaacaatggagatacatttaatgaaatttaagggactcaatgagggattgaattcagatctatagctaaaacatttccggaaatacccattgctcaactttggatacacaaaatattcccttcagattcggaatagtttccttctaggtgcacagctgaaaatgaaatatagttctgtttacattcttaaactaaactttaaagctatgcaaactcgtaatggaaatgtgctttgaaatcccgccgcttgaaaccacatcaatatagcgatatatttttttctgtgtaactacattttcgtcttttctgtctgatttcctccgaaagaacaacaaatacaggccacactatgcatatatccgctgtgttcttgttgtgctgcctttatattttgtatttgaatttgtagtcttgtgtcatgcgataggtggtaacgtttcgttccgaacggggtattgaattacaagacaccaaagtgcgcgccaagcgaacacgctcgctcacagatactcacacacacgcacacacacgataaacacacatgcagagcgaggtgtataaatatatcgcagtccgattctgccgcatgcgtatccaatggatgcgaatcggcctgcaaagcggagggcacaaggaaatatccgaaaaagaactatgaatcgctgtaattaattgttttgggggcagagcagttggatccattgattgatggagccaaagttcatttgtttacagtggcaagatcaatgactcggcgccctattaatatgtacatccccctcaaaaaaaaaaaaagaaaaccaaaaaagtatctggctggctccactctgacccctggtctctcttgtgttccagtttcacccgaaagttatataccgcatccagttgaaatgtccgccaagacgtcgccatcgtccacttctcgggatgccaacgtgggatcctcgagtgcgattcccgttcagatcaaaaaagaactgcccagcgatgagataaaggtgagtgaatgtatgaatgaacactttgagatactttcttgccgtctaattaattgcccctgtctgcgcattatttcgccgcgtattcaataacaaggatgctgacaaagtttgcgttggatttaaaaataagaacgttcttctttgctcttggcaaaacatttggcttctatagctgcgagctgcatatacgcagaataattattatttgtttgtttccgagtgtttggatgggggaaaggtgaataacacccactcgccagttgcgcgtctatatcttggagtctatatcttagagtggctttgaagtggatctcgtatctcgtagttgccatggaaatatctataaaaatgtgtgctcatgatatacgtaactacctttgccgcagaacacatatttccatttcatccttagcgaacgcaaaaatatttagtaaactgcatgttgctcatacatagtttccacttacaagctcgaatccagcgattccagccaaagagcacttccaactaagcgctgaaatcaaagaatccgactccaaatccctcggccagagaaccaaaaatcgtttcggctttcagttcagcgcagttcagtgcagttcagttcgtctcagttgactgttgggctatttggaaatgtttatgcaagagccaatgataatgcaacgccccgctaccgcccccgctcaaaagtgctacattaaattccatgcaactttgtatctgaatccgcgtccggaatttgaaagaggagttgctagcggtcgctgcagctgaggagactcggattcagattcagattcggattcggattccgattgccattgtgattacgcgattacgggacgagctcgtaagtcgagcgggagttggcggtaattttatattgataagtttttataatcattttaacgagtgagcgggtccgattccgattcggaatccatccgctcctctctgtccgcagtcccttacgcttctgctccatccggcaaatgagcgaaattaatttaatgccacagacagggacagagagtcgcagagcaacatttttgcagcacgtgtaacccgatcggcgaatggaaatcataccccccgacttgcagttgggcgcaatgatacttattgtcggtcatgaggggggagggaaaccaacagcaaacacaaaaacaaagccgagccaaaattattataatgaatgggctgctctgaggaggggcatgggaactgggtatccgctgggaactgccaaccgagcttggcgactgtttttctaggtaaatgtgcgacatttgcacggatatctatatgtggctactcatgcctgtataatgatattcataatggaattgcaaagcttaggctttagctgcatgctgacacaatcaattataagatagtataaatctgatgctagtagttataccaaacttacttactacagatatgcaaagtaatataacaaatatctcttaaaatccgatagatagatagatagtttcttagatatttttgtaattcatttccataataggagctaccattgcgtacataacttaatcatctctttaggtgttcggctgaatttcgccttcaatccgggctctcaatgtcgcccaatccccgctttgagtgtgcaacaacactttgctaactgaaaatatcaattaaaaatattgtaattcataccttttattttcgcttacctcacccagtttgggtatcgctttcggtattttggcctctccgccagctcctggccataattataagctgcatttgctgcaaagacagcagccaggacaaatttttatatttaatggcccaaaggcaaaagcacacagcgtaattaagcaacaacaatatatcggttgagatgatggttgagggaatagaggataagggcgatggggaggggatgggaggaatatgagcgcgcttcatgggtgcaacttgataggacaatggtaaggcgatatccttcaaggtttccgctttgcgaccgatgtcaggccaaagccgaagctgggcactatatatgtacataggtatatgtgtatgtctgtagctatgtatctgcagaaaaggatgtctttgacacacactaggcattatcctgtgaagtaggaagagtgacaaagtggggaaggtggccattgatggctgaaatcaataactctttgtaggcggcaaatatggtaaacaaagtgggtattttgggcaaatattacttaaatatacaattaactccttaaatagcaaatgattaaagaaatgctggagtgacatttctacattttctttagggaactttttcaaacctcattagctgctgcataaagtgatgaattctgttctataatttgtgattaaatgcattgtcgcctcgcctctgttgcacacacaatattcatcacctacaaatcgcctccgagttaagtgttggcagactccaagcaacattctatgcacataacccagggttccggcagcatggattgggttacactcacacaaccgggtgtgtggggctgtggatcggatccagatgactatgacgatgacacaatgacaggcggccactcaggagcacggacggagtggaggcggagtgaaggcggcttggggcgacggtggcaactgggctcaaatgttgccgcagcagcagaactttaataacagcgacgcagattgagttacaaacaaaatagaatatgataaattctacacaaaacaccaggaaccagagctcaaaggtgccaggagatgggcgtttcgggggttcacactgtagtgcactggtaacgtgaggcaccctgtgctgctgcgctgctgtgccgcctgccttcctgccacatgcaacacgccagcgtccgcccattcactcccttccaccgccacgcagcatcagcagcagcagctcgaattaaaatagcgttaaattaattcgagccactgctgatggcccagcattacgaaagcgaacccgagtggccaagaggccatgcggatggctggatggttgggtgggtggatgagtgggcggctcaaagcccttaacactgccaggtggcaggtggtggttcgagctgcagcaggtgatgggatcgtttctcggcaggagcagctatcaagttttctaaccatttaatatattcttattcggccaaaacgaaattcaatcgccatggatgaaacttttacgacacgcccccaagataaactgtaaaagctgtccactttcctgattttccgatgattgccataattgccatagagccataaatagtgtcagttgcattgttttttgttgattgattcattggcattttgaatgcaaattgaaacgcagcaaggcaagtgatatctagatatttatatatttttttaaaagagtgctctatgtgacctaccataaacattaataccaaaccctttggtttccgatttcgtattcggtgccttgagttcgcatatatcatattatatatacatatattacacatatatgtatatatctccgtctgagcagtgagccacccatatctggtgtacattaaaatgaaatggaatatttcgatgccgaagggaaggggtggaacggggcacggcgatgggaactgaaaattcgcagagcaatagcaacaaacaacttggcaaaggccaagtatgtcatgtaagaattcaaaagaaggacgcgcgtcattcaatcctgagctatcgatattcgattacagcaaactcaaaaccgaccgactttgtgctcgcctcgcaaacacccaatcccaattccaaacccaagcccaaacccaaaacccaagcacatgtacaaacgtgtgtctgagaaaactagcgtaattctagaatttgttgccattgggtgttatttccactggccgaccatatatacacttacgtgccggctggtatatactttttcggcggggtggtggtgttcgaggggcctgggattggattcggattcggattcggatacggattcggtccggacagcagttctactgcagcttggttttagttcgccttagtctcagttcagtttactgggttcagggtgagttattataagcgtattgggttgccactaccgctccacccgctccgcctggcccactagcccatcaacccaccatccctctagctccccatcccccagtgagccagtgagccagtcagtctgggtctcgttgctctggcactgcgagcattgccgcgccgggtactttacattattctattaggtttcctcgccggtaacctaagacgtgttttaatgcgagccactcgcataacaggcggctccactgcagcgggataagccccttggacgacatcggatgggcctggatgtaggtcaggaaaccgaaatccattaagaccgatagttgggagtacacttaatcaggtaaaggaggagatatatcgactttggatcaccaatttaaataccagaaacttaaaccgagatctctagcaagatcttactatcttactagttactcagttttatatttcgtatgaaatctaagatcaaccactattttttcccagtgcactcaatgccagacaaagaacttgactatcggattggagttcccagttcccgcttctcacccgtaaagccggttcattacgattcataataaaaacgaaaatatgatatgtttttgtaagttgagattttgcaaaatgaaggagaacacaacaaacttgaagagtcagaaacagaatgagtgttgcaaatatatccactggattcttgggcaataattacgaaaaaaattcaaatgaaaagcgagccaaaaatccgacagatctgattgctgggcgggaatgggattggttttggaggcaaaggaaattcgattggaaatataaaggtagacgtgtgtgtttgtatctttcttaatacaaacgtattcgtacacaagtatttctgggcgggcagagcgaatcagatcccaactccatcaagaacaacaggcggcataaaatttcagtttttaattaattgatttttattcgcatttcggtgtacagtttcaagcatgggcgagagttttaatgtcgctgacggaaagggcactgaaaaaaaatgtgtgtcaattagcagaaatcaaatataagcagaatatggttaccaaaaattatataagggggttataaatgttatgcataatgcatatagtttgtctacaatgtaaaaagagctttgctcagtggatcacaatttttgccagtgtatgtccccactttcccgcccgccacaccggcccaccccctcgaacccgttgagccactgtcaggcagcaaagagctgaaaaactgaacgaacgcacaaatcagaaattaaaaaccgaacataaattaacagacaaatgatactaaaaaccgtgctgccgaaagagacggcgcatgcgacaatgagcgagacggaggtagcggagatggagtcgaatgtatctccgttcctccggttacgcttactgcaagatgctgaacttgagccgagcgtgcgtcgccatagccccccccccccccctcaccgcatcccacccgctcctatcagccagcccatgccattccatcccacctggacgaggtcgcacctgaggcgtgtaattgatatgctcggctcgggcagccggctccgtagattttatcgtgcgaattcttgatactcttttcgcttttcgcagcgacagacagcgtaaaacctgaatgcgaatgcgaatgcgattgtcaccgatacgcgaattgctggaaaaataaccaagcgagcgtgtgagcgccgttcatggagtgcgaaaggaaaaggtgttgcgcgccgcgaaagggaccgcttgctgcggtgggaaaaagagatggctacagggggccagaggggatccgagatagacggcaacttattagacgacttgcatttgtcagcaagttggcagcaacgcttaatttgaagagtatcgcatgacgccggggatatccagtttgtctggagcttgtgatagatgcaatggaggcgatgaatcatctggccagcattggccaattgtggttgtggctcttttgcgcggaccaattttcccctgaaactcggcattggacaccacttgcggccacatggcgtatgggcaatttggcattccgcagaagcagataacagaaaattaaaaccaaaaagttacagagcgaaaacgcaaagcagttaaggtggctaatttagatgattgactaaaaaataaaaaaatgattcttttttgttagtattttaaaaaacggctaagattcaatgaaatatgactgaaaattcctactctcttttgatttaagctttcgaccagatatttgtagagcccctggagcaaaaggactttgctcggtgaaaaccacgtcgaatatgagaatttcaatgtaacccgatccccagtttgtgcacctctcacaggcttgtgtgaaatttttatgtgcagcacaggcaggtccagaatgatacacacatgggattcgaatggaaatgagaatgcaggagtcagtcaaaaaaaaaaaaaaaaaaaaaaaaaaaaaaaaggaacagcttcaaaagccgcaaatgctttctgcatcttcgactttagactgagcccctgcattttcggcttaaatttaaagcaatgaggcaggaggcactgtaaaacgacaaagaatgtccgaaggtattggatatcaatatcgaagcagggataatcaaaacagagggggtggggggatgcatgaccatacctcctcccgaagcaagtgtatgcaaatgccacccactctggccaaccaaaaaagccaactagtccggccctctggccgtaatgaagatctctgccacccgtttgtgcactgatatgtttgtggagaatccggagtgtgtgtgtgtgtgtgtgtgtgtgaggtgtctgatgcgtgggtgattcccccagggttatcgattacactgcaactttccagcctcggggagagcgctttgatacggttagataagaactcgcataattggacattgggttcagaggtcaacgggcaaaggtaatcaataattagtgaaagttgccttcactcggaatggattgcacccctgatcactctacccctcaagcatttaaggtccagtagtcggcctcaaagtttcacctgcctgactctttgaataaaatttcagctgctctttaatggcaatgcactacaacaaaaattaaattattttaaagtacatatattatataaatatggtgaaaaaaacatttaattaaataagaatatattccgaaactttttggagtgaactactgatgcgatctgcctgcatatcgggttacccaaaggccatgtaagtgggattcagggtaccgatgtcagcaattccctgtttgccaccactcatctttctctttctgtccgtcccttccaggaattcgcgcacaacaccatgaacgagctgctcggctggtatggattcgagggtgtggatgtggatcgtctcgacctgaccgccaaaacgtcgcgcctgctgcaaagtgccgccgccgcagctgtggccaatcagcagagccaccagcttcaccagttggagccgcatccgaatctggagcggaagcggaccagtctgcttcgcagtagcagtcgcagttccttggcagcggcctaccacaacaacaacaacaacaataataacaacaacaacggcagcagcagcaagaacaacggaggagtcggcggcgtaggcgttgggagtggtcggaagagcgggttgatgaactgcagcagcaccaccaccacgccatcggaccacgacacgcgaagctcacgggaggaggattccaagagtccgcactccatcgggaagccagcgggagctgcgcacacggatgagaaaataggtgcgtatgtgtgccaaagaagttaccaggataaaatataaatgattaatgtacaaatattttcatgaaaagttactttagtcgtagcttagagaatgcaaaaactagaagaaaaacattacgataaaaattgcttatttaaaagaaattatatattgaggagatgcaataagtgaaccaagctgatagcacagcttacatggtattcccaatggatactcccacccgggcatagccaaaaattgacagcaaaagtcaaaatcacaaatttcgtaatcgacccaaggacgctcccttagccacgacgcgctcatcatccatccgcctgtgcgttttgtttttttttgtttttttttgtgaagggaactcgataacttcgcctgctgtgctccggaccgttgcagtccctctcaatccccgcctgcatttggagctcagacaggctcgaaactgtgctaacttttcatcaactcagtccggagtttgccgatgctgcgttatcgaataacagattcattaagacccaaatatggtttacacatttttggctagcgtcgagcaggaagaagcgggccatattaggaataggatacttggagctcagtttgtacggatgcttgcggaaatcaaatttgcagttcggcaggaatcgatttcctttttaatagaacatttttgcctcccaaatgtgctttgtttgattcgattcattacttcttccagctagccctaggaattttcgaataaagaaaatatttcggaataaattataattttaaataatatcttaagagatttccttatacttttctttaagttctttagacttataaagttatttatttttgtatcttcaacagacttcagcaattgctgctggtgccatcgaccgattgcggagaatgcgccggactacctgaccagctgcgacggaccgcgctactgctccgaatcctgcttcgcccagagccggagggcatccttcaagaaggccaagacctgcgactggtgcaagcatgtgcgccacgcggttagctacgtggactttcaggacggcgcctcccagctacagttctgctcggagaagtgcctcaaccagtacaagatgcagatcttctgccacgaaacccaggcgcacctggacatgcatccgcacctgcgggatcaggccatggatgcgggcagcgaggctgggctgataacgccggatctgtggcttcgaaactgcaggagtcgctcggcctcgcccgcctccacgctctcggtgtctccgggtccgccgcctgctccggctgtcagtcgctgtccggactcaccgcctagtcatcatcccagcaaacctttgatctcagtggcacccgtctcgaagttgctggcccagaagagtccgggtcccggacccggagcccctccaccaccgccaccgcctgtccagcggcatttggcgggaaagttgggtcgccgcaagcgccgaggtatttcctcttccttgggctcggaaactgtggccagtctgctgcagaaacagcagcagcaacaggcaccgcagcaacatcaggcacctcccacgctaacggctgactttggtggatccagcgtaccactgcctccgctctcgcccatgcccagcatgcaggaggcaccacaacagcagcaggctcctcaggtgccaccaacacaagccctgccacggggaccaacagccatcccggccagctacttcgcgacgccttcgaatggtgtgcccatgggacatccgtttgcggggcgcccaccgccgcctccgcatcactttatgcatccacctccgcatggcatgatgcctcgtggatttggtccgcacttcgggccaccgcttccgcctcaaatgcccgagctagggtctctgttgggggctgtgccgccggtgaccgtgatggtgccctatcccatcatcattcccctgcccatacccatacccgttcctctgcctgtgatagatttttacaaggcacacctaactcccgaggagaggaagcgtttcgatgagcagcgggctgctccaaccagagcggaaaacgcagaagaacaggagcaaccacagccgctggactgcagcaaaagcagaagtgagctggaggaggagaaaccagatgtggagaaactaagtgagcctggccaggagctggacaacgatcaggaagaggatgaaaaggaatccataccaaagacaaatccagatggggacaccaacgcggcttcgccatcaatttcacaggaatcatcgtcttcaccacaacagacgcactgcatcgtcagggattctacgcagtccgaacccgaggcggacaaccagaagctgcccaagctgaagatcacacggctgcagaccaagcgaacactgattcaaaccaaagaggcggcggccgagtgtagtcgaccgctgcgcaagcgcaaaaggatcatcgactgcgatttccaaaaaatgggtcttaaggaaccggaaatggccaacgatggcgaacagagcaacggcagtagcaacaaggaggcggatgcggatccggaagcagagtgcaatatgagcggcagccacagcaacagtggtagtgctaaagctaaaaagtagacatagaccttaggatttaccccttaaaagtagtagaatgtatttatctatgtatgtgtgagtgtgtcagtgtgtttgtgtaagcggaaacggaaatggagtccagaggaggagaggaatgcagcaaaaggcacaaagtgcatgcggtactcagttttgattcttaataaactaaaatataacttattggataaaatgtgtttaattatttagtggatgtagtcctgactaatgcacttaagcaatgaaaagtatcctagatgctaaatattctttatatatatttttttatatactttaataagatacacttcaaaaaatattctttttcaagggtggtcaaagttcatctaagtaacaaatagctgcattgccaagccctttaattggcttcaaaaatattctaaacaaattcacaaaaaataactgaaccgaagcaattatcaaaaggttattacaaaatacatataaagtaaagctatttcaagaggatcgctaagccgttgcagtcagggtaatcagtgtctgttcctcattgtaacacttaagactaagtcatagttcagttgtagaggtcccacaatgatatctggccatccatgcccgctgctgccatgatgggagcatgccacatggccacctgttggctggagaaggccaagtccattacgccgccattcttgtgctgcgtaagcacggccagcggtcgcaggcttttccacgagaagatccgaatacgaccatcccagccggcactggcgaacaccttctgatcgggccgaatgcgaacgccattcactccaggattcttgatgcacagctccgagccgagctgcatttgcatcgatgagcgctgataactgaaactaatcaacttgtcggctgtaagaaaagaatagaactattatatcacgataatttgtttggacttaagctccaacttacttggaccacccacaatgccacgattcgtaactggatcgtagtccacagacgtagc

SEQ ID NO: 19235 - DNA, 2619 bp, DROSOPHILA
aaacgcgaacgcgtgtggacgtggatgtgcgcggtaccgcttcgaaaaaaaaatttgtgaacgcgaatcggtatattcggtttggtcggattaaacggttgattcgaaacgaattctcgggccgtgcatgtgtgaaagtgaaaactgaagaaagaggaatgaaaatgagcacggtgcatgagtttccttgacgttcgttgcttcggaaaatccatcgcaagaaaactgaaaagagcgtgcgaaagcagaaaggccaatttttcacccgaaagttatataccgcatccagttgaaatgtccgccaagacgtcgccatcgtccacttctcgggatgccaacgtgggatcctcgagtgcgattcccgttcagatcaaaaaagaactgcccagcgatgagataaaggaattcgcgcacaacaccatgaacgagctgctcggctggtatggattcgagggtgtggatgtggatcgtctcgacctgaccgccaaaacgtcgcgcctgctgcaaagtgccgccgccgcagctgtggccaatcagcagagccaccagcttcaccagttggagccgcatccgaatctggagcggaagcggaccagtctgcttcgcagtagcagtcgcagttccttggcagcggcctaccacaacaacaacaacaacaataataacaacaacaacggcagcagcagcaagaacaacggaggagtcggcggcgtaggcgttgggagtggtcggaagagcgggttgatgaactgcagcagcaccaccaccacgccatcggaccacgacacgcgaagctcacgggaggaggattccaagagtccgcactccatcgggaagccagcgggagctgcgcacacggatgagaaaatagacttcagcaattgctgctggtgccatcgaccgattgcggagaatgcgccggactacctgaccagctgcgacggaccgcgctactgctccgaatcctgcttcgcccagagccggagggcatccttcaagaaggccaagacctgcgactggtgcaagcatgtgcgccacgcggttagctacgtggactttcaggacggcgcctcccagctacagttctgctcggagaagtgcctcaaccagtacaagatgcagatcttctgccacgaaacccaggcgcacctggacatgcatccgcacctgcgggatcaggccatggatgcgggcagcgaggctgggctgataacgccggatctgtggcttcgaaactgcaggagtcgctcggcctcgcccgcctccacgctctcggtgtctccgggtccgccgcctgctccggctgtcagtcgctgtccggactcaccgcctagtcatcatcccagcaaacctttgatctcagtggcacccgtctcgaagttgctggcccagaagagtccgggtcccggacccggagcccctccaccaccgccaccgcctgtccagcggcatttggcgggaaagttgggtcgccgcaagcgccgaggtatttcctcttccttgggctcggaaactgtggccagtctgctgcagaaacagcagcagcaacaggcaccgcagcaacatcaggcacctcccacgctaacggctgactttggtggatccagcgtaccactgcctccgctctcgcccatgcccagcatgcaggaggcaccacaacagcagcaggctcctcaggtgccaccaacacaagccctgccacggggaccaacagccatcccggccagctacttcgcgacgccttcgaatggtgtgcccatgggacatccgtttgcggggcgcccaccgccgcctccgcatcactttatgcatccacctccgcatggcatgatgcctcgtggatttggtccgcacttcgggccaccgcttccgcctcaaatgcccgagctagggtctctgttgggggctgtgccgccggtgaccgtgatggtgccctatcccatcatcattcccctgcccatacccatacccgttcctctgcctgtgatagatttttacaaggcacacctaactcccgaggagaggaagcgtttcgatgagcagcgggctgctccaaccagagcggaaaacgcagaagaacaggagcaaccacagccgctggactgcagcaaaagcagaagtgagctggaggaggagaaaccagatgtggagaaactaagtgagcctggccaggagctggacaacgatcaggaagaggatgaaaaggaatccataccaaagacaaatccagatggggacaccaacgcggcttcgccatcaatttcacaggaatcatcgtcttcaccacaacagacgcactgcatcgtcagggattctacgcagtccgaacccgaggcggacaaccagaagctgcccaagctgaagatcacacggctgcagaccaagcgaacactgattcaaaccaaagaggcggcggccgagtgtagtcgaccgctgcgcaagcgcaaaaggatcatcgactgcgatttccaaaaaatgggtcttaaggaaccggaaatggccaacgatggcgaacagagcaacggcagtagcaacaaggaggcggatgcggatccggaagcagagtgcaatatgagcggcagccacagcaacagtggtagtgctaaagctaaaaagtag

SEQ ID NO: 19236 - protein, 774 aa, DROSOPHILA
MSAKTSPSSTSRDANVGSSSAIPVQIKKELPSDEIKEFAHNTMNELLGWYGFEGVDVDRLDLTAKTSRLLQSAAAAAVANQQSHQLHQLEPHPNLERKRTSLLRSSSRSSLAAAYHNNNNNNNNNNNGSSSKNNGGVGGVGVGSGRKSGLMNCSSTTTTPSDHDTRSSREEDSKSPHSIGKPAGAAHTDEKIDFSNCCWCHRPIAENAPDYLTSCDGPRYCSESCFAQSRRASFKKAKTCDWCKHVRHAVSYVDFQDGASQLQFCSEKCLNQYKMQIFCHETQAHLDMHPHLRDQAMDAGSEAGLITPDLWLRNCRSRSASPASTLSVSPGPPPAPAVSRCPDSPPSHHPSKPLISVAPVSKLLAQKSPGPGPGAPPPPPPPVQRHLAGKLGRRKRRGISSSLGSETVASLLQKQQQQQAPQQHQAPPTLTADFGGSSVPLPPLSPMPSMQEAPQQQQAPQVPPTQALPRGPTAIPASYFATPSNGVPMGHPFAGRPPPPPHHFMHPPPHGMMPRGFGPHFGPPLPPQMPELGSLLGAVPPVTVMVPYPIIIPLPIPIPVPLPVIDFYKAHLTPEERKRFDEQRAAPTRAENAEEQEQPQPLDCSKSRSELEEEKPDVEKLSEPGQELDNDQEEDEKESIPKTNPDGDTNAASPSISQESSSSPQQTHCIVRDSTQSEPEADNQKLPKLKITRLQTKRTLIQTKEAAAECSRPLRKRKRIIDCDFQKMGLKEPEMANDGEQSNGSSNKEADADPEAECNMSGSHSNSGSAKAKK

SEQ ID NO: 19237 - DNA, 3675 bp, DROSOPHILA
atgagatccgcacccgtctggccaatctcactgggatgccgcatacgaaaagctacgataagaaagatctgctactgtccaccgaccaaagaaacgatcaggagaaaatgagggacttgctcgcacaattcgttgacgaagcccaactggatcaaaatatcagcaggcagagggatgactcaatttccgacattgagagacgtctgcgagctctgcgcgatacacccgtcgattccgatgcatgcccatcgagatcccagatggaaagtatcgcggacaacgaagaggatgacgagacacttctacagaacatattgaaaaaggttcgcatttatatagtagcattattttttttaagccaaatcatcactttcgtattcccattcagtatgtagcagaatcgcgcttaccagaaccttccgagagtgaaattagtccaattaacactgagtcgcccggcaacaccgaagaattgccctggtgcaatatttgtaacgaagacgccgacttccgatgccacggatgtggtggggaactcttttgcactctatgctataaggagtgccacgatgatgacgaggagtaccgtgctcacgttaaggaaaagtattcggctccgccaaagcttaaagaaaatcacttctaattgttaattgtttacttgactgtacgcaaatttttgtttaattatagattgttttcagcaaatgcattactattgtctgtatttatgtggtgctagctcgctcatatttgtgcagtataattgttgcttctctttcagttgtgaattaaaacaggtaggcgatgttggttccgaaacatcttgtggtttttccacctttcagcgctgcaaaaactataccaaaatataaagtaacttaacgaaactgccagtagctggaaaatttataaacaggtgatttaatgttcaacattataaacgtaactcgggtgcatttaagtctaagtatgtgaaatggtgctcttcttttgtccctcattgttcctcctcctcgatattgtaaaagtggggccatgtctgtatctcctcgtacaatcgccgaccaggactctccgtcgaattgcactggcagtgacaaattaatctatagtcggtggatatgtgaccatcctcaacgccgcgggccaacagattgcggcacatattcaaggcgtctgccgtcgggagttctttcatgaagcatccaatgaaactgatccccagcgagatcctgttgtaacccagagtgtgggcgcccaccgttttccatccgcgtccctcgtagatgttgccatcgcagccgaccaggaagttgtacgcaatgtcattccatccccgcgactcaatgtggaagcactgaaatatatatacataattattatatagttcggagcatatatgatttaatttcgctaacgaaatacttacctgcatgtcacggataagtcttacgttgatcgcccgcttttctgaactctctgtagctgtgtgtactgcgtggtaaaacaatatttgttaatcaaggttttaaatatattcgaaaagagttataatacgatataatcttaggttagtgagtgctaagcatgatggtcagatcaaatagtataaattgttttaattattgcgtcatacttttacagacaacttgatttataatcagttggcaaaaaaatggttaaaacgtgcagcaaacttgaatactcacagataaccacatatttaacaggcagttgcaagggcagtggctcgtccatgggcttctgtgctagccacgaagagcgcggaatgatggcggacagctccttgggtattttgaattctgtaagtgaaatcggtatcctatggttaacgtgtatgcatcccctggtgaatgatagcttactctggcgcctgatgaacacatccgagcgcaccctctcctccgactcgtcctgatagtcgtcttcgaaatgtgtcggagttttgggagcgttatctctcggtggtgaaacatgccgccgatctcttcggttttgagtaaggccatcggctatgatttgtatatttccattaatattggtaacattgccgatatggacgttcgtggagttgcttatattaacgttgcccaaagtctgaatgctgttgatcgagttcataaggtcccttatggtgtcgctgatgatcgaatgctttttggtagctttaaggtggggatatattgaaagtgttataaattgaatatagaaacttgatcttgagtactacgcaccgatttgagtgcctagtgtcatagtgctgatttcttcactggtattttggtcggcatcctcctcttcctcggtataatcgtagtccaagctgtccacaaccgaggactctgcaatggactccagttcctcgtcctcctgactagccaaccattcgcgagtccgctcctggctcaactttttgattcccgattcggacatgtccgtagttttggcttctgtttgctgccaataaatgcgcgtgtatctctcggctggcccttactttgtttatcaatattgtgagttagaactgctctattctctgattagtgttcgtgtcgtgtccaccttacacgataagataaggacgttccacaggctatccaccattatatgcgcaggtgccgtggtgaaatgcttttttgcatatcagtccacttggggctttttttttgcatatttagtcatgtgtattaattattgtcatggatatcgaggatcagtctagatatcgataagtattatcgatgttcgcatttagaacaattccactgcctttgaagggagcttagcggtatcgtacatacagtgggccgcatccactagttgagtttcagatttcgataagtatttgattaaccatataaagcttacaaaaatttaaatacgaacaaaaaaaaatagtttaaattatccctctttaaccgttttggacatatatttctgtatacatatatatattgttctatgaaaatatataaatatatataaataaataaataagtaaataaatatatataaataaataaatataatatatataaatatataaacatacaaatgctttgtccagatccgaaaaccccttatcactggctaaaatataaccagtttggttcaccaatcaaatcgactggaggtacaatgcacccagtgctggaaaagatgagctttccaacactcttgcctatattgggctttaatgctaagcagttaactgcaacactgcaccgtgtttgataataaacctgtagaggcaggtgattacacccaagtcagcccatctttaagcattagtcatggggctagaggtactcagataaaccaccaaaacctaattcatgcgctgtaaacattcactcgaccactctcgcgtatgcgctgttcttccctccaagtctctcaattactttctttatttttatatttagttactgctggctattcaagccaaccaaagagctaccacaacacggatttaatagtcacttagagccattaaaagagaataaactaaaatgtaaccaacttataaactaattttatacattgcttaagcgatagtttgacgtataaaactgaggagcttatatttattacttttgactgcacagtggaatgcattcaaaggtctgtttatgtttttgttccggtgtg

SEQ ID NO: 19238 - DNA, 1256 bp, DROSOPHILA
tggactgatatgcaaaaaagcatttcaccacggcacctgcgcatataatggtggatagcctgtggaacgtccttatcttatcgtgtaaggtggacacgacacgaacactaatcagagaatagagcagttctaactcacaatattgataaacaaagtaagggccagccgagagatacacgcgcatttattggcagcaaacagaagccaaaactacggacatgtccgaatcgggaatcaaaaagttgagccaggagcggactcgcgaatggttggctagtcaggaggacgaggaactggagtccattgcagagtcctcggttgtggacagcttggactacgattataccgaggaagaggaggatgccgaccaaaataccagtgaagaaatcagcactatgacactaggcactcaaatcgctaccaaaaagcattcgatcatcagcgacaccataagggaccttatgaactcgatcaacagcattcagactttgggcaacgttaatataagcaactccacgaacgtccatatcggcaatgttaccaatattaatggaaatatacaaatcatagccgatggccttactcaaaaccgaagagatcggcggcatgtttcaccaccgagagataacgctcccaaaactccgacacatttcgaagacgactatcaggacgagtcggaggagagggtgcgctcggatgtgttcatcaggcgccagaaattcaaaatacccaaggagctgtccgccatcattccgcgctcttcgtggctagcacagaagcccatggacgagccactgcccttgcaactgcctgttaaatatgtggttatcttacacacagctacagagagttcagaaaagcgggcgatcaacgtaagacttatccgtgacatgcagtgcttccacattgagtcgcggggatggaatgacattgcgtacaacttcctggtcggctgcgatggcaacatctacgagggacgcggatggaaaacggtgggcgcccacactctgggttacaacaggatctcgctggggatcagtttcattggatgcttcatgaaagaactcccgacggcagacgccttgaatatgtgccgcaatctgttggcccgcggcgttgaggatggtcacatatccaccgactatagattaatttgtcactgccagtgcaattcgacggagagtcctggtcggcgattgtacgaggagatacagacatggccccacttttacaatatcgaggaggaggaacaatga

SEQ ID NO: 19239 - protein, 345 aa, DROSOPHILA
MSESGIKKLSQERTREWLASQEDEELESIAESSVVDSLDYDYTEEEEDADQNTSEEISTMTLGTQIATKKHSIISDTIRDLMNSINSIQTLGNVNISNSTNVHIGNVTNINGNIQIIADGLTQNRRDRRHVSPPRDNAPKTPTHFEDDYQDESEERVRSDVFIRRQKFKIPKELSAIIPRSSWLAQKPMDEPLPLQLPVKYVVILHTATESSEKRAINVRLIRDMQCFHIESRGWNDIAYNFLVGCDGNIYEGRGWKTVGAHTLGYNRISLGISFIGCFMKELPTADALNMCRNLLARGVEDGHISTDYRLICHCQCNSTESPGRRLYEEIQTWPHFYNIEEEEQ

SEQ ID NO: 19240 - DNA, 3940 bp, DROSOPHILA
cggagggctggcaattaataaaggccgtggatccgtggcgttatttaattaagcaaaaacaatttaatttaatattcatgtggggtccatgttccagttgccacttttatgcataattacaatgcacaaatttcgtcgtcgttcgttgttatttatatttttagagggccgctcagtcggtggtccagatcctgggttttcaacatccatcaattggcggctctcctgtcaaccggtttcttggatctcggatggagtgtggtacgccactgggcgggcggaggatcatcgggaactcacctgattcagcggcaccttaaaggctatgaaacgagtgccaggaacacgatctccaatcggtttgtacttcagccatctgcaattggtacaaaaagtaacatgaaaaaatgaccagcataaacaacacgggtttctttgggatattctcctaaactgcactcacctgtctggtatgtccttgaccattttgtctgttcgccaaaccttttaccgaaatttaaaaataaaatttcgaagttcttcaaaattgttgacaatgttttgcaaagaaataattcttattccagtgttgccagattactttaagagattactcaacatatgctgctgagttgacactgttagctaaactgtgactggtcacgattatttttaaaactctcgctcattcgctctttaactgaagtaataacatttataatctatatttaatgtttctatttaataataaatgtaatttttttaatacttcattcttcattaagctcttttacaaatttatgactagtaatattaatcggcttgcatatttttttaaatggataataaaattaaattaaataagtccattaatcaataattccaagattatattttatatatgttcattttttcacttaagttcctgctgcttaaagttcacatagatctgttgctccatctgttaagtaacagctgttgtgtattggctaggaggtaccaaaaaacggcaaacgcttaaatcagcggaaacctttggactttctgtgattttacagcgaaggtaagagttttaattaaatattaatggacttaaattaatcaaacaacaattttccctcgcgtggatagctccaataaccatccaacatccaaaatgttcgccagcaacacgcgtaatcttatgcgcagcagcattgtgagtggaaatttcttaaaaagataaaaaaaaagcgcaggcggtgatcgctaaaaattaaataacaaaatatcaattttcccacttgcagttgcagcgatgcaagagcactttggtggtggctgagcacaacaatgaggtactcaatccgatcaccctgaacaccatctctgcggccaagaagatcggtggtgacgtcacagttctggtggcaggcacaaaatgcggacccgtaagtcccccaagaagtctcacattagggtggttccattcgcagggatttcgaatcatcaacgaatctaatcaaataggctgaacatgcatcctaagacctttgcgatctggtagaaatcaaaccggcacaggattatataaacatatctcattagaaaacaagacttttgagttgttggtaatactgcatctaagagataggaattgttaaccttgattatatacttctgactataagtacactttaaaaagggtccaatctattttccacttaactcttgctacattccagttttccaattttcatactagattaaaactaactaaaaatttagaaaaaaatgttttgattttggattggtgaacccttacttagatacaatatatagtaaccatatttcaaaaatgccgagcaaagtgatttcaatagatgaccattttaaaataccaagacatttaaattataaagcatcgaaccacccaagagcgactcccactgatcataagtatttggtgcgatagataatcttacataatcactctcttgttttccaggcttccgaggctctttccaaggtggatggcgtgaccaaggttctggtggccgaaaatgccgccttcaacggatttaccgcggagtcgctgaccccattggtcctggccgcccagtctcagttcaagttcacccacatcctggccggagcttcggctttcggcaaaaacgtgctgccacgcgtggcggccaagctggatgtgtcgcccatttcggagatcatcgatgttaagtcggacgacacctttgtgcgcactatctacgccggaaatgctatcctcaccctgaaatccaaggacgccgttaaggtgatcaccgtaaggagcaccaatttcccaccggcagccaccagcggtggaagtggagccgtggagcaggcaccagctggtgacttcgccagcagcctgtccgaatttgtatcccaggagctgaccaagtccgatcgccccgagctggccggagccaaggttattgtgtccggaggacggggcctgaagtccggagataacttcaagctgctgtatgatctggccgataagtttggtgccgctgtgggtgcctctcgtgctgccgtggatgctggatttgtgcccaatgatctgcagatcggtcagaccggcaagattgtggctcccgagctgtacatcgctgtcggaatctcaggcgccatccagcacttggctggcatgaaggactccaagacgattgtggccatcaacaaggatcccgaagcgcccatcttccaggtcgccgatattggcatcgtggcagatcttttcaaggccgtgcccgaactaaccggaaagttgtaaggcgagattgtcacttgctgtagtataaagattgtgtaccgatgaattgataactgttgcatttatttgaattttgacataagtccgtggaagattttcccttaaattttgtaataaaacaagccgaagacctattctatgtgaaaattgtagtcttatcagttgagtgcaactgtttaaatcagcaaaatatttaaaaaaggcccagggctagcaataaccaaaattcaactaggataaactgtttactggcattgcagattgcacctagtctaggatttggtttccttatcagtttcccatcgtatatttatttttcaagaagcttttatgagagctttattaattaaattagttatactagaaagctgatcaagccaaaacaaattgtagctaaaagcatcaaaaagctttctcgccaattgcgaacttttttaaaaagtgtgaaaatgtgaaaactgtgtacaaaaaaagattatagatcaaatcaataggatttttacgcttaataaacaaaatgtttaggaattcgtaaatcgttggtatatttttggtacaatcaagttaaatataaatcgcagaatcataaaaactagaattaggccaaaaactacgcctataaccaaagtggtccactctaaaggattcaggctgttggtagtgggtaaaacgtgtgtgttgatgccactctaaaatggaaaatcattgaaatgaaacctcgacaattatgaaatgatcggagaaactcacccaaccaccattctcgttaatccacggaaccagctcatcttcgatcacctcggaaacgctctccatcaacttgggcaagtattccggatgtccttggcgtacacaatcaacggacagcccaccggcgatggcgaacagagagatcaccttgctccacgtaatctccacccggaagagctcgcgaccaacggctcccaaaagcaagctcacagcatccggagtatggaactcaccacccggattccggcaaatctgacgagctactccgttgtatatccggggatgcatgcgctccagttcatcgcccagcttgggcaaaggtgtgtaaaatgattaatataataaaataaagcgttattttttgcttaccacttggaccgctggaaacacatc

SEQ ID NO: 19241 - DNA, 1224 bp, DROSOPHILA
caaaaaacggcaaacgcttaaatcagcggaaacctttggactttctgtgattttacagcgaagctccaataaccatccaacatccaaaatgttcgccagcaacacgcgtaatcttatgcgcagcagcattttgcagcgatgcaagagcactttggtggtggctgagcacaacaatgaggtactcaatccgatcaccctgaacaccatctctgcggccaagaagatcggtggtgacgtcacagttctggtggcaggcacaaaatgcggacccgcttccgaggctctttccaaggtggatggcgtgaccaaggttctggtggccgaaaatgccgccttcaacggatttaccgcggagtcgctgaccccattggtcctggccgcccagtctcagttcaagttcacccacatcctggccggagcttcggctttcggcaaaaacgtgctgccacgcgtggcggccaagctggatgtgtcgcccatttcggagatcatcgatgttaagtcggacgacacctttgtgcgcactatctacgccggaaatgctatcctcaccctgaaatccaaggacgccgttaaggtgatcaccgtaaggagcaccaatttcccaccggcagccaccagcggtggaagtggagccgtggagcaggcaccagctggtgacttcgccagcagcctgtccgaatttgtatcccaggagctgaccaagtccgatcgccccgagctggccggagccaaggttattgtgtccggaggacggggcctgaagtccggagataacttcaagctgctgtatgatctggccgataagtttggtgccgctgtgggtgcctctcgtgctgccgtggatgctggatttgtgcccaatgatctgcagatcggtcagaccggcaagattgtggctcccgagctgtacatcgctgtcggaatctcaggcgccatccagcacttggctggcatgaaggactccaagacgattgtggccatcaacaaggatcccgaagcgcccatcttccaggtcgccgatattggcatcgtggcagatcttttcaaggccgtgcccgaactaaccggaaagttgtaaggcgagattgtcacttgctgtagtataaagattgtgtaccgatgaattgataactgttgcatttatttgaattttgacataagtccgtggaagattttcccttaaattttgtaataaaacaagccgaagacctattctatgtg

SEQ ID NO: 19242 - protein, 330 aa, DROSOPHILA
MFASNTRNLMRSSILQRCKSTLVVAEHNNEVLNPITLNTISAAKKIGGDVTVLVAGTKCGPASEALSKVDGVTKVLVAENAAFNGFTAESLTPLVLAAQSQFKFTHILAGASAFGKNVLPRVAAKLDVSPISEIIDVKSDDTFVRTIYAGNAILTLKSKDAVKVITVRSTNFPPAATSGGSGAVEQAPAGDFASSLSEFVSQELTKSDRPELAGAKVIVSGGRGLKSGDNFKLLYDLADKFGAAVGASRAAVDAGFVPNDLQIGQTGKIVAPELYIAVGISGAIQHLAGMKDSKTIVAINKDPEAPIFQVADIGIVADLFKAVPELTGKL

SEQ ID NO: 19243 - DNA, 4687 bp, DROSOPHILA
caaaatccgggcctgggttgccgccgccgtcaaacaggccaagtaataattgagaaatcccaaaaaaaaagtggaggttgacctcctcgcaaataaagctgagctttaggttaattcggactttcgaaataaatgtttatttacccgttgaaacgaaaagtactacgattacacactaaaaactaaatggaaaaccagcccggcgtgccgggtcgcttcttgttcctgtccagaaatctgcggaaaccggctttcgattcatccagcgacttttcctccttggcctgcttctcagccttttcggaaaagaagtcggggaagacaaaggactcctccctgggctggaatacacaaatatcattggaaatatccattgaatcaggggcttgtagtgggccataccaatgttacataagccagcttcacgtcgtcttttttggtgatgtagccgtaggtctgatccttcttggtctcgcccatggcaatccgagtacgcacatccaccaccggcagcttgtagatcttctccagatagttacgcacatcgtacttggtcatttccatggacaccgaaaaagtgaccacattgggtggctgttcctccgtgggtcggattagcttcatccagaagttgggaaggaaaacgcgaagctgcggattgccgcgctgatagatgggataccacctcgtggacatgatctagccaggatctaagattctaattcaagaatacaaaaattaaattaattgttgtgcgtttatgaaatgcactaaaaaaggccaaaggtttcgggcggacacaggcgtagcaagggggtcgcataagattgttaactaaaacttaacgtatatattaatttaagttattacgctgtaactataaaatattccacacttttaccacttttaaaaaataatatcactaaatctagattcctctcaaagaactgttacctacacccgtgtaaaagcacgtgggttgtccaacacttgttttaaacagctgattgtcaaccacaacaatttttaaattcggtccggctgaaatctctggtaaaggccgtttaaaatggcaaaaataaagaaaaaggaggcgaaagctaaacctttgactcgcaaggagcagagaaaacagaagtcggagttcaaaaaacagaataaacgactttatttcgccggcaaaactaacggaacacagcgcgtggcggcggcggcagaggcgttggcagcgcagtcgcagctgggcaaaaacaagaagaagaaacggagcaagaagcccaaaataataaatccagatgaaatacccaaggagcaacttttgtccggtgaaatagacagcgacgatgacgagtccatagattcggatttcagcgatgcggaggtggatgctctgctgcccgcaagggaaaagatggaagtctatgaacctctgggaaaaaaggtcaagaaaacgacaggaggcgccatccaaagacaggatgaagaggcggtcaggcggaaggaactgcgccagcaaaaggaactggagagcaagtccaagaagcagcgaatcaagcaacttcgcatagagaacgaggaggatgatcgcgagatcaacaagctggaaaagaagctgaagctcaacaaatccaaggacaaaaaccgcttggtgcggaagatgttcaatgatggcctggactacctgcttgactttgtcctggatgacgaggaggagaagcggaagtgggaggagaagcaggaacgtaagaaaaagctgaaggagcagcaagaaaaggaggaggcgggaatgtggagcgatgaggaagaggataaggaggacagggatgagcccatggataacttctcagaagatgacagtggctctgagggtgaagatgatgatgaagacctaactggagaggaagaacaaagcgaggaggattcggagcaggaagagaatgcacctaagagtgagtacattcatcgtttagagtttttcatttaattaacgaattaattacagttaaagaggacatctacggacgcaaacgcgacgccgagggaaacatcctgcctgatcccgtggagctcgaggcctcagccgccggtcaaaagtacataccgccacatcagcgagctttgatggcagccagcgcgggatcaagtgaaaaacaggcagagatactagctcgccttctaaagcaatgcaagggtctgctcaatcgtttgtcagaagcgaatctgcacaagattgccgccggcatcgaggagctgtacatgaaaaactcccgctacaacatgaacgaaacactaaccaagttaattcaagaagcccttctcggctacacgcgaaccaacgagcgaatggtacaggaacacatggtgctgctggcctacctacatgcccaggttggcagcgagattggagcgcatttcctgcagacttttgtggagttattcgatggttatgtcaagaacatcgctaccctggaggtggaggataagcagctgaataacctagtactggtgctctgctacatgtacctcttcaagatctacgagctgaatttgctgatggagctcataggcaaattgtcagatcagctttgcgagaagagcgtggagtgccttttgctgatcttccagtccattggcttccggctgcgcaaggacgatccactggcctttaagaccatgatgcaaaaagttcaatcgcaaattgctagtgccccactggaactgaaagagaatccacgcctgcgtttcatggtcgatattctaaatgcagtcaaaaacaacaatatgcaaaagctgccgcagtatgatcccgagttggcggagaatctgcgaaagcgtttgaaggccatgctgaagaatgatcgctacgtggtgactctgaacataaccctggaggacctcctgcgtgctgataaagtgggcaaatggtggattgtgggctctgcctggacgggaaatctggatgagatgggatccgccaagcaaaagcaggataagaactcatcgaagtctgccaacggaggttttgcggatcagctactggagctggccagaaagcagcagatgaacacagccgaaaggaggaatatcttctgcatcatcatgagcgccgccgattatgtggacgcctttgagaagattctgcatttgtctctgaaggaccagcgagcggtggcctacgtgatcatccattgcgctctgaatgagaagcgtgctaacccctattacgctcatttggcacttaagttctgtcaattcaacagaaagtatcaactggctttccagtttgccagttgggacagaatcaatgatatcgaaaagctttccaagccgcagattcgcaacctggctagttttctgcagcaagtaatcctagctgctggtctgcagctgtcagtgctcaaagtagtcgactttatgcagctggacaagctcagcttttactttatgaaggaagtgatggtcaggctgcttttggctaacgatgaacgcgagatttatcagacgttcgaaagagttgccaaaaacaccaaactgcagcagtttaagcaaagcgtaaggctcttcctgcagcattttcttttgcaagaggaacagctggacaaacttaagctgaaggacgaggatcgacagcttctgcagcagcgcgttgatcacatagacaaacttttagcctatgtggacctgtagttataagttgtaaatttgtaaaatattcataatgaggatgctataaaacaaataaaggacaagtttttgtaaaataggaaggcatgtgtaatttattcctaaggcaaaaattaacaactaacataataaactagtcgaagctttggaggagatcgcgtgcccgccggtactgcgtggactcgattagctttcgcctttccgcctcgtcctccagcttttcgccctccttgtccagtttctggatcacctcctcggccaactgactgatctttgagcgcgctgctccctgggaactggccaaatactccagagcagttggccacagctcgtcatccagtttctccacatcaaaggcggtttgttgtatggaaatctgtcgcagtttgttgaacttccaatcctggcgggattccttccattttagaagatattccttgttgactttggcatctttgttggagctctgactcttttgggcctcgaggcgctgctggtgcttctgtttcttcttttggcgcactgtaaccactgcataagcgttctccggacgagctgcttcttttagttgcgctgctgtgggctgggagtccacatcgtcgtcttcatccgagttattttcctgcgttttgctgcgtttcagctttttggtttcgttggcatcctggacttgttttctcttctgaggcttctgaggaagactttcatcgcttccactggtggccacctgctcctccgcttggtttttcctgctttgtttcttagtggccgatacttctgattctttatgccgcctcttggcgggtttatctgtaaatgttggacatgttacacaaagccgatatagatttgagctgaaacacacctgttggaacctcctgttgatctacctgtggagctagaattagacttttgttggccacctcgtcgtcgctggccgcatgctcagggttcttagtcacctcgtgcttgcgttttttgccctggcgcttgacctttttct

SEQ ID NO: 19244 - DNA, 2634 bp, DROSOPHILA
cagctgattgtcaaccacaacaatttttaaattcggtccggctgaaatctctggtaaaggccgtttaaaatggcaaaaataaagaaaaaggaggcgaaagctaaacctttgactcgcaaggagcagagaaaacagaagtcggagttcaaaaaacagaataaacgactttatttcgccggcaaaactaacggaacacagcgcgtggcggcggcggcagaggcgttggcagcgcagtcgcagctgggcaaaaacaagaagaagaaacggagcaagaagcccaaaataataaatccagatgaaatacccaaggagcaacttttgtccggtgaaatagacagcgacgatgacgagtccatagattcggatttcagcgatgcggaggtggatgctctgctgcccgcaagggaaaagatggaagtctatgaacctctgggaaaaaaggtcaagaaaacgacaggaggcgccatccaaagacaggatgaagaggcggtcaggcggaaggaactgcgccagcaaaaggaactggagagcaagtccaagaagcagcgaatcaagcaacttcgcatagagaacgaggaggatgatcgcgagatcaacaagctggaaaagaagctgaagctcaacaaatccaaggacaaaaaccgcttggtgcggaagatgttcaatgatggcctggactacctgcttgactttgtcctggatgacgaggaggagaagcggaagtgggaggagaagcaggaacgtaagaaaaagctgaaggagcagcaagaaaaggaggaggcgggaatgtggagcgatgaggaagaggataaggaggacagggatgagcccatggataacttctcagaagatgacagtggctctgagggtgaagatgatgatgaagacctaactggagaggaagaacaaagcgaggaggattcggagcaggaagagaatgcacctaagattaaagaggacatctacggacgcaaacgcgacgccgagggaaacatcctgcctgatcccgtggagctcgaggcctcagccgccggtcaaaagtacataccgccacatcagcgagctttgatggcagccagcgcgggatcaagtgaaaaacaggcagagatactagctcgccttctaaagcaatgcaagggtctgctcaatcgtttgtcagaagcgaatctgcacaagattgccgccggcatcgaggagctgtacatgaaaaactcccgctacaacatgaacgaaacactaaccaagttaattcaagaagcccttctcggctacacgcgaaccaacgagcgaatggtacaggaacacatggtgctgctggcctacctacatgcccaggttggcagcgagattggagcgcatttcctgcagacttttgtggagttattcgatggttatgtcaagaacatcgctaccctggaggtggaggataagcagctgaataacctagtactggtgctctgctacatgtacctcttcaagatctacgagctgaatttgctgatggagctcataggcaaattgtcagatcagctttgcgagaagagcgtggagtgccttttgctgatcttccagtccattggcttccggctgcgcaaggacgatccactggcctttaagaccatgatgcaaaaagttcaatcgcaaattgctagtgccccactggaactgaaagagaatccacgcctgcgtttcatggtcgatattctaaatgcagtcaaaaacaacaatatgcaaaagctgccgcagtatgatcccgagttggcggagaatctgcgaaagcgtttgaaggccatgctgaagaatgatcgctacgtggtgactctgaacataaccctggaggacctcctgcgtgctgataaagtgggcaaatggtggattgtgggctctgcctggacgggaaatctggatgagatgggatccgccaagcaaaagcaggataagaactcatcgaagtctgccaacggaggttttgcggatcagctactggagctggccagaaagcagcagatgaacacagccgaaaggaggaatatcttctgcatcatcatgagcgccgccgattatgtggacgcctttgagaagattctgcatttgtctctgaaggaccagcgagcggtggcctacgtgatcatccattgcgctctgaatgagaagcgtgctaacccctattacgctcatttggcacttaagttctgtcaattcaacagaaagtatcaactggctttccagtttgccagttgggacagaatcaatgatatcgaaaagctttccaagccgcagattcgcaacctggctagttttctgcagcaagtaatcctagctgctggtctgcagctgtcagtgctcaaagtagtcgactttatgcagctggacaagctcagcttttactttatgaaggaagtgatggtcaggctgcttttggctaacgatgaacgcgagatttatcagacgttcgaaagagttgccaaaaacaccaaactgcagcagtttaagcaaagcgtaaggctcttcctgcagcattttcttttgcaagaggaacagctggacaaacttaagctgaaggacgaggatcgacagcttctgcagcagcgcgttgatcacatagacaaacttttagcctatgtggacctgtag

SEQ ID NO: 19245 - protein, 854 aa, DROSOPHILA
MAKIKKKEAKAKPLTRKEQRKQKSEFKKQNKRLYFAGKTNGTQRVAAAAEALAAQSQLGKNKKKKRSKKPKIINPDEIPKEQLLSGEIDSDDDESIDSDFSDAEVDALLPAREKMEVYEPLGKKVKKTTGGAIQRQDEEAVRRKELRQQKELESKSKKQRIKQLRIENEEDDREINKLEKKLKLNKSKDKNRLVRKMFNDGLDYLLDFVLDDEEEKRKWEEKQERKKKLKEQQEKEEAGMWSDEEEDKEDRDEPMDNFSEDDSGSEGEDDDEDLTGEEEQSEEDSEQEENAPKIKEDIYGRKRDAEGNILPDPVELEASAAGQKYIPPHQRALMAASAGSSEKQAEILARLLKQCKGLLNRLSEANLHKIAAGIEELYMKNSRYNMNETLTKLIQEALLGYTRTNERMVQEHMVLLAYLHAQVGSEIGAHFLQTFVELFDGYVKNIATLEVEDKQLNNLVLVLCYMYLFKIYELNLLMELIGKLSDQLCEKSVECLLLIFQSIGFRLRKDDPLAFKTMMQKVQSQIASAPLELKENPRLRFMVDILNAVKNNNMQKLPQYDPELAENLRKRLKAMLKNDRYVVTLNITLEDLLRADKVGKWWIVGSAWTGNLDEMGSAKQKQDKNSSKSANGGFADQLLELARKQQMNTAERRNIFCIIMSAADYVDAFEKILHLSLKDQRAVAYVIIHCALNEKRANPYYAHLALKFCQFNRKYQLAFQFASWDRINDIEKLSKPQIRNLASFLQQVILAAGLQLSVLKVVDFMQLDKLSFYFMKEVMVRLLLANDEREIYQTFERVAKNTKLQQFKQSVRLFLQHFLLQEEQLDKLKLKDEDRQLLQQRVDHIDKLLAYVDL

SEQ ID NO: 19246 - DNA, 3340 bp, DROSOPHILA
cctgggcttgtaccttcaatcgctgatcctgacaatgatcgtactcctcttgattccatttatgatccatccatttgtgggccaaagtgtacccctggaaaactcaaacttgcgcacccaactggagtaccttacgcgacaagtcggctttcccatgagtcaggtgcgcatcatccgggtgcatgaccctaacacgggaagtaatgcctttttctacggatgctgctgcctgaaaagaattgtgatcttcgatacattgctgctcaatagaggcaagtcagatctctcccacctgacggcagaggagctgggtaggggacttgcggatcctcaggtggttgctgtggtggcccacgaactgggtcactggaggaatggacatttttacaaagctatcatggcgttccaagtccatctcatactgacgatcctgctgttcgcgtttctgttttctcatgggcccatttaccaggcggtgggattccctcccggtctccagccgacagtcattggatgcttaataatcttcggctttgtactgactccatacatgacactggcgaacttcagtatgcttagcatgacgcgttgctttgagtaccaggcggataggtttgcctaccagctcggatatggaggagaacttcgacaagcactgctcaaactatatgcggataatctggcattccccgtttcggatccttgctactccagctggaatcatacgcatcccaccatgctggatcggttgagtcgtctggaagaatttcgacgataggcgatatattttttatcggtgtttctcaaacatagtagcttctgattgagttatccgtcttgggtaatatagatatatacaatattttacaataagtaaacattgtttgttgggggaacatgataagttttgatggcattctacgatacttggccgaaagtagatccaatcatagtgctggtggtgttatgtctgatcgtgttagttgaccggatatgggagatgatactcaccaagaggcaggtaagtagtggattggttgttccacccatgaagaactgatcgcggatttctttcaccagcaattggtgtgcctgaatgcgattatggtgccggaggagctgagaggaatcattccgccggagatttaccatcgggcccgcatctacgagctgcataaaacggagctacagatatggaagtacctcatcgacttgattattacgctctgtgagctgatattgggcttctatccattcctctggagcttgtctgcgaagactctacagaaaataacctcccaagagatctggataaccttgatctttgttttctacctgaccatttacatttgtataaggttcctgccggttctgatctatgacaagtgcctgctggagttgcgatatgggatgtcgggcaagtttccttggtacctctactgctgcattggagcaatgtccattctcctaagccagctcgtcctgttcccgttggcggcggccattgtgttcagcgtaaagttcattgggtactacttcttcctttggttctggctgttctgggctacgttcaccctgttgctggtattttttttgccctactgctgcattccgtgcattggacgacaggtggttttaccagagggcactgccctctatatggaggtgaagcgtgtttgcgatgtggttggcttccccatgaagagggtatttatcataaagacccggacaatgcagtatagtaatgcctacttttacgggagctgctgcctgaaaagaattgtaatttttgataccttgctattgaacaagggcaaggaacccaatgagatccatccctatgaggtgggcagaggtctgaccaacatccaggtggcgggagtggtgtgccatgagttgggtcactggaagcacggacatttctacaaggctacgatcatcatgaagattcacttctttatcaccatgggactcttcggattgttctttcactctccccagctatacatggcagtgggtttcgagcctggcgttatgcccatcatagtgggtttcatcattgttctgaaatttgcccttactccttatctcacgttggccaatgtcttgatgctgtggaatctgcgtcgctttgagtatgccgccgataaatttgcccatcgcatgggatactccatccaactgaggatggcgctggttaagatctatgcggatcatatgagttttccggtctacgaccaatgctatgctcgatggcatcacactcatcccacgattcttcagagactggcctatcagcagaaactggatgtgaaggccatgaatgccggaacctattaatctcagtagtcgccgacctatacattcgtttgattttgtacgtttttcgagatatcctgtaaaattgaccgtgttaccatgactcgaaaacaaattgctacgccccgctgtgaaactatctccaaattggtggtcagcgtcggcagtgggtgagttttgcaaattccgaaggaggaaactgggttgaaggatccttcaagggaatttctcaagctcttatagggtccttctccttttttcttttatgtaaaattaaatctttgaggaagttctaaagtatgcagaagttaatacagaatatattaaagtgcgagatttaagaagtttcgattcattacatttacattattaatttccgaattcagtgctctccaaataaaatccattagcgaaacttttcttacttatgcagatgctacaacacgatccttctgcgcgaatccctcgtggctgaactttcaaaatggcatgatggaagtggggccgattagtaaaccgaatccccatgattctcaaaaggaggcaacctcgtttctggagcgacatttcggaagcaagcgtctggactccgagcaaatgaacgcggaatttaagaacaggaagacgattatctggcacacttggctggtggagaaggtgcggtttcctccagctcagtgtgcggtcatcaaggaatggaaggatcccatcacggagactctgggcatttgctattgttcctggcacttgcagagctgcatggcctggcagcttattctcagtaatcgaatgacggatgccaagtggtaactaccttgtatctaatgttattagtggttacctataaagttccaccatagcttctgttcgcgaatcaagaaaacgatggacattgtcaactgtctcgttgactcggaagtggaacaggagaaaacatttaaggattgttcttcccccttagccgtgttaaccgagaaagtgcttgatgccactgatatgctgaagaaactgaatgatcttc

SEQ ID NO: 19247 - DNA, 1281 bp, DROSOPHILA
atgatactcaccaagaggcagcaattggtgtgcctgaatgcgattatggtgccggaggagctgagaggaatcattccgccggagatttaccatcgggcccgcatctacgagctgcataaaacggagctacagatatggaagtacctcatcgacttgattattacgctctgtgagctgatattgggcttctatccattcctctggagcttgtctgcgaagactctacagaaaataacctcccaagagatctggataaccttgatctttgttttctacctgaccatttacatttgtataaggttcctgccggttctgatctatgacaagtgcctgctggagttgcgatatgggatgtcgggcaagtttccttggtacctctactgctgcattggagcaatgtccattctcctaagccagctcgtcctgttcccgttggcggcggccattgtgttcagcgtaaagttcattgggtactacttcttcctttggttctggctgttctgggctacgttcaccctgttgctggtattttttttgccctactgctgcattccgtgcattggacgacaggtggttttaccagagggcactgccctctatatggaggtgaagcgtgtttgcgatgtggttggcttccccatgaagagggtatttatcataaagacccggacaatgcagtatagtaatgcctacttttacgggagctgctgcctgaaaagaattgtaatttttgataccttgctattgaacaagggcaaggaacccaatgagatccatccctatgaggtgggcagaggtctgaccaacatccaggtggcgggagtggtgtgccatgagttgggtcactggaagcacggacatttctacaaggctacgatcatcatgaagattcacttctttatcaccatgggactcttcggattgttctttcactctccccagctatacatggcagtgggtttcgagcctggcgttatgcccatcatagtgggtttcatcattgttctgaaatttgcccttactccttatctcacgttggccaatgtcttgatgctgtggaatctgcgtcgctttgagtatgccgccgataaatttgcccatcgcatgggatactccatccaactgaggatggcgctggttaagatctatgcggatcatatgagttttccggtctacgaccaatgctatgctcgatggcatcacactcatcccacgattcttcagagactggcctatcagcagaaactggatgtgaaggccatgaatgccggaacctattaa

SEQ ID NO: 19248 - protein, 426 aa, DROSOPHILA
MILTKRQQLVCLNAIMVPEELRGIIPPEIYHRARIYELHKTELQIWKYLIDLIITLCELILGFYPFLWSLSAKTLQKITSQEIWITLIFVFYLTIYICIRFLPVLIYDKCLLELRYGMSGKFPWYLYCCIGAMSILLSQLVLFPLAAAIVFSVKFIGYYFFLWFWLFWATFTLLLVFFLPYCCIPCIGRQVVLPEGTALYMEVKRVCDVVGFPMKRVFIIKTRTMQYSNAYFYGSCCLKRIVIFDTLLLNKGKEPNEIHPYEVGRGLTNIQVAGVVCHELGHWKHGHFYKATIIMKIHFFITMGLFGLFFHSPQLYMAVGFEPGVMPIIVGFIIVLKFALTPYLTLANVLMLWNLRRFEYAADKFAHRMGYSIQLRMALVKIYADHMSFPVYDQCYARWHHTHPTILQRLAYQQKLDVKAMNAGTY

SEQ ID NO: 19249 - DNA, 10025 bp, DROSOPHILA
tcacctaatcattagaatttgacttttgttttctattaatacccggctaattttcaatgggaagtggctgcctagtacaacaactaacacgtgtgcaaataagacctgtttcagttgtataccggaaaaaattggacatcaaataatgattgtgaaaatgggtatcgtaaaataaggtcgtggattattacttttgatgatctccttaaatatgagtcatgttgcctcttcggtattgtataacatccatgaatcaaatgaatgatttctaaatattcaaatatttttcttcgtgtaccgccaggtgagacagcaagaggtactcagacatccaggtaattaaggcaagctaaatggcaagaccggtgcccttcagccaaggtcaaagtcgcactgtccgtctgtctatcagcatttttgtcaccaagtgggcagttcaaaagttgcgaagttgcgtcagatcgctaatagaaaagttaactctacatacacctgtatgtgtatatatggatatacatgatatccacgagatatgtgtgtacatataggaataaacccacaaacaaaacgacgatcggcggcgtctggcttgactagttagtcatacagtttcagtctgccagccagtatgcaaagattaaaatgcttaaccgagtctggttttggcggctttaattgatggcgtttatttataaatcatctcatgaatatgcacattttttagagggtaaaacaatgtaggttccgtttggcatgaaactataggggggaactaaagggtagatcagctatcgtacgataatctacgggcactaaacaaactgttttttaaagtgttaattaaatggatgatgcaaaacgatttgcaaaaaagttactagaaactagcttattgccatctattaggcagcgaacattccgaagtacatctactactcataaaagtcaagtattgaagcacaaaaatgtcaatgggaacctataaatgtataaattaaacaacaaaaagggcacattatgtgctaagtaataaatagaagccttgacctacgtgcaaaaatgttcaacgcgcagcaagtgagtttcgatatcgtttgttttcaaaacaaatgcaaaataacggaactctgaaatggcccaactaattcttttaatcgatgtattccaccctgctcgagaacttgccacgtggaccgtttcaagttgcgctccgacggcgccaagaacatggcctcggtggcgcagttggcagcgcgtaagtctcataatcttaaggtcgtgagttcgagcctcacccggggcatgtaacttttttttattgcttccattgaatttgtccttttttgtaaaggttaaatctatctaaactgtttcaaaacgtttctctgtgcttataataaaatactttacatttttaagaatcgtcctttttaagtaaaaaatatttttgtactagttactttaataattttatcttacactatttatagatgttaaaatgttatttaaatttgtaattgatttttggtttcattagcaaatatccatcttgggtgcagctatatttatactttagttttacctattctaatcaaatattttcacatcgtgctagcatttaagcatccctttgtaaattgcgaatgcactcactaaatccgtcataaaattacgttggcgtgcggtcgggattattacgattacaaaatgcagtcccgtaattcaaaccgtgcaattacacggccattacggctgacattagcttcttccagctagcaacgagatcgggacaaagcaaatataaacgttccacgggcggtgcaatgatcagatcggagccaccaggcaaaaccgggatgatgggccatgtcaatatttagactaaaacccatacacccacgtcgtctgaatgtcacgcggtcgccagtgggttaaggctgttctaaccggaatttgtgtgataggtcggctaaatatctaatgaactctgttgcacttgaagaaaataattcagaagagcctaggccaagaaaattgaatgtgattagcttgaaaacaaaaaatttttatgtagttttttcttaaaacttaaaaatatattataatgatacatttttctatagtttcctatagcgtctttttctaaggcattattagaaaaggttaataggcggttatttcttccaatttagcttgcatattcgcagaactgcatctgaactgcaaagggttcaatggcaagccctcgtctgtttaaagttgaatactccttgcatatgacacctttttgcagctgaccaaattgcatgtcttatgtaaagcgtgccaaaaagccgaagcaaggtcagcaagaaccggtattgctacaaatatataagatactgataaaaattcaaaaccatcaccaaggggagagctgcaacagatctttcgaaagagtacggagtgcgagtaccaatttgaaaggcaagtggaaaatttcatggaaaattaccagggggcatcggcgagaccaaatgcaggagtgcagagatttcaaaaaaaaagttcctctgaaacaaaatgaaaaatccaaaaaattttccattcaacgggcctgcaactgatctcttctcgatgtgcgcgtgtgtgagaaagtacgtctgcctcggcggcaaccgcatacctctcttatttttacccctctgagtaaccgctaccctacacacaaccatcgattcggttgtttcttcgttgatcgccataaatttcaagtttgcaccgtgttcgtctcgttcaccgatctctgcacatgtgatcggtcatgtacgtatggcatacatatgtatgtgtgtgtgtataccacatgtattgcatagtatctgaatgtgccagatattgcccactcgtaagtggaacaagccagaaattgctacgctgtgtcttttcatttggtgtctgtgcaatttcgtacactgtatgcaccaaagttctcgagattcttcttcgacgttaaggcttttccgcttcagagttccctacttaagttatattgtaaaatcgaagtaattgaaataatataataacacgattttaaggaagtcaactaacttgctaagtctaaaaataaattatttgcaagccagtgattgagactaaatcgtagtgtacctatttgtttacccaatcaaagatcactcactaattgcctgatcttggatccataagaatctatttatcttcacctttgtggcatgctcgctaggcattatccctttgctccgctccgagcttgttaatttagtctaaatgcctgaattattttaccgaccgcccgaacactctgcacaaattaacatttatctactaacattcacaccttcaattcggtcacatgtgcgactttccacgaaccgatatggcaatgtgatatatagtcgaagatatggctgaaaacaccatcaccatcacaaaaaaagtttccacgagccgagtggagctttcctttcatgacgtatttaccgtgaatgctagaaaaaattaaattactatatctaaatctatctgattatttgatattatcgtattataataagtatattataatttagtatataatatatttaaagatttcagattttgtctaagcatttcactcttattccaagtgcaatgatcacctttttcaggatagggcattagtcgactctttcatgaggatatacttaagagagcatttttcgcagagagcgaagagcgccaaatgcaaagagcatcgaacgaagagcacgtttgggggcacgttcgatcgttggttgattttctttatattttttttcgaatttcttgttgttgctgtcttgtttgctggctgctgggcgacaagcccccgtgcatgacgtcacgtaagcgagaccgttacaacaaatgcgaaacggtttgtgtggtgtggtggggggggggggggatgtagtaacggtgagagagtgagagacagagagagagaaggagagggagtcgctgtacgaaagagacagcagcacatgcaacgtgacacgcgaagcgaagcacaaataaatataaaaatatttataataatgtcgagcatgtgaccaatttgtcggtaaatcgactgcagcgataagacgcagatattaagaccccgataaaatagccatcgaggtgcagaaagcgcgggtcgcaagtgcgaaaattctcgatcacttgccatttagatatatgtatatgccacgatttaagggctatatttaggcccgatcccagacagatccgccaatgcacccgccaaccttgaacttacaacacacaccgatataaacacatacatacatagtacatacatacatacatatgcacttgcataacggccagacatttttgcatttgcatatcgccgcgcagtcgactaaatcccatttcgattccgatccgctccgattcacctatctatatctatatagtcggcgagcgtctggtcaggtgcggaaaactggaattcttaatcagtcggctgtcgacttgtatcggcagacctgaaatcaaagtagtaacgattttgtcaagtatgtccgactcgtttgccggccattccactgataccctctataagcagcggggtatatgggttactcggtcgtatacgtattctcaaattatgaaagcacatacaaggaaaatcgtttgtggtttgacatgaattatgtttattaatgaactcaaatacatttaagtattaagtataaaacaattttaacttgaattaaaatacagtagacatctgaacgtttgtcataaacttttcgatttcactgccttcatttataggataaatgtcatgtagttaacacggatgtattaaaatgttagtaatatttttaaatatttctccttttaggacttggtctgaaaataagaagcatacttttaggatctttttaaagacatttcaaaatactgtacatcgatgaatatttccaaacaaggaattgtttaaaaaatctttaccatagctgtctatggtattattttcttatagagtatataaatgtaaaagtacttacatttattattattattttgaatttttataataacttctgaatatttgtttatatttttcaaaatcaaaaacttctaatactatttttaaaacaaataaatccccgggtaagaacacttgccactgctatttgactttccgttgcaattctcagctggtgttacgttcctggccaaacattgttgagcgcccccaagatcacttgacttggtagccctcttgggtagccagacgtgcagcttccggctggttaagtcaggtgagcctggctgagatcggctgaggtgggcacgtcattgtcacgtttcgtttgtctacgattcgacgaccagcagtatacatattgtgcaattaagtcggggcgggctcaattgtcgcttagactaatgcatatgcaatgggcccataaaacgaagtcaaataccgatccgcgcgacttgatttctagatacacagatacccagacacgcccctccctttggcagccctgctaaacaaacgatcgcaattgaactcgtagagatacatagatacaaatacatatatgtagatacatagtttcagagaacttcgcagatttgcaatgacgcagtttgcgcttggtgcgcatattttttccactaactgtaccgtggttattccatattccgttgtgccccaactcaatcaaattgccatactgatatcgatatttaaatgataactgcctccgatccggtaaattgattgattatgtatgagcggctgtgaggaaataaggtatttcatttctccgcctggtgttgcactttattttttccactgtgcctaggccgagccctctaaaaaaaaattttccattgctggaaattgtttattgacttgattgactttaacttgccacacagacttttattacggcaaggaaatcaaatcgttggtgtatgcaaattaatcgtaccgctgccgttctattgactgtatttcgagctcctaacttacgcaatctaggccggctataaacaaagcgaagatcaagttttatgacgcccgccgtcactcgattcactcgattttctcgaaaaacacctgtgtcaatgtacgagcgatgccgtacgcgtaaaaggtgaaacccaagcggtaggttcccgcgggcaccggcatgctgatctttgtgaaatccagggcgaacttctccaccgtcatgtgattctggaacaatatggagtgataaagggcgcaagtcaaagggaagtcgattatgtcgagtaaattctattcatattcattacaatgcagttaaccgcagacactcgtgatttttaaaaatttctgttctgcaatgaagcgttaaaagccggatgaaactaaaacattaacctcttatcgaaataccattacaactttagactgatagaatctttagttcttcaaaaaaagatgtgccagattacaaagaattccttattcacttacctccttccaaggacacgtttgattaaagttactctgcttgcgaatagcatcaaagatgaatcgttcgaaggacaaatcgtaattcctgctggccattagtttgcagaaatcaaagagtatgtagtacataaagggtcgatagccatcccgccgttgaaagcactgcaatctggtggtcagattgcgaatgggtaactgaaacaggctgaccttcagcgaaagttccacctgattcctgcgaaccaccttcaaatgacagtattcatatttggtgagaccgcgagatgtgggcaaatccatgcacttgacattggtgaacttcaggagacgagtgccctacaggataattttaattaaattttaaaaaatattaataaaaaaaaagcgatcataccattgaatcctgcagcagaacagatagaaacagtaaatataatggcccattcgacggcatttggaatgagtgaaacaatggcttagacaagcaaaaatgtttgaatttacaacttcgtaaacgataatcgcaaaaattcgataaaattataattatttccaaatgttcaagcgattaaaaaatcgttaaccaaatacaacgccatttctggcaactggagttcaaatcgcactagttcaaagacccaggaaaagaacagtcaagcattttgctgtatatagaacgtatttaagcccccgcgattagagccatagttcgtaagcaatggctattgacttctacttcaattacacaaaatcattaaattcttggaagtatgttaacaatttcctgttcttgtgatcgtttttcgcttacacaaaagtgctaaatccaggggaaattgtgaggcgattttcacaccaaaaaaaaaaaaagaaaaacataactccttgactcacgcggggtgtacaattcgcttgttatttttttttcgctggttgtacatttgttttttcttttcaatttttctacgggtcagcgaaatgcggcgatgcaacgccagccaaagcggcgtatacgtgatgcctcacaagccattcggtgacgacgcatttaccttagctgcttgttctgttgattgtcgttttcgaaggtgtattgtaaatttctgccgatgcgatcgtatttcgaaatgtcaacaccaacacctgcagtaggtaattcaagcggctcaggtgatgccagccagctacacggcaagaaaataggtcatgtttggaagacatacctatgtatatacaaaatgctattatgctattatcatggaactttaggaatgctcataaaatctgagactaccccagtttcacatacttcaaatctagttttagaatttcgaaagaagctataattccagcatataacgattacattttcccgcagtacctatataatgagccaccgattgaaccatttttgcatggacttgtcgaatttcgacggtgattctgagaaaataatttttttttttggccgccagtgaaaaccgacgcgttcccaattcgggccgcccagtacagtgacctctcccacgaacaacaaccgaaaataactgaaacgaaatgcggggaatggctcgctgatttgtgatttactttgcacttattttttatgtatgcaccaccttttgttgaatgaacgtttttgccgattttggtgtgaatattttctgaatgaaggcatttccgctggccaagaacattcatatcgaataactgcaatcggaggacattttcaatagcttttggccataatcaattcacgggaaatcgcgccggtgtcaaagatgcatttgcgtcacggaatcagggatttgaagctgttgccattttaagctaattgtggctcaaagtcgccagtgacgcgttttgcgaagagcacttgcgggatcactcattgcacttttctacagttctattttcgaagtgtcttacgagtcacttgaccttttcaccccgatcggttgattcaattaagtcgatttttgaattacctactgagggtgtaagtatgaatgtccaccaggtgattcaccaatcaattcaagatgtttagatcacaaaatatgcgaaattgtaatgattctgtcaaatttaatatatttaataatcaaaaaaataaaagtaagaggcatttattattattattattatccattgaataattgaaatacgcatttcgtcactaaaactgatcttataaaacttatcttatatttagttcttttaatgttcttatggcttttgctaacgagtattttctatcttatccagattcctgccttcgctgccaggcggacaacaagcgggatgtgatgggtcgccaggactgcgtggtggtttggggcgagtgcaaccactcctttcaccactgctgcatgtcgctgtgggtcaagcagaacaaccgatgcccgttgtgccagcaggagtggtccattcagcgcatgggaaaataaatatctccacctgatattactttatgctgtgtctaaaaaaacaactataaataaaaaattaaaagtataaacatatgttttcagggttgaattcagaaatcattgtaaccaaaatcatacattaaaagaagaacagaatccttgttaaaaatccgttttaaaaaatcaaaaaagtttacatgccccgggtgaggctcgaactcacgaccttaagattatgagacttacgcgctgccaactgcgccaccgaggctatgatacaaggcaggctagcgagaacttaaatccgtaaatgttctacatcgagaacaaaagatgttcttaattcttgagcaaggcatcgatggatcatatgatgtacttgttaaataataaaaaatgagtgaaagctgttttatccgttttgcaactgctagaactccccttagctcgtatgagtcattggaaagccgtccaccacctgtccctttggcgcagaggatagcgcgttggacttctaatccaaaggtcgcgggttcgatccccgcaagggatgaaatgattagttcatgtcattatttttggcgtatcttttttttttattggtaacaactttctaattttgataacaaatcatggtatatgtttaggccttgggctgtagcgacggggagaggttgcgttccagtacgggactactcagtcgtaatttttccacattagcggcatctgtattcaaactttcttctgtcaaccgtttagcgcgcaactcttgtatggatgctattggagatttgagatatgcgagtttgtttagcaatgaaattccatttcgcaatttaaaaactcacgactgtatggggtgtatttgtcagatatccaactctctatgttatagccaataaaacccacaacgccggctatgggcaacgtgatgtaaacggcgttacgcctaattagagccataacaattggccacatcttgattaatattttcggttaatatcacaagcaatagaccaggaaaaacacgaaatgagcggcgtgaagaattataaaatcttgtgaacagctgatggagc

SEQ ID NO: 19250 - DNA, 498 bp, DROSOPHILA
aacaaaaagggcacattatgtgctaagtaataaatagaagccttgacctacgtgcaaaaatgttcaacgcgcagcaagtgagtttcgatatcgtttgttttcaaaacaaatgcaaaataacggaactctgaaatggcccaactaattcttttaatcgatgtattccaccctgctcgagaacttgccacgtggaccgtttcaagttgcgctccgacggcgccaagaacatggcctcggtggcgcagttggcagcgcattcctgccttcgctgccaggcggacaacaagcgggatgtgatgggtcgccaggactgcgtggtggtttggggcgagtgcaaccactcctttcaccactgctgcatgtcgctgtgggtcaagcagaacaaccgatgcccgttgtgccagcaggagtggtccattcagcgcatgggaaaataaatatctccacctgatattactttatgctgtgtctaaaaaaacaactataaataaaaaatta

SEQ ID NO: 19251 - protein, 97 aa, DROSOPHILA
MYSTLLENLPRGPFQVALRRRQEHGLGGAVGSAFLPSLPGGQQAGCDGSPGLRGGLGRVQPLLSPLLHVAVGQAEQPMPVVPAGVVHSAHGKINIST

SEQ ID NO: 19252 - DNA, 4461 bp, DROSOPHILA
attattatttatacccacacttatttcttgttcgcgcttcgctcaaattcgtcacacgttcgatcgattgccttttttaaattgcctttgatgacttttcatttaagttgaatgccaccaagtgggcggtgggtgattggggcgagggtggggatccggctccccaaaagagcttaaagttgtgtgcgcatttcaattaaagcccaatcgcaaccttgatgtccgaaactctgttttgtgtcgagagtctcgtaataaattccactgttgttctatttttcacgtgcaaaacgacgccgtttcggttttattttcggacaaatcaaccagttcctgttgcagtaagtgatttagaaaataataaaactcaaaagccaaaaataagcagaagagcgctgccgcaacgctgaaaagccgggagcaacgtattgaagacgcaatttgtgaataatttaatcgagcgttcacacgacgccagctgtgaaaataaagagaaagagagagagagtgtgtgtgctgaagagttaattgaatcggcagaggcaacagataagaaccgagtatgtttgccagctccgccgagacgggcgtcatggaggtcggcggcaccagtggcaccggcaccggcagcagcagcagcaacaatggcggcggcagcagcagcaacagcggtggcgccggtggcagcatcgagctgctgtgcccgcccagcggcagcagcagcatcagcggcagcgccagtttcagcagcaacagcggtgccagtggcagcagcagccaaacgcacagcacggccgtcagcagtgccacagatcgcagcaacaacaacggcaacaatcacaatccgagcttacaactgaatggtaatggtggcagcaacacgaggcaacacagcagcggcagcaacagcagacaacacagcagcagtagcagtaacagcaacagcagcaacataagccctcctccaagcagcagcagcagcagccgcagcaacaacaacaacaacaatcacagcagcaacatcattagcggcttttgcagcaccatttggcgttcggccacatttggcagtgccacgcccgtgattaaccccttaccagcggtatctatcaaccccaagatcatggagagcagcagcgatagttgctccttgagctcctcgaccacaccggacgttggcctggctgatcagcaaaggaacatggccggcagcgctcaagatcagtcagaggatcagtccgtaagaaaacacaattctgaaaacaaaaaacaaaaaacagatgatcaccacgagatcaagccaaacaaacacctatcgttttaccaccttcgaagacattttttcccacttcagcggtcgtatattatcatctgatccagcattttgtacatacagctcaagaaacctactcagaaacccactcgaatcgctctgtcgctcttttttcccttctatatctatcgtgccccgaagattccaccattaattaatttgttttgctccggaattcaattcagtttattggttttcatgaatgttataattttgggaccactcgtggaatcagtcagttgattttgtttagccatcacatctccgattgcgaacttcacagccatagaaagtgaacatgtgtgctcgtttgtaattccatcactcatccgccatgttgtgtccgtttcagcaaacattcctaggcgccaccgaactggacgatgagttaatcaaacaactgccaaaggaggtactgctgcgcgtcttctcctacctggatgttgtctcactatgccgctgtgcacaggtaaatgaactgggacaagttaaatgcccgccccattttgggcgttccgtttttccgccactaatgaatttttcatgccacaggtatgcaaatattggaacgtgctggccctcgacggttccagctggcagaaaatcaatctattcgactttcaacgtgatatcgaggtgagcgtggggcatctaatggttagagattagtgggcatacttattttaataaaacctattttaaaaaatgtattattaatacacatttaatgcaaacagggtccagtgattgagaatatatcgcagcgatgtcgcggttttctcaagtcactgtcgctgcgtggctgccaatcggtgggagatcagtccgtgaggtaagtatctggccaagccactatgcacacgaaagcacattaatccgataactgtgtatgtatttcagaactctagcgaaccactgccacaatatcgagcacttagatctgtcggattgcaagaagataaccgatatatccacacagtccatcagcaggtattgctccaagctaacggccattaatttgcactcgtgctccaacataacagacaacagcttgaagtacttatccgatggctgtccagtaggtttacttgcataatccatacgatataagcatactttatcgggttgttcccgcagaatctcatggagatcaacgtgtcctggtgccacctgatctccgagaatggtgtggaggcgctggctcgtggctgcgtcaagctgcgcaaattcagcagtaaaggttgtaaacaaataaacgacaatgccataatgtgcctggccaaatactgtcccgatttaatggtgctaaatctacacagctgcgaggtaagtttatacacgatatctagttaaatgacaatacgattttagaatcatttgccttttgcagaccataaccgattcatcgattcgccaactggccgccaattgccacaagctgcagaagttgtgcgtgtccaagtgcgcggacctcaccgatctcactctgttgtccctctcgcagcacaatcatctactgaacaccctggaggtatccgggtgtcgcaacttcacggacattggcttccaggcgctggggcgaaactgcaagtatctggagcgaatggacctggaggagtgcagccagattacagacctaacgttggctcatcttgccactggctgtcccagcttagagaaattggtagacttttcaagcaaccccgatcaatgaacactatttaacctcgtggcttttcaatagaccctatcgcactgtgagctgattacggacgatggtattcgacacctcaccactggcagctgtgctgccgaaattctgtccgtgctggagctagacaactgccccctgataaccgaccgaacgctagagcatttggtgtcctgccacaatctgcagcgcatcgagttattcgactgtcagcttatcacccgcaccgccatacgcaagctgaaggtaatataaagcaacttgatttcatcgattcgaatggtacatataatatgtatgccctcgcagaaccatctaccaaatatcaaggtgcacgcctacttcgcccccggaacgccgccggctgtgaccagcggacaccgaccacgctattgccgctgctgtgagattctctgagatacggccatcggcttcgccagaaagataatgcgaaagacagccacggactgatgctggcccgtgtgcatcgtcatgttcgccatggtgttcagcctgaccctcgtctcgatgatctgcatgtacttgctgggcctgctcgacgcggcgatgaccacatggccaccagattcaaattaagatccatccgacacagcagaaacagcagcagcagcagcagcagcagcggctcgatcgaaatcgaaaccttaccctagttttaatttaaagcgagtttcaaaaactcgcagaaaccagcatcaaattgtgattattttatttactatgctacgttatctagaccctcacttgtgtaaactgtattagcgcccacactctgtttgttattaactgcagcccgatgaattgctagcttatatagatctgtatatatacatatatgtagtcgatccacggcagcttcagatggttccgctgaatgttctgtgtctagcctaaaaaactgcaattatgtgcgtttagttttaactctcatacacgcatgcctgtattaaaagtgtttgctaaattatgactaaattaaaaatccatctggagcatgcttcggactttatctctcactggtcccaaaaaaaaaaaaacgaaaagaaaaaatactggagtttccaaattccgaaacatgtcgatagaaccgcaaagcgttcaaaacacttactatccgagatactattaatttcacttttagtctactcaagtctagtgccagctaaactgttcagcaattagcattatctatgtatagccatgtatattacacaacgaacaaaacgactcacactggatcatctttcccgaaacaccaagcattacccacgtcaataatccaataaatctatatacaccttttgggttcacacagatatttatacagactattttgtaacgtattatctaatgaaatatgtataaactggccacgaaagttatcgttgagcgataa

SEQ ID NO: 19253 - DNA, 1518 bp, DROSOPHILA
aacaacaatcacagcagcaacatcattagcggcttttgcagcaccatttggcgttcggccacatttggcagtgccacgcccgtgattaaccccttaccagcggtatctatcaaccccaagatcatggagagcagcagcgatagttgctccttgagctcctcgaccacaccggacgttggcctggctgatcagcaaaggaacatggccggcagcgctcaagatcagtcagaggatcagtcccaaacattcctaggcgccaccgaactggacgatgagttaatcaaacaactgccaaaggaggtactgctgcgcgtcttctcctacctggatgttgtctcactatgccgctgtgcacaggtatgcaaatattggaacgtgctggccctcgacggttccagctggcagaaaatcaatctattcgactttcaacgtgatatcgagggtccagtgattgagaatatatcgcagcgatgtcgcggttttctcaagtcactgtcgctgcgtggctgccaatcggtgggagatcagtccgtgagaactctagcgaaccactgccacaatatcgagcacttagatctgtcggattgcaagaagataaccgatatatccacacagtccatcagcaggtattgctccaagctaacggccattaatttgcactcgtgctccaacataacagacaacagcttgaagtacttatccgatggctgtccaaatctcatggagatcaacgtgtcctggtgccacctgatctccgagaatggtgtggaggcgctggctcgtggctgcgtcaagctgcgcaaattcagcagtaaaggttgtaaacaaataaacgacaatgccataatgtgcctggccaaatactgtcccgatttaatggtgctaaatctacacagctgcgagaccataaccgattcatcgattcgccaactggccgccaattgccacaagctgcagaagttgtgcgtgtccaagtgcgcggacctcaccgatctcactctgttgtccctctcgcagcacaatcatctactgaacaccctggaggtatccgggtgtcgcaacttcacggacattggcttccaggcgctggggcgaaactgcaagtatctggagcgaatggacctggaggagtgcagccagattacagacctaacgttggctcatcttgccactggctgtcccagcttagagaaattgaccctatcgcactgtgagctgattacggacgatggtattcgacacctcaccactggcagctgtgctgccgaaattctgtccgtgctggagctagacaactgccccctgataaccgaccgaacgctagagcatttggtgtcctgccacaatctgcagcgcatcgagttattcgactgtcagcttatcacccgcaccgccatacgcaagctgaagaaccatctaccaaatatcaaggtgcacgcctacttcgcccccggaacgccgccggctgtgaccagcggacaccgaccacgctattgccgctgctgtgagattctctga

SEQ ID NO: 19254 - protein, 464 aa, DROSOPHILA
MESSSDSCSLSSSTTPDVGLADQQRNMAGSAQDQSEDQSQTFLGATELDDELIKQLPKEVLLRVFSYLDVVSLCRCAQVCKYWNVLALDGSSWQKINLFDFQRDIEGPVIENISQRCRGFLKSLSLRGCQSVGDQSVRTLANHCHNIEHLDLSDCKKITDISTQSISRYCSKLTAINLHSCSNITDNSLKYLSDGCPNLMEINVSWCHLISENGVEALARGCVKLRKFSSKGCKQINDNAIMCLAKYCPDLMVLNLHSCETITDSSIRQLAANCHKLQKLCVSKCADLTDLTLLSLSQHNHLLNTLEVSGCRNFTDIGFQALGRNCKYLERMDLEECSQITDLTLAHLATGCPSLEKLTLSHCELITDDGIRHLTTGSCAAEILSVLELDNCPLITDRTLEHLVSCHNLQRIELFDCQLITRTAIRKLKNHLPNIKVHAYFAPGTPPAVTSGHRPRYCRCCEIL

SEQ ID NO: 19255 - DNA, 13724 bp, DROSOPHILA
tgtctgggtcgctgacgatttttggggcctgctatgtacggatatacatatgtatgtataatcgcacatacctacatatatacactgaaagcgcatgcgtttttgttgttttttggcgctccacgcctgttccgcttcttcaagaaatctgccaacaagtacccgagttgtgtgcatgcatatatactatatatcggtatatacgcgtatatatgtgtgggtacatacgaacgaacgctattttcgtacataaggcaaaacaacactcgacaacatggcatctcgaacatatggaaacgggttctctgtctctgtctttttctctttttatttaatctacgcgcatgtgtgtgtgtgtgtgtgtgtccgtgtttcgtgtatttgtgagtggcttttgttattgaatcgctatcgcaacaaaatttgctcttgccccactaaattgaaaagggtttcacaaaagcaaaccaaataatggtaaaaggtttcgtaacaatccaataacattgtgattaaaaacagataacatgccaacataacaatctctatgtattttatatatgcttaaatatactttatgtaacgtttttcatcatacctaatcactaaataggcaattaagttcgcattcacgactcttcactgtcatttgcagttctcgatctgtggcttacctatttactgggcttatcatatgggtttatttatttttttttcgcgttttgccgcggtgttggtgagctccatatgatttttgtgtacatttttggcctgcgcaacagcaacatgttgccactgggctggccagcaacatgttgccgcacaaataaacccacaaaaactactggccaaatgtacgacgtagttttccccgccaccgagagggggtgtgcacatacatatctatatctctagccacacagtatatatacacgtacatagtatatacataaacaaagcgctggctggctggctgctcagctgttttagaaagttgccgtcagcagcagcgaacggttcgcagcgcttggctcctccgctcattttttccattcatttcatttcgagacgtcgaagcgaacacacgcgtcacaagccaccgcgtacagaagtacagaagagcaaagaatacaaaaaaaaactctagagctgcaggaatacaaattctacccaataaaatatattttttcccagtgtgcgcgcgtgtgtgagtgaagtgcagagacgttccgaaaagaaaaatatacgacaacaaaaaataaaggccaaaaaatctaagcaaacaagtttgtttggctaatattaaacgcgtttacctgcgaaacacgaaccgcacacgaaatacacacataacgcgctgttcaagagcgttgagaattcaaatgcagctaagcgaacgcccaaaaatatgtggccactgccattttatcagcctcaggactagaagccaattaatccaacaaaatcaaaggcgacacaaatccgcgtcggttaatacctaaaacatgaacttgtaacaaccacttgagtgttttccaatctgcaaattcgcaccacacaaaatcattaagaaattgggaagttttcgaaaagttttcacagctacaaaacaaaacaaaaaaaaaaaggttggtgaacaaaaaccaaaataattgtatggctttagctgcctgccaagttagttgtttgcccatctctgtgtttgtggccactcagctggttagctgcgcatgtgttggtgacgtaatgcccgagcacacgccactaacacatgtgcagcgcaattggcgaggctccgcagcccccatcaccatttccaacccccatcacccactactacacagttcgcagcccacacagttggcaataattgaagatcgctcacaatgacagtggggtgtctgtaaaaggaatttttcagtcgcaattctatagaagaccttgacaacataaattattatactacaatttagagattaacatattcctccattggaaaaacctttttaggtattttacaattctaaagaaatagaaataagtaatcgattttataagaattctttcgtaatctgcataaaatagcctaaaaccccgttaagattaaagccttgaactaaaaacaactgttaccatagctaacctcaacccatttttgattgcttacgtaataatgcattcatttgatggaatatttgagtaaggtttttatatcagtcaatatagaaaagcttcttcgaaaagttgtacaaagttgagcttagggaacggggcctgtggctggtcacttgtgtaggtgaagcactttgggagactatgtgacgcccccttcgatgttatttgacacacacccatacacacaaacacacagacacacacggcagcacacataatttactgagaaggcaattcaaatcatgctctctggcccccctgttccttaccctctcccactctttcccccctcctatcgctatctctatctttccactccctgaaatgtggtttttgtgtgctgtaaagtcaggaaaactactcgagtttttttttttttaatataattgacacacattttctaattgtggcgttgcatttgctgtgtgtcaacactttggttgctgctttgcatgggggcacttactatgtatccactctgcttttgaacttctttattcgtctctcccccgtgtaacctgtttgactcaatcagctgtgcggaaacaaaggcaaatgacaacaggcagagatcatgaaatcatgtaacagaaagctacacgagctctaagaataaaatgcgcaatactttaaaccacccacgtgtccgggttgttagatcaaatctatataaaaaaaaggaaggtggaatatgtgatgattatgtatgatgtacttaaatgttatacaattaagtttcttaatttttgaaacagaattcatttaaaaattgataaattactcatgtaacttattatttaagtttttaattctctttatcgagtgattacattaaaaataaaggtcactttaaaagcaatacaaagaattgaaacagaacagtatgttgataaactttcactatctgtgaacctgccttttatataagtgaaagtgtttatttcttcgtttttggcagataagcgatataaaaaaaaaagaaaatagccaggtcgaaataaaagaaaaacaaatagcaccagctgttcttcttgaaaaattgaactttggttaaagttttgctgcggtttttacacgtacactcgaccaatttatatcaattcagatagggcaaaaaaaaagtatgtacataaatgaaatgtaacgaactcggaccctcacacacacacacacacatgcatacatttgtcatagtaattttatacgtgcgcagttgaaatgtaaatgaacgagggagagggaattactgggttagggggcgtcagaaagagaggcaggaaaaagaagtggagttggaaaaatatcaagtgaataaggtggcgagcgagggagagggaagatcatgcggatgggggttaaaggaaggcattaacacgtcttgcggtcatttgcttttcgagcgaataagtgcgtgtgttctttttactttttgctctcgatttgcaagaaatattttggctaaaaataaaaacgtgctcgtcctgttctggctggctccctcttcatccagccctctttctctctttcgcccactccagctgctggccccaactccccatgggtgcgagtgagacgcgctcacgtgcgctcgcattacacacactcgctcacccactcacacacacgtggaggaagaagagcaccataactggactgcgtttgtttacatttttgctttgtttttgccttattgtttttgcccactttgattttgcacccgtgtttttatttttatttactgcgcacatgtgagcatcagcatggcaatgtgggtgttcatgggggagagagggagaactgaaatacctcaactttatttgttgtgtaagataatcagggtgcctcacttcccgtaaaaataagcattctcaatgttacatatcctcctcaatttataactatttaattgcaaaggaatttccttttctaatctattttctatttatcttttcgtttcagcaaaaaaagcaaagaataatggaattttaacaaagttttgaaaggtaagtgagggggattttataaaaataaactcgcttcttgatatgataacaagttaattattatgttaaaaatgtatttaataatgtcatttgcatttatcgcgcattttattaaagtatttagggtaaagtctatttgaaacttagaatatgttagtaaattcaaactttttgaagttttaacgctatatcatgtaactctctgtcgtgtgaccatgctgataagccgtgtgtaacccaacaatgtgttctttgtgccgttcgtaggagaaacagcgatagatagagaggatgaggatgtctgataaatggggtgggctacatgtaacccacaaaggtgcggccccctagaaaacacaaaaaaaaaaccaaagctcgctcagctgtgaaggcttatgattgggagggtcaccaacacatgagtgttcaaacacgcacacacacacaaagaaaatgggcttttgtaaggtcgacatcgaggtcaatcagtgtttgtggaacagcgattgtcttgaagtcttcctgggaaatgaaaattgaataagacatacagacaaaaatacaaaattaatgctattcaggcagctgtttgcatcgattccgaataaagtttttaccaatttaactttaaatgtaataaaaaaataactcaaatactaataaagcttatattcattttcatgtttttaatagttactttataggttaataagccttgaaagggcattaaaaaacttcggttttaagatgtttctgacttaacttcactgcatctcaacaaatttgttgcgacttccgtttaagatgacacatttccaacttaacgaacttctgctactaacgagtataagtataattaactttttacggtgacgcattcggcaggatgactaaagggaaacaaaatcatatgagatgatgttgaaagcaataaaaaaagtcattctctttgtctgtggctttcgttgcactcacgtgttaactttacttttttttgtttcataatgccgaaaaggggacgccgaaatggaaacctcaaaaacaaacgaaaggcaagcggaacttgtttttccgaaaagttgcaacataacaattttccactcgcggtcgtttttcgttttcttatctgctttgaactggttattttgtgtgcagcagcgcccctggcggcggttttcgttacctgcctttcactccgcttggcgcgccttcaaaatttgttatccgttcgatttctataccctcacagatagtgtatctatcagtttgtttttcccatgatatgcaatttagatcatgaatataaaaattcataaaaaatacatatttattgttactagaaagtgtagttctgggtgtgtagcacaaaataagtgcattaaaaatttattataattttgtacatatatgaatattgaagtatgtactttttcttttttattttattcaaagcagggtataaaaagtaaagtttggcttttcatttcccgcattcgttttccttctgccattcgcctcgcctgcattttccgcttggtaatcaaattttgtaatgtgcgtcaaaaaaaaagggaaatacacgcaataataaaaggggaaaaaatcaaacgaaacaaaaatgtgcaataaataaataattcaagcaagacaatctacgtacgaacacaagtgcagcgcgcacgttgcaaaatcaaaaagcatgccaaggacgttggccgagctaaatgaaattagtccaacaatgcgccccctgccccaccagcttttccgcccctccgcgccccctcctcccgcctttcggcctgctctcgatcgctttgccaagaagaagtcatgacaattatcaacaaagtgtggcagtcgaggaggagggaaacggtgcaaagactaagactagcatatgacaaacctttttcgatcaacttaattgctgttgctcttacatctgttttttgcttaaagtgcaattattttagctggcattaaagatttcctagtgcaattagttacaaggctactatctactgaaaattgcctcaattagttttttttttttttcacttttgccaacaaaaatattttgcttttacagtcgagataccttcaaaactattggcactaaaatgcataattttatttaactaaaatgaattacaccaattcgattatatatttcagataaatattctaagttaacttaaagaaatatattcctctgtttcaattacataataaaaatgtgtcataataataaacaatgacatctgatgtctaaaataataaatatttccccacgtgtcccatgcgattttccacgtttgtcattttccgacatttcctcgaacatcgcagcgcgtttttcgtccaactgcgtcatcgagtataatttccattttcgggtggcaagcgaatattccgcctgtgagatgtaaatgataatggccagctgaaagggacggaaacagaaatgaaatttgctataatgtaatcgaaatattattaaactcgccgttccgttcgcttgtccccatttccatacgggttttcacgtttgtatgggttgtctattgtgggccaagagtattttatatagtatatgtgtatctatataaacgcgaatgtgccataaacaaaactcaacacacacacacacgcacagcaaacattgcaaagcaatacaaaaatcagatgttttctaatacaaacacagagggagtccaaaagctctcgctctcttgctctctttttttgccttatgtattgtgtatgcaggtcaagaagaaacgcaaaaacaaaagcaaaagtaaagacaaacatgtttacccaagagagcgcgcgctctctcactctctctctctctctcttcagctagcaacatgttgcacgcgacaatcgccatacatgtgcaccacttgcatatctgcctcttaagttggttttgtgtttctattcgcaattcgcgattctgctgttgccaagcaaagttttagaaagaaaaaaacgcattaatagaatggcgaaacgcatgatgagttcgtgtagccaacacagattttactctttccaacattattatctggatatgcaacacaaaataatataaatctaatcgattacatacatgtctaatatttttaagttccaaataaaaccagaagtttttctaaagaaccaaactttttaaaaatctagtttaaaatagtagatatatgaacaaatcaatttgtagtgtattcctgtagaaggcgccacagaacgaccttcaaattctcacacagatgcacacccacacaccagtgcgctgctgttgcgaagcttggctcaatgacgtcacacgctagcaacatgttgttgctaagctgtcgacccgtgtgaatttgttgggtccgaaagaggggggggggggtgtttgatgcattgtgcattgccaaacggctgacatgttgctcctaactgggtctccggttaagtaacgacctggtttccaactctgttcgttttttctcgcttattagtgagcatgtgtgttgggtgtagtgcggtgcacaagatgatttcaggccaaaatgggaccgtgtcagtgtgtcgcagttaaacaattggccaagagaattgtgctagtcttttgttgcttccgcaccggaaggataaaccaaagtaaaccatgtcaggagtacataatgtccagtacatagcggacagaccttgcggattcgattcaagttgagggtgctgctttcgccattcgaccttcaccacttgcagtgggtggcggtgggttggcatctgccagctgcaactgttgctgggcgtatttatggagcagccttgctgattttgcaaggaagtcaaggatacattatacataagtctgccaacctagttttatgcaatctagttcaatcctagttaaagctacaaattagtcaagttaaagcatctaaaaatcaatgcactgcaataaacctaatggtaatagtgttaactatgagaagagagtcatggtgttaagtaatatataaaacttaaggcataaattacttcgatcttctattaaattcgcgtttttaaagttttttttttttatttttccagtgtacttctggtgcaagaagcagcagcagcaatagctagcggaatcggattcggaaacggaaatagcatcagatccagcggacaggcaatcaaccgaccgaccatgataccgacaagcgtcaccaactcaccgccgccagcgggtttgggccagaatggagcatctgcctccttgggctcggctactgcggcggccggaggagggatgctgtccggcttgggaatggtggcggtctctggatgtgggtcggcaggaacaggagctcagaataactacggttccgttgtgctcggcttggcctcgctaatcctcgagggcagacccattgccgacgatgagtaccagcagcagacggtgggagtagtcggttcaggagcagcaacagcaggatctgggggaggacgcctatcgccacgaccctccacctccagggcggccattaacatcacaacgaatccctatggttccatgggaggatcggaaaatagagccgtcaatggaagtggttcgactgggtcgcccagcagtagttcgctaacccaccagcgatggacacagaagctctgccagctgcgtcagatttcgccggctgcccagacgatgagcgccgaaccggagttggtttctttggccatcaatgatcttaacaaggatcatggcgattatgaaattgtacgacgtgtcatgctcaatcgagctggtggaacgggtttggttagcagtgccggcggtggaaccaacaattccagtgccgccagttcgccgggctcgaattcatcggacaacattctccactcgctgcaatcgctggccaccacctgcttaagaggtggacctgccttggcaccgccaccatcagttgagtcaagacctctgaatctggcctttcattggtcgggtttggggggatccggtggccgaggattgggatttggaggaggagcagcaagcattagcaacacaccaacaacaacggcaactgccactgccagcagcggagcaagcagctccgcatcgcggcccaaacacgggccgcactgtgatcagttcctcaggaagatgggtctggccaagggcgagatgccatcggaggctgaggagcacatctgtgatatgtcctacgtgaatatgaccgtaagtcgatgaaaatgacttacatacttgctcaaatttaaatcttgaattattttttagtgcaaccgttggcgggcgtattgcatgaaaatggaggccatcctggccagacgcgaacccgtttgcatcgaggtctatctgggtcccgttagccacaagctcttgctggagcagtggatcatatgcggcagggagaagtaagacttgaaggaatacctttatcttcaaatctctaacttcacctttcttctttcaaagagttcctccacccacgatgacgttgccttcgctgtgcagcgccattcggagtcagttgtacttctcccagatagtggcctggtgtgatctccttcgcaaatgtgatccatcggtgtacgatagtggtcgcgtcatcttctccaattgcggcaacaatgctggagatttggctaccagctatacaacgtgcggtggacagaagagaccacgtcttaacatcttctaccggatcaagcagcacaccaccaccaatagcaatagtgggctacaccaggaggatggcttcagtgccaaggccaatgtgcacaattttcccaacgtcaacgtttcggagagctacagcatctcggttagcgtgcgcagtttgcccaggattaatggtggcctgccgcatgtggagccattgccacctagtccagctccacgaagcttgaggccctgcggaggagatccggctagtacgcccaccggaggcggtggacttcatgctgccacgccgactggcctgggagccaggactagtgcccttaccccaacgacaacggctggcggctccaactgtgataatggaaaaccaggaatgggacagatattggacgaactcgatggggatacgagtttgagccatcgggagaggcagctgcaaaagtatcgcaagcgaatgcagcgtagggacaagaagagggagagaaaagctacacccgatcggctaaatagtcgacaacaatccgaagaaccaatggatgagggcgaggagtcacagacgcagtctcagacgacgtcggaaacgcaatcgctggccctgacattgcagcagccaaggcgcatcgccatgatctccacgggcacgcagacctctctaagcagttgccagcaatgtggcagtgagaagactcttctctgtctcagttgtacgggtggaggtggagcacatggaggatctaacggaacagccaatggatcaacaaatggagcaacagatgatggagatgatagcgataccacggcatccgaaatggaggaaacctcctcatgcagcttgagcagcgctgatctcattgtgggcacaccccgcaacaacgcggaactcttactacaggccatccaacgcacgccaaagaaccgaaatcgaaagccccatccaggggtcttggatcaagtctcctgtcgtaacgcagatctcaatggagggcagaacaacaatcttctgaaggccacacccgccaccagtggctgtcaagtgtgcaagcgacagaagacccagcacaactttgcaaacggaaaggttcaccaacccaccaatgggaagcaggcgagcaatggctatgccagcatgcatctggaggcggagaagcaaccagatgttgttcaggtgagttcttgagattaaaccgaagaatacgatttggtaacgaattggtatgcttacagattctcgccaccaagttgacgcccaacatcgaacgctgctccctgaatcctgtagagcgctgcaagactccgccgccgggagtggctgaccacatagtggtgcagttcaagacgccgctgagccaagtgccagccaagcatcaaccggatgcaatggtgccgctgcagcagcaacagctgggcaaatcctcatcaaagccagctcaacttagattaaattgtggatctaatttgttggaaagcgagacgccgccgcctatgacatcgccacaaatgcgaaaggccctgcccaaggtgaaccttacaacgatcttctgcagttcagcaccaatcgccatcggttgtcccgccttcagttttgatccagctgctttgagtcacgcccgttcgcagttgctagctccggatgtcagcgttacgccgcccgtgcagaaatccttctctgctcccacattgccacatgcagcttcattgtccgtatcgcccaggttttccaaacaagcgttggcagcacacaagcggcgctcccgtcatttgagcgatcgtagcgatcgaagttcacttggttccgacgagcagttgtcggatgaggatctcgaatctggtctatgcagtccagccggtggctcaccgttgaaatgtcgcgccagattggcggctcaatttggaggacgtccgttgctgggaaatctggaggaatctctgctgcagcgaaggcttatgcccaagatcgaggtaatgggctttacgctgcagctgggagcctccggcggattctgtcccacccaggtgaatatcccagccgtctcttacttctacgaactgcatggcgagacgctcagcacgccttatttggtaagtacctacaaaagcgcatcttaaggagactattagggatgatacctatacttttttaaattacacttttcatatttttccaactcaaaaaaaaactaaaaaaaatcttcagcacaacacagtaccagttgcctttaatttagttaggtttcttagataaatggaattaaggaatgtggaaaatctatttttgcagtgcgagattcgtttgccgcgcaagggttattcggttccaagatcgggcacggtacaggccacactactgaatcccataggcacggtggtgcggatgtttgtgataccctacgacatgcgggacatgccaccgctgcaccgcaccttcatccggcagcgcattctggccgaggagcttagccaggatcaggatgagggtcacaaagtgccgcggagtccaacagtcactagcaccaccagcaagctgggtcacttcatcagcgccgagcagatgaagcgactgcgctactccatacacctcaagtaaatatttcacacagatatcattatcatatatccttctcaactaactcgtcctttgcaatcaatcaattgcaggttccagacatcgcgctccggacgattgtgcctgcatacggacatccgactgctgatctcacgccgcaccgattgcgatacggcggctgcacacgcgaagggcgttttggaggcacccaatgagctggtcacggacacaatgatgcccgccgagccgcgctacagtgcgcgacaggagagcgccggcaggatttagtagctactgcaagccctgggcggcaccttcgagctgctgcgccgcctgtgcaagcagttgcagaacaagtggcagcagcgggaggcaagggagctctggcagttgcccagataccaattgtagaatgggaaggagaaggagaggaagcaggatgagaaacaggatgatacggagggcaggtggcgaaagaaactcctgtgtgtgcgtgtgtgtgtgacaaccaaccaattgctttactaggatatcgtttaatttatccctaagcttagtttcctttaatattttttggtatttgacctcgtgcgaggttttgttcgtttagtttgaatttgaactactggaaaatgtgtgcgaaaacattgcgaaagtaaaaaatgttgaatatgaaagccaagccatcgaattggtcggtcagccagacgagcgaaccaaaactatctgcatccgtatgtgcaactgcagttgtatctctctatctgtatcttttggggtccacaatacgcgggtcaagcggcgcaactagcaatacaaaaaaaaaaaactatgcaatgtgtgagtgtgaaaacgcaagggaggtaactacgtatatagggcatacatgcagataccacatacaatatatatatatatatatttgaatatatatttatgtaccataatcgtcgtgtagcgtcagcaattttaaagggcaatttgtgaaggggttagcgatttgtagtaggtttttgggaatagaatcgatcgatcagttggtgtgcgcgctcatatcgatcgttgttgttagtgtgtagtgtgttttaaccacagaaatttaagaataccatcgatttcgttgagtgcaagtttgaaatgaattaacccgctagtttcgattttaatttcgtatttccgttctgagagtgtttattaagcgtgcctgtgatacgatatgagctgcatgttgggggtgtttctaatagcttttagttaaatacaattgacaactacacattgtcgtttt

SEQ ID NO: 19256 - DNA, 4665 bp, DROSOPHILA
tcagcagcagcgaacggttcgcagcgcttggctcctccgctcattttttccattcatttcatttcgagacgtcgaagcgaacacacgcgtcacaagccaccgcgtacagaagtacagaagagcaaagaatacaaaaaaaaactctagagctgcaggaatacaaattctacccaataaaatatattttttcccagtgtgcgcgcgtgtgtgagtgaagtgcagagacgttccgaaaagaaaaatatacgacaacaaaaaataaaggccaaaaaatctaagcaaacaagtttgtttggctaatattaaacgcgtttacctgcgaaacacgaaccgcacacgaaatacacacataacgcgctgttcaagagcgttgagaattcaaatgcagctaagcgaacgcccaaaaatatgtggccactgccattttatcagcctcaggactagaagccaattaatccaacaaaatcaaaggcgacacaaatccgcgtcggttaatacctaaaacatgaacttgtaacaaccacttgagtgttttccaatctgcaaattcgcaccacacaaaatcattaagaaattgggaagttttcgaaaagttttcacagctacaaaacaaaacaaaaaaaaaaagaaaacaaaagcaaaagtaaagacaacaaagttttagaaagtgtacttctggtgcaagaagcagcagcagcaatagctagcggaatcggattcggaaacggaaatagcatcagatccagcggacaggcaatcaaccgaccgaccatgataccgacaagcgtcaccaactcaccgccgccagcgggtttgggccagaatggagcatctgcctccttgggctcggctactgcggcggccggaggagggatgctgtccggcttgggaatggtggcggtctctggatgtgggtcggcaggaacaggagctcagaataactacggttccgttgtgctcggcttggcctcgctaatcctcgagggcagacccattgccgacgatgagtaccagcagcagacggtgggagtagtcggttcaggagcagcaacagcaggatctgggggaggacgcctatcgccacgaccctccacctccagggcggccattaacatcacaacgaatccctatggttccatgggaggatcggaaaatagagccgtcaatggaagtggttcgactgggtcgcccagcagtagttcgctaacccaccagcgatggacacagaagctctgccagctgcgtcagatttcgccggctgcccagacgatgagcgccgaaccggagttggtttctttggccatcaatgatcttaacaaggatcatggcgattatgaaattgtacgacgtgtcatgctcaatcgagctggtggaacgggtttggttagcagtgccggcggtggaaccaacaattccagtgccgccagttcgccgggctcgaattcatcggacaacattctccactcgctgcaatcgctggccaccacctgcttaagaggtggacctgccttggcaccgccaccatcagttgagtcaagacctctgaatctggcctttcattggtcgggtttggggggatccggtggccgaggattgggatttggaggaggagcagcaagcattagcaacacaccaacaacaacggcaactgccactgccagcagcggagcaagcagctccgcatcgcggcccaaacacgggccgcactgtgatcagttcctcaggaagatgggtctggccaagggcgagatgccatcggaggctgaggagcacatctgtgatatgtcctacgtgaatatgacctgcaaccgttggcgggcgtattgcatgaaaatggaggccatcctggccagacgcgaacccgtttgcatcgaggtctatctgggtcccgttagccacaagctcttgctggagcagtggatcatatgcggcagggagaaagttcctccacccacgatgacgttgccttcgctgtgcagcgccattcggagtcagttgtacttctcccagatagtggcctggtgtgatctccttcgcaaatgtgatccatcggtgtacgatagtggtcgcgtcatcttctccaattgcggcaacaatgctggagatttggctaccagctatacaacgtgcggtggacagaagagaccacgtcttaacatcttctaccggatcaagcagcacaccaccaccaatagcaatagtgggctacaccaggaggatggcttcagtgccaaggccaatgtgcacaattttcccaacgtcaacgtttcggagagctacagcatctcggttagcgtgcgcagtttgcccaggattaatggtggcctgccgcatgtggagccattgccacctagtccagctccacgaagcttgaggccctgcggaggagatccggctagtacgcccaccggaggcggtggacttcatgctgccacgccgactggcctgggagccaggactagtgcccttaccccaacgacaacggctggcggctccaactgtgataatggaaaaccaggaatgggacagatattggacgaactcgatggggatacgagtttgagccatcgggagaggcagctgcaaaagtatcgcaagcgaatgcagcgtagggacaagaagagggagagaaaagctacacccgatcggctaaatagtcgacaacaatccgaagaaccaatggatgagggcgaggagtcacagacgcagtctcagacgacgtcggaaacgcaatcgctggccctgacattgcagcagccaaggcgcatcgccatgatctccacgggcacgcagacctctctaagcagttgccagcaatgtggcagtgagaagactcttctctgtctcagttgtacgggtggaggtggagcacatggaggatctaacggaacagccaatggatcaacaaatggagcaacagatgatggagatgatagcgataccacggcatccgaaatggaggaaacctcctcatgcagcttgagcagcgctgatctcattgtgggcacaccccgcaacaacgcggaactcttactacaggccatccaacgcacgccaaagaaccgaaatcgaaagccccatccaggggtcttggatcaagtctcctgtcgtaacgcagatctcaatggagggcagaacaacaatcttctgaaggccacacccgccaccagtggctgtcaagtgtgcaagcgacagaagacccagcacaactttgcaaacggaaaggttcaccaacccaccaatgggaagcaggcgagcaatggctatgccagcatgcatctggaggcggagaagcaaccagatgttgttcagattctcgccaccaagttgacgcccaacatcgaacgctgctccctgaatcctgtagagcgctgcaagactccgccgccgggagtggctgaccacatagtggtgcagttcaagacgccgctgagccaagtgccagccaagcatcaaccggatgcaatggtgccgctgcagcagcaacagctgggcaaatcctcatcaaagccagctcaacttagattaaattgtggatctaatttgttggaaagcgagacgccgccgcctatgacatcgccacaaatgcgaaaggccctgcccaaggtgaaccttacaacgatcttctgcagttcagcaccaatcgccatcggttgtcccgccttcagttttgatccagctgctttgagtcacgcccgttcgcagttgctagctccggatgtcagcgttacgccgcccgtgcagaaatccttctctgctcccacattgccacatgcagcttcattgtccgtatcgcccaggttttccaaacaagcgttggcagcacacaagcggcgctcccgtcatttgagcgatcgtagcgatcgaagttcacttggttccgacgagcagttgtcggatgaggatctcgaatctggtctatgcagtccagccggtggctcaccgttgaaatgtcgcgccagattggcggctcaatttggaggacgtccgttgctgggaaatctggaggaatctctgctgcagcgaaggcttatgcccaagatcgaggtaatgggctttacgctgcagctgggagcctccggcggattctgtcccacccaggtgaatatcccagccgtctcttacttctacgaactgcatggcgagacgctcagcacgccttatttgtgcgagattcgtttgccgcgcaagggttattcggttccaagatcgggcacggtacaggccacactactgaatcccataggcacggtggtgcggatgtttgtgataccctacgacatgcgggacatgccaccgctgcaccgcaccttcatccggcagcgcattctggccgaggagcttagccaggatcaggatgagggtcacaaagtgccgcggagtccaacagtcactagcaccaccagcaagctgggtcacttcatcagcgccgagcagatgaagcgactgcgctactccatacacctcaagttccagacatcgcgctccggacgattgtgcctgcatacggacatccgactgctgatctcacgccgcaccgattgcgatacggcggctgcacacgcgaagggcgttttggaggcacccaatgagctggtcacggacacaatgatgcccgccgagccgcgctacagtgcgcgacaggagagcgccggcaggatttag

SEQ ID NO: 19257 - protein, 1297 aa, DROSOPHILA
MIPTSVTNSPPPAGLGQNGASASLGSATAAAGGGMLSGLGMVAVSGCGSAGTGAQNNYGSVVLGLASLILEGRPIADDEYQQQTVGVVGSGAATAGSGGGRLSPRPSTSRAAINITTNPYGSMGGSENRAVNGSGSTGSPSSSSLTHQRWTQKLCQLRQISPAAQTMSAEPELVSLAINDLNKDHGDYEIVRRVMLNRAGGTGLVSSAGGGTNNSSAASSPGSNSSDNILHSLQSLATTCLRGGPALAPPPSVESRPLNLAFHWSGLGGSGGRGLGFGGGAASISNTPTTTATATASSGASSSASRPKHGPHCDQFLRKMGLAKGEMPSEAEEHICDMSYVNMTCNRWRAYCMKMEAILARREPVCIEVYLGPVSHKLLLEQWIICGREKVPPPTMTLPSLCSAIRSQLYFSQIVAWCDLLRKCDPSVYDSGRVIFSNCGNNAGDLATSYTTCGGQKRPRLNIFYRIKQHTTTNSNSGLHQEDGFSAKANVHNFPNVNVSESYSISVSVRSLPRINGGLPHVEPLPPSPAPRSLRPCGGDPASTPTGGGGLHAATPTGLGARTSALTPTTTAGGSNCDNGKPGMGQILDELDGDTSLSHRERQLQKYRKRMQRRDKKRERKATPDRLNSRQQSEEPMDEGEESQTQSQTTSETQSLALTLQQPRRIAMISTGTQTSLSSCQQCGSEKTLLCLSCTGGGGAHGGSNGTANGSTNGATDDGDDSDTTASEMEETSSCSLSSADLIVGTPRNNAELLLQAIQRTPKNRNRKPHPGVLDQVSCRNADLNGGQNNNLLKATPATSGCQVCKRQKTQHNFANGKVHQPTNGKQASNGYASMHLEAEKQPDVVQILATKLTPNIERCSLNPVERCKTPPPGVADHIVVQFKTPLSQVPAKHQPDAMVPLQQQQLGKSSSKPAQLRLNCGSNLLESETPPPMTSPQMRKALPKVNLTTIFCSSAPIAIGCPAFSFDPAALSHARSQLLAPDVSVTPPVQKSFSAPTLPHAASLSVSPRFSKQALAAHKRRSRHLSDRSDRSSLGSDEQLSDEDLESGLCSPAGGSPLKCRARLAAQFGGRPLLGNLEESLLQRRLMPKIEVMGFTLQLGASGGFCPTQVNIPAVSYFYELHGETLSTPYLCEIRLPRKGYSVPRSGTVQATLLNPIGTVVRMFVIPYDMRDMPPLHRTFIRQRILAEELSQDQDEGHKVPRSPTVTSTTSKLGHFISAEQMKRLRYSIHLKFQTSRSGRLCLHTDIRLLISRRTDCDTAAAHAKGVLEAPNELVTDTMMPAEPRYSARQESAGRI

SEQ ID NO: 19258 - DNA, 3205 bp, DROSOPHILA
ctgcgggtcctgcgattactgcaacaatttcgtaatcagcggcggccccaaaatggaaaacccaccacacaggacccggagagcccagttttccgtgccaaatcgagagagagaacaagagatacaagagggtccttgcgctcagttgacttttttctgcgggggcgtcccaatgttgccagcaacatgttgccagcaacatgccagccgtcctgctgttgcttcagcatcataaatattcaacaaagttaagttgtcatagctagttgaggaccgatttcccacactccacaccccccggaaatgccgacagcagagtggggtctctgctaaaagccgaacgaataaaacttcaattcaatatatttccagccaagtcatgggccaaggggcagatgggcatggaaatttctacggctgatggccgtcatctggtatgcccgaaaagttagttacattggtactttcaaagggactttccttttctttttatcgaccacaggaagtaaaacaagccagttaaaattaaagttggacttttcgacgtattgaacattgtacatgcatcataaaaaccaacatacatatgtaggatcgatttcttatgcttttatcatgttcatttcaaattactttcttacagtgtaccaaagggtggggtcccgaaggagcgaggcattccacacaaaggtgagtaatgacccttgaagctggattttctatggacgtgaatgtgtgtgggcagcaatttggcagccacacccacttccttgggactccagacaattgggattgggcgttcccgaaggttattgtaattttgtttcgtgagaagctttggcaggtggtcgatttcgattgatttatacccggctgtgtaattatgtatgtatgtaggctatccatctgggattcataaactggaaagatctagggtagccggtagccagaaatcattttcatatctatcttagccttccacatagtcgaactattatataatacgtataaaaaaccaacaaaattttcaacactgcaagtcgaattccattatgtccggtattggcatcaatggctttggccgaatcggtcgcatgtttgcccgccaggctctagttcgcaaagatgtcaagatcgtggcaatcaacgatccctcactggatcccaagtatctggcctacatgctgcgatacgactccactcatggacagttcaatcagaagatctctgtcgacgggaacaatcttgttgttaatggcaagaagatccagctgcttaaggagtcggacgtcaagaagattaaatggtgcgacctgggcgtgcatacggtggtggagtgctccggtaggtttaccaccctgaaagcctgtcaaggtcacttggatagtggggccaaaaaggtggtcatatcggcaccatctgccgatgctccgatgtttgtgtgcggagtgaatcttgaggcatacaagccgggcacagcaatcatctcgaatgcctcatgcacaaccaattgcctggcgccgctggccaaggtggtgcacgataactttgaaatatgtgagggccttatgaccaccgttcatgcggctacagctacccaaaagatcatcgacggacccagcagcaaactctggcgggatggacgcagtggcatgaccaacatcatacccgcatccacgggagccgctaaagccgtcggcaaggtgattccggatctaaacgggaagctaacgggtatggctttccgtgtaccagttcccaatgtctcggtggtggacctcacctgtaggctttctaagcccgccaaaatggacgatatcaagaagtgcataaaggctgcatccaaatgcgaaatgaagggaatcctggggtatgtggaggaggaggtggtgtccaccgattttaacggctcacgatttgcatccgtctttgatgccaaggcctgtattgccctaaacgataacttcgtcaagttgatcagttggtacgataacgagaccggatattcctgccgtctccttgacctagttctctatgcccagttggtcgaccaatgcgatgcgaaggaaaagggtgcttgctagatggaagatccatgtaagaaaaaaggatgatccctgcaagaaataggaagatccttgcaagaacaagaaataggaaactcttagaaaagaattaaaaatttttttaaccaagtctagatttatttaaattagatttatatttagaaatctttatttacttaaaaattaatgtaatgtaatccattttaccatagttttaggcgcagatttcatattttgcaattcttatgggctaaactatagatagcataggatgcaatcggcttttattcgccctttttccaacaaataaataaagaacaaaaaaatgtatacccatattttcctggcagacataaaagccaataagaaaaagtgactgaattctttggaaattgtcttagacattgctggagttccgctgaaactgcattgatgatatactcttaatctcattgtcctccatgacacctccatcactgctctgatggtggtccgcctctacgatgatgtcatccagtgtgggtgtcttaattctattgcgtatgatgagatctctgtcggagggtgcttgaagatgaagaggatttgtggctagctcggcgggaccatcgccaccgccaccaccgcctccctgcagacccagagtcagattaaccttggcgtgctgtccagtcttaagttcactgctgggctgcacattttccaatgtcgtgggcggacgcaggcgcgcaggatctagtagggaatgcattttggtctgttttctgggcgttcgtgcaggcgatgccttacgagaattgtagttctttagctgtttggatctgtaaggtaaaagcaaagttcattgtcattgaaaagattaacaaatagcccactctagttcacatacgcctccatcagcttcagcagcaaatggtgatacgcctcgtactcatcctttccgaactcattcggatcgtgccgagcatgttcgtacatatcgcaatattggtgaatcattcgctgccctgctccgttaagcgtcaccgataaagtggtcagcagaaaggccctcaagctctcaggagcatgtcgggagctaccgtccgccctcgctatttcggattctagcagtttcacgtcatcaaccgccttcatgc

SEQ ID NO: 19259 - DNA, 1205 bp, DROSOPHILA
aatacgtataaaaaaccaacaaaattttcaacactgcaagtcgaattccattatgtccggtattggcatcaatggctttggccgaatcggtcgcatgtttgcccgccaggctctagttcgcaaagatgtcaagatcgtggcaatcaacgatccctcactggatcccaagtatctggcctacatgctgcgatacgactccactcatggacagttcaatcagaagatctctgtcgacgggaacaatcttgttgttaatggcaagaagatccagctgcttaaggagtcggacgtcaagaagattaaatggtgcgacctgggcgtgcatacggtggtggagtgctccggtaggtttaccaccctgaaagcctgtcaaggtcacttggatagtggggccaaaaaggtggtcatatcggcaccatctgccgatgctccgatgtttgtgtgcggagtgaatcttgaggcatacaagccgggcacagcaatcatctcgaatgcctcatgcacaaccaattgcctggcgccgctggccaaggtggtgcacgataactttgaaatatgtgagggccttatgaccaccgttcatgcggctacagctacccaaaagatcatcgacggacccagcagcaaactctggcgggatggacgcagtggcatgaccaacatcatacccgcatccacgggagccgctaaagccgtcggcaaggtgattccggatctaaacgggaagctaacgggtatggctttccgtgtaccagttcccaatgtctcggtggtggacctcacctgtaggctttctaagcccgccaaaatggacgatatcaagaagtgcataaaggctgcatccaaatgcgaaatgaagggaatcctggggtatgtggaggaggaggtggtgtccaccgattttaacggctcacgatttgcatccgtctttgatgccaaggcctgtattgccctaaacgataacttcgtcaagttgatcagttggtacgataacgagaccggatattcctgccgtctccttgacctagttctctatgcccagttggtcgaccaatgcgatgcgaaggaaaagggtgcttgctagatggaagatccatgtaagaaaaaaggatgatccctgcaagaaataggaagatccttgcaagaacaagaaataggaaactcttagaaaagaattaaaaatttttttaaccaagtctagattt

SEQ ID NO: 19260 - protein, 343 aa, DROSOPHILA
MSGIGINGFGRIGRMFARQALVRKDVKIVAINDPSLDPKYLAYMLRYDSTHGQFNQKISVDGNNLVVNGKKIQLLKESDVKKIKWCDLGVHTVVECSGRFTTLKACQGHLDSGAKKVVISAPSADAPMFVCGVNLEAYKPGTAIISNASCTTNCLAPLAKVVHDNFEICEGLMTTVHAATATQKIIDGPSSKLWRDGRSGMTNIIPASTGAAKAVGKVIPDLNGKLTGMAFRVPVPNVSVVDLTCRLSKPAKMDDIKKCIKAASKCEMKGILGYVEEEVVSTDFNGSRFASVFDAKACIALNDNFVKLISWYDNETGYSCRLLDLVLYAQLVDQCDAKEKGAC

SEQ ID NO: 19261 - DNA, 6354 bp, DROSOPHILA
tcatattagtggtatcggattaaacgaaataattgagattcataactcattacgctatcagtcagctaagattcttatcaaatagctcaaatgactaatatgttgtttgtttgtttgtttgttagaacgtcgcccatcggttcacgttatccagttgcagcacgatgatgtggagcgcgaggatcactatatgaaccactttcaccaaaacacggagaatctgcagcgctactcgcatcgctcgcaacgttccacgttggaggagcgtacgatcgagcggacatatcccacggatgcggtgataaatcctgcctatatgcacgacgaggactacgtgatcaatggtgagtatcaatccttctccgctttttcagccagtaaggaaatatttgtatttaaagcacctcctccgtcctacgaggaagtgatgcggcagccgcaggtgtatccacaggtgcgccacaacaaccacaagatcagcgatgctgacatctagtcaacttaggccgattatcaaattgtaaatatgcgtactttgtcttggtcagctgtgatttacatattggtttggttttttatttcgtttgcacctaaaaaaacataatcaattcgattgattcaacttaggtggcctgcgccctcttgcactgcgaataatagtagttttacataaaaaatgtacaaaatgattttacataggtatgattaatagttatgattatgattaatgattacaaacaaacagtcagtccacgtgtgcagttgttacagattgtaattgtaaataaattaagagtgaagtatactaaataaaatgtgtaaaaaactaaaaaaaaacattccctttgcattcttttggctaagttaagtcgctaaattcgaaacatatcgcacatacagacaccaaagcttctacatatggatatataaatgtgttccaacgtggcttattgtattcacagttctaattacttcagttgcggctcaagccattgactatctacggcagcaccttgcgcacgctgtgcatctgtatgaaggcctccagttgcgtgggtatcagacccttgaagtttagcctgttggtggcaattgagcgtgcggccaggcacttgaggctggtgtgggcattctgatgggcgtgcagccgattggccaagatagctgcaagtcaagtcaagcacttttagtaacggggtcaagtgtggaattcaatggttatgcttacgcagcttgcaggccgtggccgctgtctgccctgccgcgttcactgcatccaaatgggctcctgcctcgacgaacagctccagaatgcgagccatttcggcctggcgatcctgagtggtgttcaccttggtcactaggatgtgtagaggggtgttccgatccgagtccactgcaaccacggaggcgccacagtgtaccagaaccaaagcagtggcatagcagggaaatctgtggtgcgaacgaatgctatagttctatattctgaaaaataccctttgtgaatctgaaccctacctgcacatctcatttgtgtagaactcgtctacgggcatcactccattgacggcgatatgcagcaatgtctgtccatcctgcaggcgagtgtcgttctgtatgaacttgcgtacgaccaggaatagctgctggatgtgctcctcgtcaatgttttgatccttcttgcgtcgcgccaaatgggtaacgatcttgattagatagagtgcagtaatgcagttctgattattctgatcctgccatagactggggcaagcgttgggcttggcttccttaattttaaacttattgttctcgatctcctgctgacacttggccaaaactggcagaacgtgatccaacgtaagattgtggttctccacccgcaaaatctgagcaaaaagctgggcgaaccgtaagagatcgcgatctaccgatacctagaagagattaaacaaagaacattcgtatatacatactcaagagttaataaaagtcaaaattacattattgcgcattcgcagatctatggcgtagttccaaagcacctggcactggtaaaacctgccctgatccgccatcacagctcctcgatagataattgcctgaggcaactccggattattgcggcccagaatgcgttcccttatggccagcgactccatgtggatggagtggtgattaagtttgatggcatacaattcgggcagattttcagtctcaagccaattgtcatacgcgggcacagtgggctgaactcttttgcggatcacaccgcgtggattgctgtaacgtagctgcatggctctcagcagatagccataggccttattcacgtcgtatttgattttgtcattcgcataagtggctcccagaagctccaatgctgtgatctgctcctccaagctcatcagttctggtcgttcgatgaacgcttcaaggacatcctcatggagacgttcggcagcctgcaaggcgggcgtaattcccagctcattcttcttcagagtggcgccatggtcaagcagggctaccaccacatccaggtgaccgctttcggccgcatagtgcaaggcagtggcgccgcacagcgcctgatcattggcccttgatccattctgaagtagagtctttaccaccaggtggtgacccttgtaggcggcaatcataagcgtgttgttgttgaacaaattcgtggcattcacatcagcgccattgtcaattaggaattcaacgatgtccaatcgacctgtggaaatattcaaattaataacatatccatgattatgagtgaaatatacgaagtaagcgtataattcatagcacttccgtatagtgagagcttttggatgcttaccctcatagcaggccgctctcagcggcgacgactgcgccttggtattgtgattgatggccgctcccgcttggacgagcattttgactatctgcagatgccccattccggcagccacccacagggctgtggctccgtagaccaccatcccgtcgtagatgacattgcattctcggtccaagtcgacgtcgtagtgcgacagcagagtcttcacgaatttcacattgcccatcatcgcggccatggtcaggggtgttagcgattgtccatccggctgatcgaaattctggcgatgaaaaatgtatagaaactagaatgtttggaggggccagggaaaacttatgatgtgcgtgcgcagccgtttcacagtcaaggttggacgaaaatagtgcgtcgcaagtgataaacgtgaggtatgaaatctctgggaagaccatgcgcgctttctttgttctttgtgctttacatgggcgaaatgggacttgggcaaagtccataaacttggcaactgcgttgcggcacggttagagcagcatctgaatgtgggtcaaggaactgctggcccgggacgggacactcaccgccggatacgtgatgtagttcgtcacgggcagcgtgtcgttggctcctcgccagaatcctgctccaggccaagcggactcataccaccgcttgcgagtgctgcaattaatttgtgaaaagccatttgattcgagatcaattctagctggagcttgggcataaaacccaactatgtattaccgatacagctccgcgtgcatggcctgcaatctgaattttaactgacagctgccttgacagtggagttccgagcaccgaaaaactcgataaaacttcgccaggctcacgattccattctcaaccctaagtttgcatacgcttccagtatttttgggggttgaatcgcacggagaggcagcgatagatcctgcgcagggccaaacagctgttcaaggagagaggtccttgagggcttgtttaccgcccgcagctgtttgcctgcctgcattccagcaatccattgcagctcggagagagtggatacgataggataggacaataaaatagggggtggaagcagagtcaaccgcaatgcgctacacgggaaaaaaagttggtcccttactactagatgactacaaattcgtttattttaaaacacgaaccctatttcggtattctatagaatgggtttttgaaaagattttccatttaaattttcttgcagttggaaaagtagttggttaattcattccattccaattacttatcttttcttacacttagcatatacttatcataaacaatatgcaataaaagcgtactccattgaactatttatgggatctatggcttcgattagattaaaacgcaacagcagaggtgttggaattagtttgttaataaacaaattaataaacgcatatttcaaattgacgatttcaggaaactgcaaagcatttggtctggcatttggccaattccgtgtccagatagccacgccattcctgagtaattggttaaagatggaccgagtgtcatcatccacttgatatcgaatcaattgcgacagtgacttttggtgccttaaataggattttgatctgtattgttcggtcattaattgaaaaactgcaccaaatactgcttatttcgcctgcgatctgtttgccttcttggcaggcagtaaagttataaacactacagtggacactcgcataatgccttagacaatggtgtctttgtgtcaaatttgaaacacaataaaagtagatcgctcaaacgatggctagttataataaaatcctaatatgatcttcgcccttttagcgggtgttgcctgtagaccatgtggctccccctctcacagtccatctctctcactcactccctcgttctctctcataaacaatgacaagccaagtaaatacaaataccgaaagcaaaaaaccagcaatggagcgtgtatagaatcgctctatgcggcagcagatttgtttttacatataaaccgaataatacgtatacgtgcggcggcaattttcattaatgacgcagtagtgaactctggcaattacgcaaaaagccgttccatccgtgccgtggagtactcactgtattcaccaggtgggtctgcaccgccctgcagctaaccgaattcaagatctcgacgaagctcaacatctgaccactgcgggccgctaggtgaaggttgtttagctgggagaaacgtagacgcggctcgtggggaaacttggcccggatctcctcggagatctccaccagcattccgtgggccatgttgaagtagccgaaatcgggcggatagccgtcgtatatggacgtatgtgcctcgtctagaggcgcctcttctgcgggatcgacgtccattctggccgggaaatggacgatgctgcactgatcggtgatcactgatcaccaggtatgggtatggaagcaatccacacaggcccactctttccaggccaggcggcaatacggtcacacctagcggtgcacctgcgagagtgaaaacagtgactcggcgcgataggctgaccgttagtttatcgttcgtttattcgcgccctttgcagatattacatatgtttgttgattcgttagtttatcgttcgtttattcgcgccctttgcagatattacatatgtttgttgattgtaaatatgaaacatatatgaaatacagcttgaaatactggatatgttcacaagtgttgggttagattaagtgtgcgaattgaatatgctttctgtgtgcgtgcgtgtgcgtgcgtaaggttaactgtattagattggtgtatttttatatcgtgctttctttagcttcaatgtgaaagttttctacattggaccaggcctggatcttgggttttattcatagagttttgatagtgtgcgtcgacaggcccgtccaatggaaaattttcatcgaggcgtttcgttttggatcatattttcccaatctcccatttgagtgcggcgatgtgcatcggttcgccgggaaaactatgcctaaacgcagcgagttcttaattgtacatcatatttgttgttccttcttctccatcattatttctagcatacgctgctttaaagtgtggatatatagtctcttgagtttacagtgggctcagcatcctccctatgctggacaatatagttttcaaacgtctcgattaacaattcactcgtttcaaaaatgtcgcttgaagcttgtgtcatcactattcaacagtcactgtttacgtcacagtcacggtttactcacactatcgatacaccaacgtgctcgtgagttgtgcgcggatgtgtttgttgtgttcacgggaaatttgcttccactggaatttaaagcttgtctgcactagatcttctaaaaggaagaaagttcgtatgtggtttaaatctccattctctgcccttgtcttcttgtgttttgatcatccattttttgatatactg

SEQ ID NO: 19262 - DNA, 2123 bp, DROSOPHILA
gaaagagtgggcctgtgtggattgcttccatacccatacctggtgatcagtgatcaccgatcagtgcagcatcgtccatttcccggccagaatggacgtcgatcccgcagaagaggcgcctctagacgaggcacatacgtccatatacgacggctatccgcccgatttcggctacttcaacatggcccacggaatgctggtggagatctccgaggagatccgggccaagtttccccacgagccgcgtctacgtttctcccagctaaacaaccttcacctagcggcccgcagtggtcagatgttgagcttcgtcgagatcttgaattcggttagctgcagggcggtgcagacccacctggtgaatacaaatttcgatcagccggatggacaatcgctaacacccctgaccatggccgcgatgatgggcaatgtgaaattcgtgaagactctgctgtcgcactacgacgtcgacttggaccgagaatgcaatgtcatctacgacgggatggtggtctacggagccacagccctgtgggtggctgccggaatggggcatctgcagatagtcaaaatgctcgtccaagcgggagcggccatcaatcacaataccaaggcgcagtcgtcgccgctgagagcggcctgctatgagggtcgattggacatcgttgaattcctaattgacaatggcgctgatgtgaatgccacgaatttgttcaacaacaacacgcttatgattgccgcctacaagggtcaccacctggtggtaaagactctacttcagaatggatcaagggccaatgatcaggcgctgtgcggcgccactgccttgcactatgcggccgaaagcggtcacctggatgtggtggtagccctgcttgaccatggcgccactctgaagaagaatgagctgggaattacgcccgccttgcaggctgccgaacgtctccatgaggatgtccttgaagcgttcatcgaacgaccagaactgatgagcttggaggagcagatcacagcattggagcttctgggagccacttatgcgaatgacaaaatcaaatacgacagttcagcccactgtgcccgcgtatgacaattggcttgagactgaaaatctgcccgaattgtatgccatcaaacttaatcaccactccatccacatggagtcgctggccataagggaacgcattctgggccgcaataatccggagttgcctcaggcaattatctatcgaggagctgtgatggcggatcagggcaggttttaccagtgccaggtgctttggaactacgccatagatctgcgaatgcgcaataatgtatcggtagatcgcgatctcttacggttcgcccagctttttgctcagattttgcgggtggagaaccacaatcttacgttggatcacgttctgccagttttggccaagtgtcagcaggagatcgagaacaataagtttaaaattaaggaagccaagcccaacgcttgccccagtctatggcaggatcagaataatcagaactgcattactgcactctatctaatcaagatcgttacccatttggcgcgacgcaagaaggatcaaaacattgacgaggagcacatccagcagctattcctggtcgtacgcaagttcatacagaacgacactcgcctgcaggatggacagacattgctgcatatcgccgtcaatggagtgatgcccgtagacgagttctacacaaatgagatgtgcagatttccctgctatgccactgctttggttctggtacactgtggcgcctccgtggttgcagtggactcggatcggaacacccctctacacatcctagtgaccaaggtgaacaccactcaggatcgccaggccgaaatggctcgcattctggagctgttcgtcgaggcaggagcccatttggatgcagtgaacgcggcagggcagacagcggccacggcctgcaagctgcctatcttggccaatcggctgcacgcccatcagaatgcccacaccagcctcaagtgcctggccgcacgctcaattgccaccaacaggctaaacttcaagggtctgatacccacgcaactggaggccttcatacagatgcacagcgtgcgcaaggtgctgccgtag

SEQ ID NO: 19263 - protein, 332 aa, DROSOPHILA
MDVDPAEEAPLDEAHTSIYDGYPPDFGYFNMAHGMLVEISEEIRAKFPHEPRLRFSQLNNLHLAARSGQMLSFVEILNSVSCRAVQTHLVNTNFDQPDGQSLTPLTMAAMMGNVKFVKTLLSHYDVDLDRECNVIYDGMVVYGATALWVAAGMGHLQIVKMLVQAGAAINHNTKAQSSPLRAACYEGRLDIVEFLIDNGADVNATNLFNNNTLMIAAYKGHHLVVKTLLQNGSRANDQALCGATALHYAAESGHLDVVVALLDHGATLKKNELGITPALQAAERLHEDVLEAFIERPELMSLEEQITALELLGATYANDKIKYDSSAHCARV

SEQ ID NO: 19264 - DNA, 12826 bp, DROSOPHILA
ggagccgcgccaggctgaagcagacctgcgcatcttattggcctgctcttccatgtacacactgtactccgtgtccaccggtgtgatatccgattcactggtggttattgttggcgttgatagaaaactctcgtcactctcgatctgatgcagcgaaaagaactttttacgcgcatccccaatgaactgccacatgcggactataaagtgcggctgctccacctccgcgttcggccggaagtacaggatctgagaattggccaacttatagtagcacctgcagcatttgcatagaaagtcgtccactggcttggaaagcacaaatagcccggttgaaccagactctgttccctcaaagtacttacggccagtcgcctgacgtttccagtcgccgggttccatgcgcatcagcaggtcgaacacgtggaacatgtgcatcaggtacatggtgccagtaaccagcgcagcgatgctctgctgcttgcagtgcgcaaagtgcggatgttccagatactcgatggtagaattgatgaaggccaggtgagggtccagcatggcggtgcgcattatcagcacgccgcagaaatagtgcgacagcacggcactcagtgtgagcaggagctgggaggagagcaccgtactcctagccaatagcagtcggaacgcgcctagagcggcgagcgccgtaaaggacgaaaatgtggcacaatataggatcacatgaggagtacgctctggccagtaggatgagccgcgtatgtggaaaaacatacaaacactgcccagcaacacctcgatgagtttaaaaaacacccaaacctggttcatttcacagacgtattctagtttaaaatggtttagatttagttttggcaacagatgaaaaaggttctgcgggaaaagttgtatctcaaaatacaaaacaccgccggggctgcgggcttaaattaagatgttaaatctaaactaactaagcaattctaatattgctgcatttcaggtcatgactgctgcggcggttccctctactttagtgaagtgcttgtacttgttcttcgacctgcccatagttgaggacgatgagccttcagctgacggtggagcagtaagtgagtttaatgcccatgaaaggcggacgcttctgcagaaggtgtttgtgcagctgctggtcaagctgtgctcgtatccgtatcccgctgaggaactagctcgcatggacgacttgacgctgctattctcggccatcacatcgccatgtcccatccacaatattgtatggcgcaagaacgcagctgaaatcctgaccacaatatcaaggaatggcctaaccgatgccgtagttagctatatacattgtaagtatggtggacttaatcattatgactaaatattcttaaaatgtttcttaatttagccaagggctgcatggcactttgcgtggacaatatgcagcgcctgacgtttggaaatcctttggagatcgttgaaatgttcgtcaccgtgttctgctttctcaaggactccagtcaggtatcccagattttgatggatgattttcgtgcatctcaaggttacgtgtttctcagtgattttctactcaagtaagtacaatagttctttttttaagcacttcttaatattcatattaatttttaggtttgacaacaatcgtagccaatcattggagattcaagcggccattcgaaatctggtactgatgatctcttcgttgtgcatgtgtggcttttacgagcttcgaccgccagcctcgcagtttaatacggctttcaaactgcagaacttccagctcccacaggccacctcacgagagacatgcgtgcgaaatgtgtacgccttccaggtgctgcagaacgtgttccttaagtcaacgacgcctgcgctctgctgcacaatactggacgccatttcgcgggtgtaccactcggaaaatgccaactactttatcctggaatcggagcaaacgcttagttcgttcgcagagcggatacacatgaaaagcccgcaaatacaagaaaaattctacgatctgctggagttcattgtcttccaactgaacttcgtgccgtgcaaggagctgatcagcctttcgctattgctcaagcacaaccagtcgacgtcctgcagcattctttgcttgaagacactgttaaacattctccggcacaacgctgtatttaaagatgtctaccgcgaagtggggattctggagatctttgttggctgtctaacacgctatgcagctcatgtgcagaaaataaccaagggagatgagtcagtggtggtggagctggaaaatgaatccgaagaagaactgttcgacacactaggaaagcatgttctggaggccctcaccatgctgctgggaggtggtgccagcaacaatgcccaactatttcgtgagtacggtggcgccaagtgcgtccatgagttggtgaagttcaagcactgccgaccgcaggctctcggaatcgtaagggagctaatcctgtccgcaggtggagacgacgacatgctgcacatactctcactgatgcacagcgtcagcccactacaagtggagtttaagattcagatactaaacatgttgctcggctgcctaaaggactctcatcgcacacggaccgtattccgcaaagtgggcggattcgtttacgtgaccagtgtatttgtgtctctggatggcagcatggccctccctcaaccggacattccacaacaggatctcattctgctgctgcaaatagtcttccagactctagccaccgctatgagatttgaaccggccaacgccaagttctttcaccaggagattagcagcagctcattgtgcgacacacttcgtctgctgggatgctttggtggatcgagtgcgttacaggactacacgggcacctacgagccgcagcagtcgctcctcaagtattatcatgagattttcagcggtgatattctaagcgtcaggtaagtttaaagcctcctccttagattaatatttttaatcagttaattttattcacttccgcagtttctctgaagacgttccatacccgctgtcatacgtgtgcatcgtatttcggctactatacagtattgccctagataattttgaggctccaaatctaagcggcattattacactcttcagcgatcctccgacaactttgcgatcgccgagtaaagagctggcgccacccgtgcatcccagccagctgaatctcacgcagcccagtccggagcctagaatagtgcacccaggtgtggttctttgcatgcttcagctgctccccgccgtggagtacgacatggctcctttacaggcggtgcaactgcaagtatatctaagcgaaatcatcaagtccttggtgcgaagcgaacgcaaccagcagataatgtgtgaccacggtctggcagagaaactgcttaagctgacgcgaagagccctggcggaggagtcgcatccgttgcacgtgccaatgcagtacattctggagcgtcttgccgctcaagcattgcaacctaccgaattgcgccagttcctgcggctgggtgagccgctctcgtgtgcggatatagatcttcagcagccatacaagctgggtgggcccgttccgctgactcgtatcaagactctggtgtctatgacaacgccccgtgacttccgagcccatggttcgagcacgctccctccgttcgtggagctggacatgtccgccgagggattcggttgcttgtacctgccttcattggcgccacaggcaacggccaccgctggaggaaccatcgatgcaaacagcattggtggcatcggggctggcgatcgcatctttccaccacaaactggactcacatactccacctggttctgtgtagaaaagttctcagatcccaagacggaccctcactgtgttcggcttcttactttggttaggaccatccacaatccacgagaggaaaacttagcatgtttatccattttgctttccgcacgggacaaggcgatcgtcgtctcgacgcaggagacgttggtcacacccagaaaaagtatgtaatatcaccgaagtctctttagactcattaataaaatgctaatctttccaggtattggtgactgggaacccgaaggatcggatgacggtatcgctcgcatatggtgtcctgatcttttgcacgaaggtcagtggcacaacctggtcgttgtactcaacagggctgtgctgaaaaattcgagtctgttcctctatttggacggggttccaatgcatactcaaaagctgcactatattgcccagcatcccgcagcaggaaacgccagtttgacgtcgcccacacagatttttggatatatcggtacgccaccaatatggcggcgttactcacgtctctgttggaagcagggcgtttgtcaccttatcgaggatgtgctaacgcagcaaacagttcagacaatataccaactggggcctcactacatgggctctttgcaagctccgcaacttggcaagcagtcggagtcattggcgcctttggtgccagaggatcgcgtcctcctgggtcttaatgctaaagcggtgtccaagctgacactagtcaaaatccgcaaagtttacagccgagcggacaacaaaagcattgccaagcagctaaacatgaactcgcacgagaatgctacgcccataaagtaagttgtacctctggctcacaaggattagtctcatatctgttcatctgttctttcagaattcttcacaactctgcagggcatcttgcaggagctggacgctcccttggcggcgtggtcgtcggttatctgggcgtcagagtattcagtccacatcccgtctcagccatgatcgacacagttggtggctgcaacgtgctcctcggtatcatcgccatggctcaagacgtggaatccctatacgcaggtgtcaaagctttgacctgcgtggtgcgaagcaatcgcgccgctcaagccgagatggacagaaaacgatgctaccagacattgggcatgttctttaaaaagaaaaaacatctgctaaactcgcacatcttgcacctgacctttggtctagtaggcacggttaacagcggacaagacatgtcggctattccaaatgtgacagccttccaagatcttttgtgtgatcttgagatttggcataatgcaccaaacggacttctgcgctccctgctagaacatctattggagctagtggtcgagtccagtgacaagaagcagaacgtgaagatcatgcgcgacctccagcttctagtgaaattgctgcacatcattacccaaatccaagaccactccacacgagaaattctcttcagtctgctggagactctactgggcggtcagccgaggcacaccgatctactgcttttcggtcagtatgtggcggccaagttgccacatgcccattctggaggcttggaacgcgctgtgctgctgcccagcatgaaaaatcctgccgaggatcaagacggtggcgtggcccagaacatatacctacgtaatcgctgtctatcgctgctccacggactgctattcacaccgcgaaacaccgtgaactatgtaatctgcgacgacatttccaaaacattgggcatggattggttgctactcttcatgcaaccgcacgtccacttcaccactgtaatcattgcagtgcgcatcctggtcgtaatctgtgctaacgaaagttttcttgtgcgattccgggatgccacccacaacggcggttatcttcggtttaccgagatggtctctcagcgaaagatgctgggactcggtgcccagcagcttaaccagcgaccaacgaatggcactggtacagtcattgtggccaccccacagaataccatacaacatctgcccacgcagatcgcaggagaggtgcgagcagcggccttaaacataccaggtgcgtacctaaataaagtcgaagcagcgtggaaaatataaatatttttatttttcatccacattttaggtttccagcttcttgaatggctaatgaatcatcacctggacgttccggagttgtacttcctaatcaccgccctgattatgggacaacctgtaaaggtgttggctactgagcacacaaagttcgatcttgaccgcgtctggtcgttcctctggggagctcctgtgtcagccaacacacagctaccaaagctcaacatttgtcccgagggcgtatgcgtactcctggcaatggtgcggggaatcgttcatggtggagagtgcgctccatggctgcacagccacccggaaacaattatccagctcctgtttagcttgtaccaaaacctcaccgactttgcgcctgtgatgatgacgggcgatgtggtcacctcgctagtagctgtgctatttccgttggcatctcgtcctgctgactctgagccaaacagtggagcatcgacacccacagacgatacgggaagcagctttgctttgccaccgccggaaacacttcatggagctccgcagcccaagctaacagctcatccggtgtgtaattgcattatcgacttcctgcgcgttattgtcgtggactctctcggcctcaacatgcagggtaaacctactccggtaatcgatctcgtgctggacgcagcaccagaatcggctgaactacccctccaggtgcagtatcagacccagataattatcgccctaatggatcacctactggccgccgacgtgcttgtaggcgaacaggcagcactcccgctggtgcctctcttgcagagccaaatgcaatacatcgccccaaacgtgttttacctgaccgcccgcatcgtagataaactatggcaaggttgcctcgcccgcaatccacacgacattttcgattttgtcataaaactgatcgtacaggcgaagcgtcggtcgtcctcgttgtcattggagcatcttcatcactcgctgaaccgcagcatcctcttcctgctttcccgacccaccgatgactcgcgagctgaccagatgagcgtgctggaggcactgcacaagatcattcagcaccgcctgcttattttcggagcgggcaaccacgagttggaattcattggctgcctcacatactgtttgctgcagttgactgccgatatgaaaattatattggagccggcaaccagccgaaacactacatggcacgtaaatccgcagacggagacggcagagcccaaggatgaagatctcaaccagttacagggtcggaatctgatcgttggcgctgcttttcgagtttgggaggagctatacgtatgcaagaagcctgccattgaggaggtatttaaagtctccctaacatccccaccgccgaactccaaagcacctgatctgcagaccacgcgagagcaggtcatggagctggcctctaaactatggttcaattatgtggaggcagaacgtaaggccacatatcgtgcgccctgggagctgcacacccagatccagtccaaaatccagaaggttactgggggactgtcccgtttgactagcagaacaaaaaccaaaaaggaggagctggtacgaaccaggtcgaccttaactcgcgaggcagcctatgagtccaccggcatccatgtgcagctgataaaggatcttttggatttgcgtgcgaagcagtaccagcagatgttgcagcatactcagcgctacgtctatcaggactgggtgcagtcggagatggagcttacccgggagcgcggtctgtggggtcccactggcagctgctcattggataagtggattttagacaccaccgaaggaccccaccgtatgcgcaagaaaacgatgcgtaatgatgtcttctacctgcactatccatacagaccggagttggagctggcggacaatcggcagctgaagtacaaggtggcctccagtctagatagcaagacgtacgcactgcacggaccgcagcagccacgcatactggccgaggcgggggagcaccatgcgatgcaacagcagagttctctggaagcggtgcaatcgcatcggttggagaccagcagttcgacatcaacgccaccacccatggttttgcccaagcttgtgggacacggatcaacaccctgtccacaggagtcggtggacggcaatgctccagaggatgacgaagaagaagaggatacttcgatgaccagcgataatgagacgtttttgaggctactagaggagcaggagaagattagttttatgttccgttgtgcaagagtccaaggtctagacaccttcgaggggcttttgttgttcggcaaggagcactgttacattgtggatggctttacgttgttaaagaaccgtgagattcgtgacattgacaccctgccgccaggagcatatgagccaatcattcccaactcgggtggaacatcctcgacaacttcgcgagcagttagccacaagctcaggcagtgctccaagtttgcgtacgaggaaatccgggaggtgcacaagcgtcgctacttgcttcagcctatcgctctagaagtattctctgaggatgggcgaaactatcttttgagttttccccgcaaggtgcgcaacaaggttaaccagcggtttctggctctggccactgcgctgaacgacaacgcgcagcagtccgtggcgggtcagaagcgcacggccagcgtggagcaaacagctggcatcttcagtggactaataggcgagacatcggtgacccagcgatgggtgcgcggtgagatctcaaactttcagtaccttatgcatctgaacacactggccggacgcagctacaacgacctgatgcagtaccccgtatttccctggatccttgccgactacgattccgaagagttggatctgacaaacccgaaaacattccgagacttttcgcgcccaatgggcgcccaagccgaggaacgtctggaacagtttcagaagcgcttcaaagagtgggacgatccgcacggggagacaccgccataccattatggcacacattacagttctgcgatgatcgtgtgctcgtatctggtgcggctagagcctttttcgcagccattcctcaagttgcagggcggacacttcgaccttgcggaccgcatgtttcacagcataaaggaggcgtggctatctgcctctaaactaaacatggccgacgtcaaggaactcattccggagttcttttacctgcccgagtttctcagcaatttcaacaactttgatctgggtaccaagcagaatggggaaaccctcaaccacgttatcctgccgccatgggccaaacacgatcccagagagttcatccggctgcacagaagtgctttggaatgcgactatgtcagccagcatttgcatttggtaagctttctagataataatcatttaagtggataatataacaagatgtattgcagtggattgacttaatctttggctgtaagcaacagggaccagccgccgttgacgcagttaatgtgtttcatcatcttttctacgagggaaacgtggatatctacaagtaataagcacattcattattctctgcttgcatattagctaactatatttcccttgttatttgacagcattgatgatccgctcaaaaagaatgcgacaattgggttcattaacaattttggtcagattccaaagcagctattcaaaaaggcgcatcctgcgaaaaagatgggcggctctcgccactcggctctaatagatcctacatctctgattcagggtaatagcacagtgctgcaaaccgaccgcctgttctttcacaacttggacaacctcaagccgagtctgcaacccatcaaggagctgaaaggtccagttggtcagatcttgcagccagacaagacggtgtttgctgtggagcaaaacaaggtaatgatgccgccttcgtatacaaaatacatagcctggggctttgccgatcattcgctgcgcattgggctctacgacacggaccgggcatcctttgtgtccgaggcgtcggcccagaactcgggagagatcctgacctgcgcctgcccgaatgccaagatgattgttacagctggcactagttccgtggtgaccatttggaagttcgatgcgaaccgaaagagcctggccgttaagcactcgttgcatggacacaccgacgctgtgacctgtctagccgcaagtgctgcttacaatgtcatcgtgtctggatcgcgggatggcacagcaatcgtctgggacatgacacggttcactttcgttcgtcagttgcggggtcatgctggtgtggtggcggccgtttccattaatgagctgaccggggacattgcaacctgctcagccacctggctccacgtgtggtccatcaatggcgatgccttagctatggtcaacacatgtgtcggcagcgcggatcgcatgcagcagatcctgtgtgtggccttctcacagatccgggagtgggaccagcaaaatgtcatcataactggatcaaccgacggtgtagtgagggtgagtatttgaatattagaccataaatgaaaaattacatataatgatccgttttcagatgtggtctctggagcatacacaggtgcccatcgatcgcaaattgaagcgaggcacggaggtatcttcgcaggacaaacccgacaccgtctctttggaaggcaaggacaataaggacgacaaaatgagcctaatgaagcaaataaaaagtctttcccagtcggaggaagagatgggtgagttatttaaatttctttttctttgcttggtcaaaataaaaatctctattacttttccttcatccgcagagattgtcaaatccgcatcggaaagtagcatttcggaggcctcccaacatagtcatggatcgagtaagtcggctgaggcaggtcctaaggctgaagtgcagggtgaacgcaggaaaagttccatttctggtgcaaagtcattgcacgaaatgaagtctgctacagtggaaggccagggcagcagctacgatcccaaatccaatgaaggtatgaatgctaaaatgttcgaatgccttaaactaatatctaactattttccagatgaacatgctataagaccgagcaaatcagatacaagcctcacggacggtttcgttgtaatagataatgacaggcataaaggcgatcagattcttagaaagggtacgtttttaattgtaaatgattttcaatatttatatttttatttctgtatacttaggctttagatggcagcgtcaattaatgttccgatcgaagttaaccatgcatacggcatacgatcgcaaggacaatgctgagccagccagcataacagcactaaccgtgtccaaagaccataaaattttatatgtcggtaagtgtcgcacaacaaagttctaaagatataaggaatttaatcaaaatgttttggtatgctcaaggtgatgcacgcggtcgcatcttttcatggagcgttacggagcaacctggtcgcggagtagctgaccattggctgaaagatgagggagcagatcagtgcgtcaagtgccacgtcaagtaagttattttttccttaaaatccaattggttcattcattaatatgttccccataagatacatatttaacccttataaattatcaaaataattacagatttacactctatgagcgaaagcatcattgtcgcaactgtggccaagttttctgcaacaagtgcagtcgcttcgagtcggaaatctcgcgtctgcgaatcctgaagccggtcagggtgtgccaggcgtgctacagtcagctgcgcacgaactcgttggacaattaggaaaattatgtggcatgcggacacaagtaaccaaacgaaagctatccataatagtgtgtttagttgttaatgttaaacgttagttaggtttaaagctcttatttattctttcggtccaatgttttttccaaatcaagttatttttacttcaaccaaaggctgttatatgattttacactttatttaacatagtttaaatcgaattttttatgtaaacaatgaaagttgcaatataatttatatatttatttataactatttattaaaaatcgcgttaaatcataataaatgttgcttatacatacatcgcaagcattgacaattaatagttatgtaacgcagatgtaaaattatataaatattaactatttagtgagactttcgaagcatatatgaccgaccgaccgaccagactacaaaagtggtcagcgcacaaaacgcaaatgatcccttgaagcttgatgattcccgtagtgtgatacacagaaaggcgtcagtccacaccagctaaatcgatacaaaaaaaaaagacaaactaagcaccgccagttatatcaattaaatagttaactcaaacacttctctagcaaataaaaccaaacacacatcacgaaggatatcgccgcaccttttgcgggaacaggacacgttttagcacacaacaatacaacctcacactaaactaatggcaagtaggatttctcaacattacttttaaagaacatagaagtaaaagcaattcaaaaatgtattaggtgggtcacgacttctaagagcaatatatcctattgcacataaattaaacatgaactacacaaggaaaaaagggaaaatttaatgtatagaaacgaaaagtgaatgtgctgttttctgaaacaactttctcaacttgtaaattcagtttggagctttaagccattcaaatccttccatcgattaccacaataacacccaaatactaaataattgtaaatataaaggtcacataacaatgaaacac

SEQ ID NO: 19265 - DNA, 9933 bp, DROSOPHILA
gtcatgactgctgcggcggttccctctactttagtgaagtgcttgtacttgttcttcgacctgcccatagttgaggacgatgagccttcagctgacggtggagcagtaagtgagtttaatgcccatgaaaggcggacgcttctgcagaaggtgtttgtgcagctgctggtcaagctgtgctcgtatccgtatcccgctgaggaactagctcgcatggacgacttgacgctgctattctcggccatcacatcgccatgtcccatccacaatattgtatggcgcaagaacgcagctgaaatcctgaccacaatatcaaggaatggcctaaccgatgccgtagttagctatatacattccaagggctgcatggcactttgcgtggacaatatgcagcgcctgacgtttggaaatcctttggagatcgttgaaatgttcgtcaccgtgttctgctttctcaaggactccagtcaggtatcccagattttgatggatgattttcgtgcatctcaaggttacgtgtttctcagtgattttctactcaagtttgacaacaatcgtagccaatcattggagattcaagcggccattcgaaatctggtactgatgatctcttcgttgtgcatgtgtggcttttacgagcttcgaccgccagcctcgcagtttaatacggctttcaaactgcagaacttccagctcccacaggccacctcacgagagacatgcgtgcgaaatgtgtacgccttccaggtgctgcagaacgtgttccttaagtcaacgacgcctgcgctctgctgcacaatactggacgccatttcgcgggtgtaccactcggaaaatgccaactactttatcctggaatcggagcaaacgcttagttcgttcgcagagcggatacacatgaaaagcccgcaaatacaagaaaaattctacgatctgctggagttcattgtcttccaactgaacttcgtgccgtgcaaggagctgatcagcctttcgctattgctcaagcacaaccagtcgacgtcctgcagcattctttgcttgaagacactgttaaacattctccggcacaacgctgtatttaaagatgtctaccgcgaagtggggattctggagatctttgttggctgtctaacacgctatgcagctcatgtgcagaaaataaccaagggagatgagtcagtggtggtggagctggaaaatgaatccgaagaagaactgttcgacacactaggaaagcatgttctggaggccctcaccatgctgctgggaggtggtgccagcaacaatgcccaactatttcgtgagtacggtggcgccaagtgcgtccatgagttggtgaagttcaagcactgccgaccgcaggctctcggaatcgtaagggagctaatcctgtccgcaggtggagacgacgacatgctgcacatactctcactgatgcacagcgtcagcccactacaagtggagtttaagattcagatactaaacatgttgctcggctgcctaaaggactctcatcgcacacggaccgtattccgcaaagtgggcggattcgtttacgtgaccagtgtatttgtgtctctggatggcagcatggccctccctcaaccggacattccacaacaggatctcattctgctgctgcaaatagtcttccagactctagccaccgctatgagatttgaaccggccaacgccaagttctttcaccaggagattagcagcagctcattgtgcgacacacttcgtctgctgggatgctttggtggatcgagtgcgttacaggactacacgggcacctacgagccgcagcagtcgctcctcaagtattatcatgagattttcagcggtgatattctaagcgtcagtttctctgaagacgttccatacccgctgtcatacgtgtgcatcgtatttcggctactatacagtattgccctagataattttgaggctccaaatctaagcggcattattacactcttcagcgatcctccgacaactttgcgatcgccgagtaaagagctggcgccacccgtgcatcccagccagctgaatctcacgcagcccagtccggagcctagaatagtgcacccaggtgtggttctttgcatgcttcagctgctccccgccgtggagtacgacatggctcctttacaggcggtgcaactgcaagtatatctaagcgaaatcatcaagtccttggtgcgaagcgaacgcaaccagcagataatgtgtgaccacggtctggcagagaaactgcttaagctgacgcgaagagccctggcggaggagtcgcatccgttgcacgtgccaatgcagtacattctggagcgtcttgccgctcaagcattgcaacctaccgaattgcgccagttcctgcggctgggtgagccgctctcgtgtgcggatatagatcttcagcagccatacaagctgggtgggcccgttccgctgactcgtatcaagactctggtgtctatgacaacgccccgtgacttccgagcccatggttcgagcacgctccctccgttcgtggagctggacatgtccgccgagggattcggttgcttgtacctgccttcattggcgccacaggcaacggccaccgctggaggaaccatcgatgcaaacagcattggtggcatcggggctggcgatcgcatctttccaccacaaactggactcacatactccacctggttctgtgtagaaaagttctcagatcccaagacggaccctcactgtgttcggcttcttactttggttaggaccatccacaatccacgagaggaaaacttagcatgtttatccattttgctttccgcacgggacaaggcgatcgtcgtctcgacgcaggagacgttggtcacacccagaaaaagtattggtgactgggaacccgaaggatcggatgacggtatcgctcgcatatggtgtcctgatcttttgcacgaaggtcagtggcacaacctggtcgttgtactcaacagggctgtgctgaaaaattcgagtctgttcctctatttggacggggttccaatgcatactcaaaagctgcactatattgcccagcatcccgcagcaggaaacgccagtttgacgtcgcccacacagatttttggatatatcggtacgccaccaatatggcggcgttactcacgtctctgttggaagcagggcgtttgtcaccttatcgaggatgtgctaacgcagcaaacagttcagacaatataccaactggggcctcactacatgggctctttgcaagctccgcaacttggcaagcagtcggagtcattggcgcctttggtgccagaggatcgcgtcctcctgggtcttaatgctaaagcggtgtccaagctgacactagtcaaaatccgcaaagtttacagccgagcggacaacaaaagcattgccaagcagctaaacatgaactcgcacgagaatgctacgcccataaaaattcttcacaactctgcagggcatcttgcaggagctggacgctcccttggcggcgtggtcgtcggttatctgggcgtcagagtattcagtccacatcccgtctcagccatgatcgacacagttggtggctgcaacgtgctcctcggtatcatcgccatggctcaagacgtggaatccctatacgcaggtgtcaaagctttgacctgcgtggtgcgaagcaatcgcgccgctcaagccgagatggacagaaaacgatgctaccagacattgggcatgttctttaaaaagaaaaaacatctgctaaactcgcacatcttgcacctgacctttggtctagtaggcacggttaacagcggacaagacatgtcggctattccaaatgtgacagccttccaagatcttttgtgtgatcttgagatttggcataatgcaccaaacggacttctgcgctccctgctagaacatctattggagctagtggtcgagtccagtgacaagaagcagaacgtgaagatcatgcgcgacctccagcttctagtgaaattgctgcacatcattacccaaatccaagaccactccacacgagaaattctcttcagtctgctggagactctactgggcggtcagccgaggcacaccgatctactgcttttcggtcagtatgtggcggccaagttgccacatgcccattctggaggcttggaacgcgctgtgctgctgcccagcatgaaaaatcctgccgaggatcaagacggtggcgtggcccagaacatatacctacgtaatcgctgtctatcgctgctccacggactgctattcacaccgcgaaacaccgtgaactatgtaatctgcgacgacatttccaaaacattgggcatggattggttgctactcttcatgcaaccgcacgtccacttcaccactgtaatcattgcagtgcgcatcctggtcgtaatctgtgctaacgaaagttttcttgtgcgattccgggatgccacccacaacggcggttatcttcggtttaccgagatggtctctcagcgaaagatgctgggactcggtgcccagcagcttaaccagcgaccaacgaatggcactggtacagtcattgtggccaccccacagaataccatacaacatctgcccacgcagatcgcaggagaggtgcgagcagcggccttaaacataccaggtttccagcttcttgaatggctaatgaatcatcacctggacgttccggagttgtacttcctaatcaccgccctgattatgggacaacctgtaaaggtgttggctactgagcacacaaagttcgatcttgaccgcgtctggtcgttcctctggggagctcctgtgtcagccaacacacagctaccaaagctcaacatttgtcccgagggcgtatgcgtactcctggcaatggtgcggggaatcgttcatggtggagagtgcgctccatggctgcacagccacccggaaacaattatccagctcctgtttagcttgtaccaaaacctcaccgactttgcgcctgtgatgatgacgggcgatgtggtcacctcgctagtagctgtgctatttccgttggcatctcgtcctgctgactctgagccaaacagtggagcatcgacacccacagacgatacgggaagcagctttgctttgccaccgccggaaacacttcatggagctccgcagcccaagctaacagctcatccggtgtgtaattgcattatcgacttcctgcgcgttattgtcgtggactctctcggcctcaacatgcagggtaaacctactccggtaatcgatctcgtgctggacgcagcaccagaatcggctgaactacccctccaggtgcagtatcagacccagataattatcgccctaatggatcacctactggccgccgacgtgcttgtaggcgaacaggcagcactcccgctggtgcctctcttgcagagccaaatgcaatacatcgccccaaacgtgttttacctgaccgcccgcatcgtagataaactatggcaaggttgcctcgcccgcaatccacacgacattttcgattttgtcataaaactgatcgtacaggcgaagcgtcggtcgtcctcgttgtcattggagcatcttcatcactcgctgaaccgcagcatcctcttcctgctttcccgacccaccgatgactcgcgagctgaccagatgagcgtgctggaggcactgcacaagatcattcagcaccgcctgcttattttcggagcgggcaaccacgagttggaattcattggctgcctcacatactgtttgctgcagttgactgccgatatgaaaattatattggagccggcaaccagccgaaacactacatggcacgtaaatccgcagacggagacggcagagcccaaggatgaagatctcaaccagttacagggtcggaatctgatcgttggcgctgcttttcgagtttgggaggagctatacgtatgcaagaagcctgccattgaggaggtatttaaagtctccctaacatccccaccgccgaactccaaagcacctgatctgcagaccacgcgagagcaggtcatggagctggcctctaaactatggttcaattatgtggaggcagaacgtaaggccacatatcgtgcgccctgggagctgcacacccagatccagtccaaaatccagaaggttactgggggactgtcccgtttgactagcagaacaaaaaccaaaaaggaggagctggtacgaaccaggtcgaccttaactcgcgaggcagcctatgagtccaccggcatccatgtgcagctgataaaggatcttttggatttgcgtgcgaagcagtaccagcagatgttgcagcatactcagcgctacgtctatcaggactgggtgcagtcggagatggagcttacccgggagcgcggtctgtggggtcccactggcagctgctcattggataagtggattttagacaccaccgaaggaccccaccgtatgcgcaagaaaacgatgcgtaatgatgtcttctacctgcactatccatacagaccggagttggagctggcggacaatcggcagctgaagtacaaggtggcctccagtctagatagcaagacgtacgcactgcacggaccgcagcagccacgcatactggccgaggcgggggagcaccatgcgatgcaacagcagagttctctggaagcggtgcaatcgcatcggttggagaccagcagttcgacatcaacgccaccacccatggttttgcccaagcttgtgggacacggatcaacaccctgtccacaggagtcggtggacggcaatgctccagaggatgacgaagaagaagaggatacttcgatgaccagcgataatgagacgtttttgaggctactagaggagcaggagaagattagttttatgttccgttgtgcaagagtccaaggtctagacaccttcgaggggcttttgttgttcggcaaggagcactgttacattgtggatggctttacgttgttaaagaaccgtgagattcgtgacattgacaccctgccgccaggagcatatgagccaatcattcccaactcgggtggaacatcctcgacaacttcgcgagcagttagccacaagctcaggcagtgctccaagtttgcgtacgaggaaatccgggaggtgcacaagcgtcgctacttgcttcagcctatcgctctagaagtattctctgaggatgggcgaaactatcttttgagttttccccgcaaggtgcgcaacaaggttaaccagcggtttctggctctggccactgcgctgaacgacaacgcgcagcagtccgtggcgggtcagaagcgcacggccagcgtggagcaaacagctggcatcttcagtggactaataggcgagacatcggtgacccagcgatgggtgcgcggtgagatctcaaactttcagtaccttatgcatctgaacacactggccggacgcagctacaacgacctgatgcagtaccccgtatttccctggatccttgccgactacgattccgaagagttggatctgacaaacccgaaaacattccgagacttttcgcgcccaatgggcgcccaagccgaggaacgtctggaacagtttcagaagcgcttcaaagagtgggacgatccgcacggggagacaccgccataccattatggcacacattacagttctgcgatgatcgtgtgctcgtatctggtgcggctagagcctttttcgcagccattcctcaagttgcagggcggacacttcgaccttgcggaccgcatgtttcacagcataaaggaggcgtggctatctgcctctaaactaaacatggccgacgtcaaggaactcattccggagttcttttacctgcccgagtttctcagcaatttcaacaactttgatctgggtaccaagcagaatggggaaaccctcaaccacgttatcctgccgccatgggccaaacacgatcccagagagttcatccggctgcacagaagtgctttggaatgcgactatgtcagccagcatttgcatttgtggattgacttaatctttggctgtaagcaacagggaccagccgccgttgacgcagttaatgtgtttcatcatcttttctacgagggaaacgtggatatctacaacattgatgatccgctcaaaaagaatgcgacaattgggttcattaacaattttggtcagattccaaagcagctattcaaaaaggcgcatcctgcgaaaaagatgggcggctctcgccactcggctctaatagatcctacatctctgattcagggtaatagcacagtgctgcaaaccgaccgcctgttctttcacaacttggacaacctcaagccgagtctgcaacccatcaaggagctgaaaggtccagttggtcagatcttgcagccagacaagacggtgtttgctgtggagcaaaacaaggtaatgatgccgccttcgtatacaaaatacatagcctggggctttgccgatcattcgctgcgcattgggctctacgacacggaccgggcatcctttgtgtccgaggcgtcggcccagaactcgggagagatcctgacctgcgcctgcccgaatgccaagatgattgttacagctggcactagttccgtggtgaccatttggaagttcgatgcgaaccgaaagagcctggccgttaagcactcgttgcatggacacaccgacgctgtgacctgtctagccgcaagtgctgcttacaatgtcatcgtgtctggatcgcgggatggcacagcaatcgtctgggacatgacacggttcactttcgttcgtcagttgcggggtcatgctggtgtggtggcggccgtttccattaatgagctgaccggggacattgcaacctgctcagccacctggctccacgtgtggtccatcaatggcgatgccttagctatggtcaacacatgtgtcggcagcgcggatcgcatgcagcagatcctgtgtgtggccttctcacagatccgggagtgggaccagcaaaatgtcatcataactggatcaaccgacggtgtagtgaggatgtggtctctggagcatacacaggtgcccatcgatcgcaaattgaagcgaggcacggaggtatcttcgcaggacaaacccgacaccgtctctttggaaggcaaggacaataaggacgacaaaatgagcctaatgaagcaaataaaaagtctttcccagtcggaggaagagatggagattgtcaaatccgcatcggaaagtagcatttcggaggcctcccaacatagtcatggatcgagtaagtcggctgaggcaggtcctaaggctgaagtgcagggtgaacgcaggaaaagttccatttctggtgcaaagtcattgcacgaaatgaagtctgctacagtggaaggccagggcagcagctacgatcccaaatccaatgaagatgaacatgctataagaccgagcaaatcagatacaagcctcacggacggtttcgttgtaatagataatgacaggcataaaggcgatcagattcttagaaagggctttagatggcagcgtcaattaatgttccgatcgaagttaaccatgcatacggcatacgatcgcaaggacaatgctgagccagccagcataacagcactaaccgtgtccaaagaccataaaattttatatgtcggtgatgcacgcggtcgcatcttttcatggagcgttacggagcaacctggtcgcggagtagctgaccattggctgaaagatgagggagcagatcagtgcgtcaagtgccacgtcaaatttacactctatgagcgaaagcatcattgtcgcaactgtggccaagttttctgcaacaagtgcagtcgcttcgagtcggaaatctcgcgtctgcgaatcctgaagccggtcagggtgtgccaggcgtgctacagtcagctgcgcacgaactcgttggacaattag

SEQ ID NO: 19266 - protein, 3309 aa, DROSOPHILA
MTAAAVPSTLVKCLYLFFDLPIVEDDEPSADGGAVSEFNAHERRTLLQKVFVQLLVKLCSYPYPAEELARMDDLTLLFSAITSPCPIHNIVWRKNAAEILTTISRNGLTDAVVSYIHSKGCMALCVDNMQRLTFGNPLEIVEMFVTVFCFLKDSSQVSQILMDDFRASQGYVFLSDFLLKFDNNRSQSLEIQAAIRNLVLMISSLCMCGFYELRPPASQFNTAFKLQNFQLPQATSRETCVRNVYAFQVLQNVFLKSTTPALCCTILDAISRVYHSENANYFILESEQTLSSFAERIHMKSPQIQEKFYDLLEFIVFQLNFVPCKELISLSLLLKHNQSTSCSILCLKTLLNILRHNAVFKDVYREVGILEIFVGCLTRYAAHVQKITKGDESVVVELENESEEELFDTLGKHVLEALTMLLGGGASNNAQLFREYGGAKCVHELVKFKHCRPQALGIVRELILSAGGDDDMLHILSLMHSVSPLQVEFKIQILNMLLGCLKDSHRTRTVFRKVGGFVYVTSVFVSLDGSMALPQPDIPQQDLILLLQIVFQTLATAMRFEPANAKFFHQEISSSSLCDTLRLLGCFGGSSALQDYTGTYEPQQSLLKYYHEIFSGDILSVSFSEDVPYPLSYVCIVFRLLYSIALDNFEAPNLSGIITLFSDPPTTLRSPSKELAPPVHPSQLNLTQPSPEPRIVHPGVVLCMLQLLPAVEYDMAPLQAVQLQVYLSEIIKSLVRSERNQQIMCDHGLAEKLLKLTRRALAEESHPLHVPMQYILERLAAQALQPTELRQFLRLGEPLSCADIDLQQPYKLGGPVPLTRIKTLVSMTTPRDFRAHGSSTLPPFVELDMSAEGFGCLYLPSLAPQATATAGGTIDANSIGGIGAGDRIFPPQTGLTYSTWFCVEKFSDPKTDPHCVRLLTLVRTIHNPREENLACLSILLSARDKAIVVSTQETLVTPRKSIGDWEPEGSDDGIARIWCPDLLHEGQWHNLVVVLNRAVLKNSSLFLYLDGVPMHTQKLHYIAQHPAAGNASLTSPTQIFGYIGTPPIWRRYSRLCWKQGVCHLIEDVLTQQTVQTIYQLGPHYMGSLQAPQLGKQSESLAPLVPEDRVLLGLNAKAVSKLTLVKIRKVYSRADNKSIAKQLNMNSHENATPIKILHNSAGHLAGAGRSLGGVVVGYLGVRVFSPHPVSAMIDTVGGCNVLLGIIAMAQDVESLYAGVKALTCVVRSNRAAQAEMDRKRCYQTLGMFFKKKKHLLNSHILHLTFGLVGTVNSGQDMSAIPNVTAFQDLLCDLEIWHNAPNGLLRSLLEHLLELVVESSDKKQNVKIMRDLQLLVKLLHIITQIQDHSTREILFSLLETLLGGQPRHTDLLLFGQYVAAKLPHAHSGGLERAVLLPSMKNPAEDQDGGVAQNIYLRNRCLSLLHGLLFTPRNTVNYVICDDISKTLGMDWLLLFMQPHVHFTTVIIAVRILVVICANESFLVRFRDATHNGGYLRFTEMVSQRKMLGLGAQQLNQRPTNGTGTVIVATPQNTIQHLPTQIAGEVRAAALNIPGFQLLEWLMNHHLDVPELYFLITALIMGQPVKVLATEHTKFDLDRVWSFLWGAPVSANTQLPKLNICPEGVCVLLAMVRGIVHGGECAPWLHSHPETIIQLLFSLYQNLTDFAPVMMTGDVVTSLVAVLFPLASRPADSEPNSGASTPTDDTGSSFALPPPETLHGAPQPKLTAHPVCNCIIDFLRVIVVDSLGLNMQGKPTPVIDLVLDAAPESAELPLQVQYQTQIIIALMDHLLAADVLVGEQAALPLVPLLQSQMQYIAPNVFYLTARIVDKLWQGCLARNPHDIFDFVIKLIVQAKRRSSSLSLEHLHHSLNRSILFLLSRPTDDSRADQMSVLEALHKIIQHRLLIFGAGNHELEFIGCLTYCLLQLTADMKIILEPATSRNTTWHVNPQTETAEPKDEDLNQLQGRNLIVGAAFRVWEELYVCKKPAIEEVFKVSLTSPPPNSKAPDLQTTREQVMELASKLWFNYVEAERKATYRAPWELHTQIQSKIQKVTGGLSRLTSRTKTKKEELVRTRSTLTREAAYESTGIHVQLIKDLLDLRAKQYQQMLQHTQRYVYQDWVQSEMELTRERGLWGPTGSCSLDKWILDTTEGPHRMRKKTMRNDVFYLHYPYRPELELADNRQLKYKVASSLDSKTYALHGPQQPRILAEAGEHHAMQQQSSLEAVQSHRLETSSSTSTPPPMVLPKLVGHGSTPCPQESVDGNAPEDDEEEEDTSMTSDNETFLRLLEEQEKISFMFRCARVQGLDTFEGLLLFGKEHCYIVDGFTLLKNREIRDIDTLPPGAYEPIIPNSGGTSSTTSRAVSHKLRQCSKFAYEEIREVHKRRYLLQPIALEVFSEDGRNYLLSFPRKVRNKVNQRFLALATALNDNAQQSVAGQKRTASVEQTAGIFSGLIGETSVTQRWVRGEISNFQYLMHLNTLAGRSYNDLMQYPVFPWILADYDSEELDLTNPKTFRDFSRPMGAQAEERLEQFQKRFKEWDDPHGETPPYHYGTHYSSAMIVCSYLVRLEPFSQPFLKLQGGHFDLADRMFHSIKEAWLSASKLNMADVKELIPEFFYLPEFLSNFNNFDLGTKQNGETLNHVILPPWAKHDPREFIRLHRSALECDYVSQHLHLWIDLIFGCKQQGPAAVDAVNVFHHLFYEGNVDIYNIDDPLKKNATIGFINNFGQIPKQLFKKAHPAKKMGGSRHSALIDPTSLIQGNSTVLQTDRLFFHNLDNLKPSLQPIKELKGPVGQILQPDKTVFAVEQNKVMMPPSYTKYIAWGFADHSLRIGLYDTDRASFVSEASAQNSGEILTCACPNAKMIVTAGTSSVVTIWKFDANRKSLAVKHSLHGHTDAVTCLAASAAYNVIVSGSRDGTAIVWDMTRFTFVRQLRGHAGVVAAVSINELTGDIATCSATWLHVWSINGDALAMVNTCVGSADRMQQILCVAFSQIREWDQQNVIITGSTDGVVRMWSLEHTQVPIDRKLKRGTEVSSQDKPDTVSLEGKDNKDDKMSLMKQIKSLSQSEEEMEIVKSASESSISEASQHSHGSSKSAEAGPKAEVQGERRKSSISGAKSLHEMKSATVEGQGSSYDPKSNEDEHAIRPSKSDTSLTDGFVVIDNDRHKGDQILRKGFRWQRQLMFRSKLTMHTAYDRKDNAEPASITALTVSKDHKILYVGDARGRIFSWSVTEQPGRGVADHWLKDEGADQCVKCHVKFTLYERKHHCRNCGQVFCNKCSRFESEISRLRILKPVRVCQACYSQLRTNSLDN

SEQ ID NO: 19267 - DNA, 4080 bp, DROSOPHILA
agtgcaagtttgaaatgaattaacccgctagtttcgattttaatttcgtatttccgttctgagagtgtttattaagcgtgcctgtgatacgatatgagctgcatgttgggggtgtttctaatagcttttagttaaatacaattgacaactacacattgtcgttttccttttttgttctgtttacaaactacggattagttttattaccctattttgttttccatatgcaataggtgcttgaagttatttgcacgccatgcaattgtcaaacttcaagcgcatctgtacttcaataatatgactactatacgaatctagatgtgttgaattctaaccaaattcttattttccaattgatacctgactataactattgtataacaacgtactacacagctattaacaaattttcaatctaggtggtatgaaaaaacaaatgaaaaattacgtataaaaaaaagaagagataaactcgaaacaataaagaaatggtcgatggggataagcatttgaaaccatcgaccgaaaatcatacaatttactttgttcaatttgttttaagtagagagcttaatgtgcgctgtcaatagcaattatatgtgtaacaataacaccaatatacaatacaatgattcaataaagggaatgtgtttattttgggtaaggttaacaaatttaatcgcattgaaatttcaatttaaaaagtttttacatatttctatttatatctttcgaaatgaaggaaactcatttataaatctctcaactgaaagatgaagatcctgatctatagaattcagtggaaaattgtttgtttatttgaatttcttgtagactatttcaaaatcataaaattaccgttacatactttaaatttgtatggcatgtcgatcagctgagcaacgccatagggtattttataaaagtaccgctggtaggttgtgctttattttattccatctgcagctggtctcacttgtaatcgctatcgataagtttgtgcgaacctatcggggcttacctaatttcttagtaaatatgcggcccaatttgttttccggcgcctcgcggctcttgacttacagccgaaatggaaaacttctgactcggggaagaagcaccaaggccacgtccagcagcttggactcacagcaccaggatgcggcgaccacggagggtggaagagcggaatccgtagaggagtccccggagcagcagcgaaaactaccaaccagagagccgctggccaaaaacttcttcatcggagtggtggacaaggagctgctggcctatccggaggtgattccacgggatgagatggcccagctggagaattccctgctgccgctgaagaactactttgtggagccacgtgaaacggaggagacctcaccggagaccctccgccagctgggactctatgggctaaatgtgtccacagattacgagggcaaaggctatggctggagtgccagtctaatggccagtgagccggattcaacggatatcaatgtaaccctgggcctgcaaacgcatcgcgtggtcgtggatcttctgaaagaggttggaactccgttgcaacagcagaggtatctccaggacttggccactggtaaactgataggtaccgaggctatatatgagatatctccacccgaggaggattactttaacaccacggcagagttgtttcccgaatacggaaagtggcagctcaatggcgaaaaatcattcgtgatctgcacacccggcgagcggcagcttttcctggttctggcccaaacccaacagccgaatgttccgggagttttgggacgtggcaccaccatctttctggttgattcccagcaggaaggagtgcgcctgggcgaaaagcacgccacattcggttgccggaaagcggaaattaggcgtgtgcacttcgaaggcgttaagttgggagaggatcaggtggtgggcctaccacacgatggcaaccgctattcggagcagctggtgcgatcctcccgcttgaggggcagcttggtgggactatcgctggccaagaaactgctaaacgaattggcccagtacactgtgaacaccactcagtgcggagtacaactgcagtgagtactcttgatttcctatagctatattttatataaaaatatatttactcaattatagagacctggagctcacccgcatccatatgtcgcgcgcgatgtgctccgtttacgcgatggagagcatgctctacctgaccgccgggttgctggatgagttccgtgcccaggatgtgactctggagagtgccataacaaagtactttaccctgcgacaggtgtacgccattgcctcccagaatctgggagtcgtgggacccaagagtctgctcagcggtgagaccacggagctgggactacgagatgcagcgcagctgtgcacgcaaggtgaatccctggacaccttgggcatgttcattgccctcaccggattgcagcacgcgggggtaaatttcttgtccatttgatacttgtgtaatggtacttaaaaacaaaaatttttttcagcaagccatgaatacgggcgtgcgaaagtccagaaatccactcttcaatcctggtcacatttttggtaaattcctggacaacaacagcatcgacaatcccaagaccaagatgcagctttcggagcacgtgcatccctcccttgaggcggctgcccagtgcattgaactgtcggtggcgcgtctccaaatggccgtggagctgatgttcaccaagcacggcaacgcggtggtggagcgtcaaagtgaaatgcagcgcctggcggaggtgggcacccttatctatgccatgtgggccagcgtggcgagggcatcccgatcgtattgcattggactgccgctggcggatcatgaactgctcacggccacagcgatatgctcggagggcagggatcgcgtccgcaccctctgcacggagatctatggcggtcattttgtgaacaacgacaacaacctggtgcgactctccaagcaagtggccaagagcaagggctacttcgctgttcatccgctgacatttaacttctaagccaagctggtagttaagtttattattgcctttacgattaaagtgaatacttgttattgataattcgcatgtgtttaatctcgtcttgagggttccaaaaggtaaaacacatttgtggattattttccgggacacaatttgacaactagtttttatattttatatttctaataattcacgcaaatattagccaaaaaaaaaactaaatagactgattgacgcaattgttcaacatatttttaagtagaacaattttcttaaaatccccctaagccatcacaaataatccagcattctgggaaatcagcgtgaaatgtcttaatccgttgagtttaccacctgtccgccttttccgctgcactgggaattggatttgcatttcgtttaagtggttgaactgggcgaattgataaagaattgacaatttgctaagcggcgcaggaagacggccaaaagcggtgtgagtgtgtgagtatgcggtctcttcgttcatgaacgtgtgttagcgtgtgtgtgtgtggacaggtggtaaaatagcctgtactgtactttcaacgtaaagcagctagcttacttagagtactcagtcaatatcgggtcaatcaaaatgtggttaaaggttttgtctaaacaagcgcagaattcctaataatttggatgactattaaatgattaatagatagaaccgtgtgcaagtgtgcgtgtttgtttgtttgtgcccacaactacacagcaagatttggtttcatgtccacttgtttcgccgccacgctctcgccactgttagttaacatagctctgccagcgactaacatgcactcacactcgtgcagcggcagcactgcaggcagcgaaaatcgaagagagtagattcataaaagagtatcggtttctctatcgaagcgttcggacgtcgaaaagataaaccccaatttaaatctaatccatctgcgagcaaattaaacaacaataatgatagattcttaagcggcgcgcacat

SEQ ID NO: 19268 - DNA, 1958 bp, DROSOPHILA
tgcgaacctatcggggcttacctaatttcttagtaaatatgcggcccaatttgttttccggcgcctcgcggctcttgacttacagccgaaatggaaaacttctgactcggggaagaagcaccaaggccacgtccagcagcttggactcacagcaccaggatgcggcgaccacggagggtggaagagcggaatccgtagaggagtccccggagcagcagcgaaaactaccaaccagagagccgctggccaaaaacttcttcatcggagtggtggacaaggagctgctggcctatccggaggtgattccacgggatgagatggcccagctggagaattccctgctgccgctgaagaactactttgtggagccacgtgaaacggaggagacctcaccggagaccctccgccagctgggactctatgggctaaatgtgtccacagattacgagggcaaaggctatggctggagtgccagtctaatggccagtgagccggattcaacggatatcaatgtaaccctgggcctgcaaacgcatcgcgtggtcgtggatcttctgaaagaggttggaactccgttgcaacagcagaggtatctccaggacttggccactggtaaactgataggtaccgaggctatatatgagatatctccacccgaggaggattactttaacaccacggcagagttgtttcccgaatacggaaagtggcagctcaatggcgaaaaatcattcgtgatctgcacacccggcgagcggcagcttttcctggttctggcccaaacccaacagccgaatgttccgggagttttgggacgtggcaccaccatctttctggttgattcccagcaggaaggagtgcgcctgggcgaaaagcacgccacattcggttgccggaaagcggaaattaggcgtgtgcacttcgaaggcgttaagttgggagaggatcaggtggtgggcctaccacacgatggcaaccgctattcggagcagctggtgcgatcctcccgcttgaggggcagcttggtgggactatcgctggccaagaaactgctaaacgaattggcccagtacactgtgaacaccactcagtgcggagtacaactgcaagacctggagctcacccgcatccatatgtcgcgcgcgatgtgctccgtttacgcgatggagagcatgctctacctgaccgccgggttgctggatgagttccgtgcccaggatgtgactctggagagtgccataacaaagtactttaccctgcgacaggtgtacgccattgcctcccagaatctgggagtcgtgggacccaagagtctgctcagcggtgagaccacggagctgggactacgagatgcagcgcagctgtgcacgcaaggtgaatccctggacaccttgggcatgttcattgccctcaccggattgcagcacgcggggcaagccatgaatacgggcgtgcgaaagtccagaaatccactcttcaatcctggtcacatttttggtaaattcctggacaacaacagcatcgacaatcccaagaccaagatgcagctttcggagcacgtgcatccctcccttgaggcggctgcccagtgcattgaactgtcggtggcgcgtctccaaatggccgtggagctgatgttcaccaagcacggcaacgcggtggtggagcgtcaaagtgaaatgcagcgcctggcggaggtgggcacccttatctatgccatgtgggccagcgtggcgagggcatcccgatcgtattgcattggactgccgctggcggatcatgaactgctcacggccacagcgatatgctcggagggcagggatcgcgtccgcaccctctgcacggagatctatggcggtcattttgtgaacaacgacaacaacctggtgcgactctccaagcaagtggccaagagcaagggctacttcgctgttcatccgctgacatttaacttctaa

SEQ ID NO: 19269 - protein, 639 aa, DROSOPHILA [sequence omitted]

SEQ ID NO: 19270 - DNA, 9477 bp, DROSOPHILA
aaccagcaacaaaaatattttaaagctgtagacttaaaaatattattattaaagatcactaatgaatatggttggcaaatataggtggagagtaaatataataaattcaaatttacccgaaagtctttgatttcaaaattctagcagccgaataagttaaattcagcaatataatttcaatcagagatgcaattttaaaaaacaaataactttcctgtcatgggcacaaaattcgaagaattctagaaaagcagcaagaatgattggttttaaaattttgacttggatttttgtatttatatgcctaccatataatatcgtgcagaagaggcaaatggtataatagaaacgaaaccttttggagatggattaattcgatttcaggaaaagtgaattcaattcttgattggagaaaactcggaaccctttttgggacccaaaccaaaacaactaaaatcaactgtaaacgatgaatcaatcaacaactgcacacccatcaatcgtgcttgtgaggcaaaatttccagttcacaccatgcaggatttcacaaacagcttcgtttatgcggagaacagactcttttacacattgaataattataggacagttttaaaaaaacatcgcaaaaacaacggaaactttatcaagtttacaatattgtacatctaaaacggttaacggttttacaatcacacgaaaaaaaacaaaccaatggactaaaaaaaacgcaaaaacctgtttttttttagtaagacaaagcgcttttaaggttttataaaaatgacaaaaagtaaatggtcgagctattttgtaaatttccttcagttttagttactccacgaaaccatcgagaaaattatcttccccaaatgccctatgcttcggtcctaaagcaaaatttaatttggttttcaaaaaaaggtcaaatagtaaaaataataaaaaaccaacctttcgacaccctcgatactttaaccgactgacaataacatagttaattatgataaaaagtaatatattctgttatatttgaataaagagtgctgtaattatcaaaacatataatcaatttttaactgtctacaaacaaaccaaaaattggattgttaattgcattgctttaatataatgatgttcaaagttatgtttactgtgttgtttcgttttggtaatttttggcgcacatgcaattaatagattatttttcttattttattggtattcctttaatgctgatacatttgtttttaaagttgttttgatgatctcattatcgggcgcaagtcctacaagtagggatagcccatgttgcgtcctcctgccgccgttaccgttgctgcaccaggtggataattctgtgcatattgtggaggaatgcccattgctgggccagcggtgatcatcagttgtggctccatctgaataatgtttttgtgctcagtggaatcgtcctccttctcgcgctgagcctcgttcaactccagtttgtccacctttgttgtgtattcgcgcagaacctgaaaaacatacaccaaattaatatgccatccagtagctatgctatgaaatggatgtacctgaatcaaatagggcatggcaaagtcaacgattttgtgtttccaggccaactccaagataacatcagggcgcagcaagtcgtaacactggaaattcatacatacatattaataaaaacaattaaaatttgttattactctgctagcacccacctgataaagacaagctgcaaaacaatcgtaagcgtcacgttctaggaaccaacccaacaactcttcggcaatatcttgcttgcaagattcggcggcgtactccatagcatccttgtagagtttatcctttttgcagagctcaacgctctgtttccagcgattatttcctaaaattgcaatgcaaaaatattgtataagcttaaagtgcatacatgcagcatatggctctcactcacccttgtacaagtaggcggcaatcctacggaattcggtaagttcgtgcttttcgagtttctgtgccaacgcaatgttgtcaaagttatcaaatccatcgatcgaattgcgcagaccctggtagtcctcctcgtcgattaagagtccgttcagggcttcgttgattgccttgttattgagagattggactgaacgcagataaggcttgacgagtggcaaatagccggttttggagaagtaactaacagcacgagtgtgatccatcctgggtgccagcacgagcagcatgtcgttcaacagcagcggcttgaagtccaaatagaattcgatagccttgtagtacagctcaatgttggctaccttggtgataatgtccttaaagtgcccctcgcgccacgcctccgtgggatgagccatcatggccaggacggcgttatcgtactcctcgtacttatcgtacaggaacaccagctccgaccacaagtgagccgattcagcggcacgcagaacttttggaatgttaacgcgagaccagaacagctccaagtgttcgcgcattttggaaggtttgaattttgaataaagtatagctaattcggtgaacattcccatgtgcgcacgttccagccccaaagccgactcgagtagcgcaatcaattcatcgaagtatccacggttttgatagtagttaatcagatcctctagctcatcggcatgcaccacaatgtgcaggccgcacatctgagctagcctaaactcctcggcgtccacgcaggcgaagcacacctccttccatgtgcgcgttgagttggctttccgcgccgagtccacggccccttggaactccttcaggtagaccaaagtgatggccagacgggcaaagttgctcacattgttgtacagtagcttcgctgcatcgtacatgccgtcgctgaagcaacggttgccaatcttctggatatcggcatggttgggacccgaaatgaactcctccagatcggccagacgtccagtgcgcgcataggcatagatcaattcgctctcgatgtaagattcgcgcgccttcttgcgtgccatttgcagatagcgaacgaggtcatcccaagactccaccttgctggccacatcgacgacatcgacgtaagcgctcggatcatcagccttgatgtacgagtcgatagcctccttgaccagaccctgctgcagttgggccttggccagctgcgaccaaacggccggctcattgcaccgctcggcgaactcgttagcccgctccaggttgttcacttgatcgatgagcacctgaatggccgatgtgttcacatcgaacttcttgaagatggcgaaggcttcttcgtacaactgattactgatcgcaatgttcgcgatgtccggtgcatcgtagttctccagccggttaatgtagtccatgactcgggtgcgatcagccttgatggctgtgagaatgagcaagttttgcagattgcgatggtcgctaaagacggacgagtccagaataatcttctcgagaagttcgatcagctcattgggcaaatcggcggtcatgaatgctttgaccgttacagagatgtcatcgggatcctgggtctcggacaaagcggtctgtaccacctgatcgatcaactggcgcttgtatggattgctctccgaaaggacctcggcccagagttcggcgtcgcggcgaccaaccaagtagcgtgcttcgctcttgaacagagaattctcgttacaaacggcgatcagctcgcgatcgcacaatccacgctcgtaggcgacacacgccaaatggggatcccgcttctcgcagtagcgaccgaccacacggctatcgtagtactgattctccttaagatatctctcgggattgttgttcgagtcaatgtagatcttggccaacgcgttgtgggtggctggctcgacgcagccctcgtgaactcgggactccagccagggaaggagaagcttgagacggttgcgcttctcgacctcctcgaccagttcgtcggttgagaattgtcccttgaccacgagaattagatttttaattatatcctcactgcaatcaacatcaagaagaccacccactaccactggcaagcgggatggattcactttctgcacatagatctcaatgtacttctgcagattgttacgatacaggtaaagcaccaagtcgtgcacgaaatcaaaacgatcacaaacaataattaatggtagctgatccgtcagcttggcctccttcaagaagttcttcacccgttcgggattgtagcagtttgattcacggcaaattcgctccacctccttaatctgattagtcttgcatgccgcctgaatgtatttgaagtgcacttcgggatcctgtgagaagttgacaatgctgctcaggaagtagaacagtccgtcgtagctcttgaaaccttcgaacagatcaatcagtgccttgttggtcagctgttcgtgatacttggtggcaatctgcacacagatctgcaagttctggcgcaaattcgccgtaagcattgccttcagacattccagcgagtcctccaccgacagcgtgccaaagaaactgaccagccattcggcattcagcatgtgcgtgtgcacaacggcccgcttaatgtcatacagatccgtgtagtgctcgagggcgcgctggagcagtccagccttctcgcacagctgggcaatgtgggcccgatcgtagtgggtgaacatagcattgcccaggatggcgtcggccacctgcggagcagacatcagattcatttccagcaggcgcgtctggagggcaccctcggcgggacggttatgcttgagggcgtccagcaggaatgcagtgcactgctgcaccatggagtgctccatgaagatgtccacaatctgattgatgtccgccagtggctcttcctcggccaccaacatagaggcgaaaccagctccttgctccgggttgcttcgcatcacggagcgcagcaggaacacgtaatcgggcgtatagttgaccttcttggcgtagagtacaatcttctggaactgcccagtctcagcaaagcattggataaccttgttgggcacatttgcgcgcagatagatggacagggcaagtgtaagatcggaggccttgaccagatcacccaactcctcgctgcattccaacttctcctccttcagccacttctcgcacagctgcttcttgccctgcagcaagacgggacggcacagctcgagagactcgaacttgttcagcttgccctggtcgaggagaatgccaaagtattgcagcagcggcggagtcgtggagccagctggtgtctgcacctgttggaaacgctggatcgtctgtggcgtacgcagaatggccttgggtgccagggcagcaactttagccgcttcagcatactggccggctgtaaagagcttgttgaactttcgcacaaagagatcttcggcaccagccaaattgttgcgcacggccatgcgaagggccaaatcgggattctgcagaacggtgttgatgtagggaatgatctgctcctcgtcgacggtcacggagaggacctgtcccttgcgattgacgccaatgatgccaccacttgcctcatgcggtgcggtaacaaagatcgtatcggccgatatacgattcatgtatatgcacgtggccgtctccatgtcatacagatgtatgtatccatacttggttatcaagtagatggtgtcgtacttggcagagacttgcatagccacagggaaatcattttgtgcttccggcggaaagaagacatcgacagccttcttggcaaacggctgattgccgttcggcggagcaccaacttcgataatatgaagcttgcccccagtggccgtacgaactgcaaagcagaacagcgtggtcggctccttgttggcatcgattttaaacgtggcaaaactggccgcatgcccctcgatcgcctgggacaccttacgctccaccgaatacaactgcatggcaccggcaacgcgacttggcagtgccgaaatgccgaccaagagtagccactgctgggaggcattgcagcggtagttgatgatttgacaaccgttcagcgatgaatgccggtcaaacatcttttgcggcatcgaatcgccctccatggaccaatggaacacactcgtttctgtgaccagagctagcgtattgagggagatccacttccagaacaccacatcctcgttcatggtatgcgccttcatcttcgacttcatctcaatgttgaagatctgcaacgtcttttgcgctaaaagaaatattctaaagttatacatgttcaaaaatgcattatcccagtcgaccggaaaaaaactttgatctctttccttactatttgatattcaagttaaagtttaagtgaggttttaagttttctagacacgttgtaataacaagcggacctgtttactaagcctacgttactttaagctaaaatctgatcctcttcggacattctgatcgactggaccatcggtttcagttacctttgagcgcaatgaccttgctagctggattcatgatagccgaatccgctgagatgggacgccgcgtgggattggtggcatcgttcatgtcaatgatgaccacttgggcggtatcattcaccttctcccgcacgcaaataaacttatccgattccatcgtgagcgtgctgaatgaaaatgaattggcgttgatcccgacatttgtgagctgtccgtagtggagattgaaaatgtgtgttaattgataaatcgaaaatcatagcatacgcactcattacacaatataatcattcattattaattattgaactggcctggattgacccacatttactattaaatattcgcaatactttgcttaagtttagatgtaaatttgtattataactagttctatagaaaatacactgtatacagacttgaatagaaggtatagcaaagtagaaactcgacctaagcccccatattttctgtttacacgttgaattagagctggaaaccgtgaaattttcataagaaaagtggggagcttatgaatcggatataatcgtaggtaatcgtggcatattggtgggttgtacgtatgtggatatgtaatgatggtagatccaaaatatttaatattactcacctgtaaatgctcctgaaagcggatgggcagtggttgcgtcatctttactactacagtgaggtctagttattgacagacctttacaacgtaaatgtatctttgcgaaaacaatgccaatacgatgttttcttgaattgcacacttggtaacagtttgtatttgatttgtttcgaggatttattgttgtttaattgcgttcgagtttagtcggtttctggtttaagattcggtttccattggaacgtttagctgcacgaaagacaaaagattttggaaaaacatgtagttatggacagcactgatgcggcaagaatgaggaaaaatcaaattgtgggcgttattttattgttgatagaaagtgacagcgtcaccggatgaaaaaatgaaagataaaggcctatatgtatgtacatatggatgtaaacgcccttaaaataaaacaccgagtctcttattgtatccccaatcgcttttgtgcaagaaaatatatagacgaaattatttcctacgattaatcctttgtatcggtatttttattcgttttcttgcgtttttgcacttgccgttacgacgggaaaattaccagcactttattttatttgaggtgagcgagggagagagagagagagtgagagcgaatcaagagagagaatttgaaaagaaaagaggcagcattatcatcaaaaatcgctgctcaccacagaaaaagtcagccatgttgagttgcgctttgaacaattagtcactgactaatacatgtacagcaattttgctcttgttttccctccccctgtgtgtgcatgaaaatcgaaaatcgcatttaaatatcactgttttgcgcctgataacaatgggacaatgccatgaaattgacgaaattcggtgtatatacatcaaattgagtagcggtaattcccaattcacacgcacacagcagcactcgcgcacacacactcacagatgagcgcgcacacttgcagtgccgcaatatgccacataaacaagaacataattagataaacggtaaattaatcggatgcttttacatcaaataaacaaaatttgtatgtatatattgcatttgcaagcgaacacacacacgcactttagcactttacattttttcccaatgaatcgaaagatatttggagcccgtatgcttactgcaatttaacaaaaatgtacgctaagtactatcatactcgaaataatcacgtcggtttgttgctagatgacgggcacacacactgaagacaaactgagctcttatcaagctctaacaaatgtagtttatttttcttttgtttgactaaatactgactgcaagacaaggtagaggtgtgaaagttatacaattaatgccgatatatacggcaaatatgcaattgcgtggagtgaaaaaacatcgataccacattcaacattcgaatcgatatttgtatcgcacgatcctactgttacacgtatttattcataatattcgaatgtaattattatttaggtaaatgtagtataactttgtaaggaacaacaaatttattttattttatcagcttcatttatattttgccgataacaagtttttagatcataatacatacgtaaggttaacaggtgttatcgagtgatccaattggatatattctctaattggaaatctattttttatagcaatttaatttggaatgtgaagttattatacccgttactcgtagagtaacagaacacaccccagaaaaaattattaaatttcacgtttgcactcacactatctgcgtaacgggtatctgatagtcggagaacgggactaaagcattctctttcgttaatttttaaaaatatatatacattaattatcttgcttaagtgctggataataagtaggcgataattttaacattgttcctatgcaatactatttttaagtaggcgatgattttaactttgttctttttcaatactatttttgacatttacactcaatgtgctacagaaacaacaactttaggatttgctccaaacattttttttattgtttttatcatttggaaaaccgagtcccaacaataaaatcttaatctatgaggtaagcagcagtatccgattttgaagcaccttttggcgatagaatctataccgtcttgacttgactgatcaagggcatgacaaaggatggggcaaggagctagacgaatattgcgggcgtcccgctcgcagatttgcggtagtcttcgaacgggcgaagggtccagcacctcagcaagttgtcgaaaaggtacacataatcatttttgtcctgcaggcacaaaaatttggaaattcttttattaaaagcaaaag

SEQ ID NO: 19271 - DNA, 5668 bp, DROSOPHILA
acctctaccttgtcttgcagtcagtatttagtcaaacaaaagaaaaataaactacatttgttagagcttgataagagctcagtttgtcttcagtgtgtgtgcccgtcatctagcaacaaaccgacgtgattatttcgactaaacgttccaatggaaaccgaatcttaaaccagaaaccgactaaactcgaacgcaattaaacaacaataaatcctcgaaacaaatcaaatacaaactgttaccaagtgtgcaattcaagaaaacatcgtattggcattgttttcgcaaagatacatttacgttgtaaaggtctgtcaataactagacctcactgtagtagtaaagatgacgcaaccactgcccatccgctttcaggagcatttacagctcacaaatgtcgggatcaacgccaattcattttcattcagcacgctcacgatggaatcggataagtttatttgcgtgcgggagaaggtgaatgataccgcccaagtggtcatcattgacatgaacgatgccaccaatcccacgcggcgtcccatctcagcggattcggctatcatgaatccagctagcaaggtcattgcgctcaaagcgcaaaagacgttgcagatcttcaacattgagatgaagtcgaagatgaaggcgcataccatgaacgaggatgtggtgttctggaagtggatctccctcaatacgctagctctggtcacagaaacgagtgtgttccattggtccatggagggcgattcgatgccgcaaaagatgtttgaccggcattcatcgctgaacggttgtcaaatcatcaactaccgctgcaatgcctcccagcagtggctactcttggtcggcatttcggcactgccaagtcgcgttgccggtgccatgcagttgtattcggtggagcgtaaggtgtcccaggcgatcgaggggcatgcggccagttttgccacgtttaaaatcgatgccaacaaggagccgaccacgctgttctgctttgcagttcgtacggccactgggggcaagcttcatattatcgaagttggtgctccgccgaacggcaatcagccgtttgccaagaaggctgtcgatgtcttctttccgccggaagcacaaaatgatttccctgtggctatgcaagtctctgccaagtacgacaccatctacttgataaccaagtatggatacatacatctgtatgacatggagacggccacgtgcatatacatgaatcgtatatcggccgatacgatctttgttaccgcaccgcatgaggcaagtggtggcatcattggcgtcaatcgcaagggacaggtcctctccgtgaccgtcgacgaggagcagatcattccctacatcaacaccgttctgcagaatcccgatttggcccttcgcatggccgtgcgcaacaatttggctggtgccgaagatctctttgtgcgaaagttcaacaagctctttacagccggccagtatgctgaagcggctaaagttgctgccctggcacccaaggccattctgcgtacgccacagacgatccagcgtttccaacaggtgcagacaccagctggctccacgactccgccgctgctgcaatactttggcattctcctcgaccagggcaagctgaacaagttcgagtctctcgagctgtgccgtcccgtcttgctgcagggcaagaagcagctgtgcgagaagtggctgaaggaggagaagttggaatgcagcgaggagttgggtgatctggtcaaggcctccgatcttacacttgccctgtccatctatctgcgcgcaaatgtgcccaacaaggttatccaatgctttgctgagactgggcagttccagaagattgtactctacgccaagaaggtcaactatacgcccgattacgtgttcctgctgcgctccgtgatgcgaagcaacccggagcaaggagctggtttcgcctctatgttggtggccgaggaagagccactggcggacatcaatcagattgtggacatcttcatggagcactccatggtgcagcagtgcactgcattcctgctggacgccctcaagcataaccgtcccgccgagggtgccctccagacgcgcctgctggaaatgaatctgatgtctgctccgcaggtggccgacgccatcctgggcaatgctatgttcacccactacgatcgggcccacattgcccagctgtgcgagaaggctggactgctccagcgcgccctcgagcactacacggatctgtatgacattaagcgggccgttgtgcacacgcacatgctgaatgccgaatggctggtcagtttctttggcacgctgtcggtggaggactcgctggaatgtctgaaggcaatgcttacggcgaatttgcgccagaacttgcagatctgtgtgcagattgccaccaagtatcacgaacagctgaccaacaaggcactgattgatctgttcgaaggtttcaagagctacgacggactgttctacttcctgagcagcattgtcaacttctcacaggatcccgaagtgcacttcaaatacattcaggcggcatgcaagactaatcagattaaggaggtggagcgaatttgccgtgaatcaaactgctacaatcccgaacgggtgaagaacttcttgaaggaggccaagctgacggatcagctaccattaattattgtttgtgatcgttttgatttcgtgcacgacttggtgctttacctgtatcgtaacaatctgcagaagtacattgagatctatgtgcagaaagtgaatccatcccgcttgccagtggtagtgggtggtcttcttgatgttgattgcagtgaggatataattaaaaatctaattctcgtggtcaagggacaattctcaaccgacgaactggtcgaggaggtcgagaagcgcaaccgtctcaagcttctccttccctggctggagtcccgagttcacgagggctgcgtcgagccagccacccacaacgcgttggccaagatctacattgactcgaacaacaatcccgagagatatcttaaggagaatcagtactacgatagccgtgtggtcggtcgctactgcgagaagcgggatccccatttggcgtgtgtcgcctacgagcgtggattgtgcgatcgcgagctgatcgccgtttgtaacgagaattctctgttcaagagcgaagcacgctacttggttggtcgccgcgacgccgaactctgggccgaggtcctttcggagagcaatccatacaagcgccagttgatcgatcaggtggtacagaccgctttgtccgagacccaggatcccgatgacatctctgtaacggtcaaagcattcatgaccgccgatttgcccaatgagctgatcgaacttctcgagaagattattctggactcgtccgtctttagcgaccatcgcaatctgcaaaacttgctcattctcacagccatcaaggctgatcgcacccgagtcatggactacattaaccggctggagaactacgatgcaccggacatcgcgaacattgcgatcagtaatcagttgtacgaagaagccttcgccatcttcaagaagttcgatgtgaacacatcggccattcaggtgctcatcgatcaagtgaacaacctggagcgggctaacgagttcgccgagcggtgcaatgagccggccgtttggtcgcagctggccaaggcccaactgcagcagggtctggtcaaggaggctatcgactcgtacatcaaggctgatgatccgagcgcttacgtcgatgtcgtcgatgtggccagcaaggtggagtcttgggatgacctcgttcgctatctgcaaatggcacgcaagaaggcgcgcgaatcttacatcgagagcgaattgatctatgcctatgcgcgcactggacgtctggccgatctggaggagttcatttcgggtcccaaccatgccgatatccagaagattggcaaccgttgcttcagcgacggcatgtacgatgcagcgaagctactgtacaacaatgtgagcaactttgcccgtctggccatcactttggtctacctgaaggagttccaaggggccgtggactcggcgcggaaagccaactcaacgcgcacatggaaggaggtgtgcttcgcctgcgtggacgccgaggagtttaggctagctcagatgtgcggcctgcacattgtggtgcatgccgatgagctagaggatctgattaactactatcaaaaccgtggatacttcgatgaattgattgcgctactcgagtcggctttggggctggaacgtgcgcacatgggaatgttcaccgaattagctatactttattcaaaattcaaaccttccaaaatgcgcgaacacttggagctgttctggtctcgcgttaacattccaaaagttctgcgtgccgctgaatcggctcacttgtggtcggagctggtgttcctgtacgataagtacgaggagtacgataacgccgtcctggccatgatggctcatcccacggaggcgtggcgcgaggggcactttaaggacattatcaccaaggtagccaacattgagctgtactacaaggctatcgaattctatttggacttcaagccgctgctgttgaacgacatgctgctcgtgctggcacccaggatggatcacactcgtgctgttagttacttctccaaaaccggctatttgccactcgtcaagccttatctgcgttcagtccaatctctcaataacaaggcaatcaacgaagccctgaacggactcttaatcgacgaggaggactaccagggtctgcgcaattcgatcgatggatttgataactttgacaacattgcgttggcacagaaactcgaaaagcacgaacttaccgaattccgtaggattgccgcctacttgtacaagggaaataatcgctggaaacagagcgttgagctctgcaaaaaggataaactctacaaggatgctatggagtacgccgccgaatcttgcaagcaagatattgccgaagagttgttgggttggttcctagaacgtgacgcttacgattgttttgcagcttgtctttatcagtgttacgacttgctgcgccctgatgttatcttggagttggcctggaaacacaaaatcgttgactttgccatgccctatttgattcaggttctgcgcgaatacacaacaaaggtggacaaactggagttgaacgaggctcagcgcgagaaggaggacgattccactgagcacaaaaacattattcagatggagccacaactgatgatcaccgctggcccagcaatgggcattcctccacaatatgcacagaattatccacctggtgcagcaacggtaacggcggcaggaggacgcaacatgggctatccctacttgtaggacttgcgcccgataatgagatcatcaaaacaactttaaaaacaaatgtatcagcattaaaggaataccaataaaataagaaaaataatctattaattgcatgtgcgccaaaaattaccaaaacgaaacaacacagtaaacataactttgaacatcattatattaaagcaatgcaattaacaatccaatttttggtttgtttgtagacagttaaaaattgattatatgttttgataattacagcactctttattcaaatataacagaatatattactttttatcat

SEQ ID NO: 19272 - protein, 1678 aa, DROSOPHILA
MTQPLPIRFQEHLQLTNVGINANSFSFSTLTMESDKFICVREKVNDTAQVVIIDMNDATNPTRRPISADSAIMNPASKVIALKAQKTLQIFNIEMKSKMKAHTMNEDVVFWKWISLNTLALVTETSVFHWSMEGDSMPQKMFDRHSSLNGCQIINYRCNASQQWLLLVGISALPSRVAGAMQLYSVERKVSQAIEGHAASFATFKIDANKEPTTLFCFAVRTATGGKLHIIEVGAPPNGNQPFAKKAVDVFFPPEAQNDFPVAMQVSAKYDTIYLITKYGYIHLYDMETATCIYMNRISADTIFVTAPHEASGGIIGVNRKGQVLSVTVDEEQIIPYINTVLQNPDLALRMAVRNNLAGAEDLFVRKFNKLFTAGQYAEAAKVAALAPKAILRTPQTIQRFQQVQTPAGSTTPPLLQYFGILLDQGKLNKFESLELCRPVLLQGKKQLCEKWLKEEKLECSEELGDLVKASDLTLALSIYLRANVPNKVIQCFAETGQFQKIVLYAKKVNYTPDYVFLLRSVMRSNPEQGAGFASMLVAEEEPLADINQIVDIFMEHSMVQQCTAFLLDALKHNRPAEGALQTRLLEMNLMSAPQVADAILGNAMFTHYDRAHIAQLCEKAGLLQRALEHYTDLYDIKRAVVHTHMLNAEWLVSFFGTLSVEDSLECLKAMLTANLRQNLQICVQIATKYHEQLTNKALIDLFEGFKSYDGLFYFLSSIVNFSQDPEVHFKYIQAACKTNQIKEVERICRESNCYNPERVKNFLKEAKLTDQLPLIIVCDRFDFVHDLVLYLYRNNLQKYIEIYVQKVNPSRLPVVVGGLLDVDCSEDIIKNLILVVKGQFSTDELVEEVEKRNRLKLLLPWLESRVHEGCVEPATHNALAKIYIDSNNNPERYLKENQYYDSRVVGRYCEKRDPHLACVAYERGLCDRELIAVCNENSLFKSEARYLVGRRDAELWAEVLSESNPYKRQLIDQVVQTALSETQDPDDISVTVKAFMTADLPNELIELLEKIILDSSVFSDHRNLQNLLILTAIKADRTRVMDYINRLENYDAPDIANIAISNQLYEEAFAIFKKFDVNTSAIQVLIDQVNNLERANEFAERCNEPAVWSQLAKAQLQQGLVKEAIDSYIKADDPSAYVDVVDVASKVESWDDLVRYLQMARKKARESYIESELIYAYARTGRLADLEEFISGPNHADIQKIGNRCFSDGMYDAAKLLYNNVSNFARLAITLVYLKEFQGAVDSARKANSTRTWKEVCFACVDAEEFRLAQMCGLHIVVHADELEDLINYYQNRGYFDELIALLESALGLERAHMGMFTELAILYSKFKPSKMREHLELFWSRVNIPKVLRAAESAHLWSELVFLYDKYEEYDNAVLAMMAHPTEAWREGHFKDIITKVANIELYYKAIEFYLDFKPLLLNDMLLVLAPRMDHTRAVSYFSKTGYLPLVKPYLRSVQSLNNKAINEALNGLLIDEEDYQGLRNSIDGFDNFDNIALAQKLEKHELTEFRRIAAYLYKGNNRWKQSVELCKKDKLYKDAMEYAAESCKQDIAEELLGWFLERDAYDCFAACLYQCYDLLRPDVILELAWKHKIVDFAMPYLIQVLREYTTKVDKLELNEAQREKEDDSTEHKNIIQMEPQLMITAGPAMGIPPQYAQNYPPGAATVTAAGGRNMGYPYL

SEQ ID NO: 19273 - DNA, 7801 bp, DROSOPHILA
ctcgcatattccaatagatttaaccatccaatttaacacccaggtcttatggtgctcacattttggctgctaactggctcgattggcttcttcgccgcctacgttttcattctaagaatctacggagctgtgaagatcgactaagctgtgtcacccactcgtcacgctgtacaccaaactatccttgcaatatcattcgatcataaatatatttatagagcaactgaacccagtctcgtccagctgcagaaatcaatataaacaaaacggaaactaagcgaaaactcgacgactcagccatgtgagctaacttccccttcttgtccccagctgcagaaagtcacccactaagtaaccatttactaagtcaaaacgctaaattcagcaagtacgttttggaaccccggaagtgactcgatttgcaggagcgtgagcgttgcgttttagaatcaatctagaaatgcctaatttatatatgtatgtaaagaatctaatctaagcaactgatataaaacaaacaaaaatcaaataaactaagcttaatgtacgacacaccgccggtgagtgtaagtttcttagcaggaatccaacttgtcgcttctgttcgtgttttatgaactcggaaacttgaagtttttagctcagttgcatttctacttcgctgcaagctagttcaacaaaccatatctaaaaatgtttcgcttgcttttggcattaatttgtgcattttctttgccatatttcctaagtacgggaagtcgagaagtaagactgacctttttaaaaagtctgaggctaacgatatatgtataatcccccaggcttggagaaagacagtgaagggtcgagtgatgtccaacgtcagcatgacactctactggtggatccagcaacacttcccgtatgaattggtaaagaacgaggacgaatgggatgcaattggcggcgatgtgtacgagaggccagaatagtttgaatatcataaaaaggccgaatatatactgtgaaatatttgtaatctgcaaagtttcaagtacatccttttgattttaaagttacaattacattgattatttaattaattggtacatataattgcttttagtatattacacatattagctttaaaacattatgtaagttatctatattcaatcgtatacaacttcttgattgggtgctgaccagagctagtagtgcccattgctcataacattatttcgcgtatttttgctgagtgtaggtaagattccgaagcaaaaagtgaggtcatcacaatggacgcagatatcttgtatggtaaccaagatttaatgctactttttaggggatcgttccattattttaagatccagctctttcacttcctaatccgtaaaacttaatgtaactactatcaatgcacaatttcctttaagtaggcacaaactaaggatgataaacaaagttaagtgtactattcattatcattttctgcacaacacattgctagattacttaagagatagattagagtctagagaccgtgcgggaacaaccctccttctgttcatcctgattctccgccagctactccggacgcagatgctcatctgtggaaaagtgcgctttgacatggttgcgaatcggtttacctcatcgggttccgattctttaaacgctagcgattccgcttggtcttgcgactcacattgccctcgatgataatctgatagcatgcaaagtaaagaatttgaattggaatatggtggtgtcttgatcgactctagtcgtattgtaagaagttggttagatagtttttcttcctgcagctggatgggtctatggtatagggacacttgaattgctgggtgtgggaacaggtgtggttgttaggatgggttagatggggttactccagcaccggctgctctacctgaaggatctggctggcctcgaaagcggtgcccggcagcaggatcaccggcgatgtcacattgcccgcctccacgcacaacatgttggggaactcgtcgtccccgaagtcactcatctcacgcgatcgatcgatccaaggattccagatgactgaatatatatcaaatatatcacttcacacactttaaaatatccttttgtgccatttacttacccgtatcgggaaaattgtacttgtgcagtctcatcttcctgccggacaccacgtttgtgatgacgtgctcctgcggcgtgtgctggtagatcctgtcggtccactcattgacggtgaccacctcgcgtccctcctgatagagcgcattctcccgcgtcttgtcgatgaagtgacagccctggaggccggtgatctgacatcggcgcacatcgggcacctttaggtaggtgtgcagcagcatgttgaaggtgaagctcagctccttgctgggattgtagacgccgatgtggaagtgcagctccttttcgcgcaggatcagcctataagtgatgcgaaacctttgaaggaaaagaatttagttgctagtaatacaatctctatctagcaatttaagtgttcaaactcactgataattccatatggatcgcgtaaaatcgttgtccatcagcgaaaatatggcctccacatcgccattgtgaagcctgtctggcggtctctccaggtgccacctggtaatcctcgcaaatccatgctgcggcccaaaggaccacgcaccgaactgagctaaaatggtggccaaaaatgaactaatcgctgagcaaagctgctggatcttggcagacttacggaagacaaagggaatcccaccgcgtatcgccttcttgccatcgaatgaggctagtttgctgtggaaaaacaagatgggtttgagtcaaaagaaggaaaaggaaaaagaaaaggctcgtttaattcggttagatgctactcgaaaatattccagtcataaaaacgcttgcagaccgagacagacattcagaaattcagaaatgctattagcagaaaaaagtgtctggcaaaatgctccttgcccctttttgtgtgtgtgtgtgtgtgttttgtttttctcctgtcgctgaggatgacgttgccgcgagatgggacttgccttgggtttcgtctcagctaatttgccgacgcatccatcaagcaactccttctgccccgggatctacctaagctgctcctccatgttctgtgcatcatttgtaaatgttttcagctgtggatcgcattgggcatggccaaatttcattaatattctgagatttcagctcggcatttacttgaaagcggaagaattactgacagtctttgaaatagttgccttgaaaaatatatataaggaatttactataaaggattcacgtaattatacgagttgtttcgtaatttagaacataaacaatctaaatgttaagtgtctttaaccaaagtttttccatttctgtaaatttcgaaataaacctattttagcccaggccgtctcgaacccggcaaataattaatttagtttttcactagctcgccttgtccacgaccactgccagtttttagtgggtttccgaatgccgaatgactgttggccacaaaaaccgtcgaaaactttgcagcagacgaaacaaaaaagaagttaggagagcgtcgacgaggggctaacacactccaatgtatttgtatttgtgtttgtattcgtatttgtgtttctgtttctgtttgtgtgggagctggccaagaacccgggaattggccgaaagttgatgggacaacgaaccactgtgcaacactgtgtggagggcctccccatgtagtggggatttatcgatctagctggccgcgccaaaaactccattcataaaaacttgcacattgttttgccacaaagggaggggagctggatatggaaggggggctttgggaagcccagaacaggagtaggcagcaacagggcgaaaaaaaaaaaacggccatcaatggaggcagctcctcttggttgcaagtgcaacggctcctagttggcgagctggggcatttccccgccatcccgtctctgtcgctgtcccagtgtttttgtgtttttgccattcggtcgcttttggttcggttcgctggttcgacgtttgggcccgctcggtcccgacgtgttttttgttgggtgtcatacaaaaacattttgccgccaaacagaatggctaaggcagctcctcctgctgctcctccggctcctgctgctgctgctgctgctgctgcccaacctgtcaaccgccttccccctggactcgtcccactctctgctccttctccaccagcgatgcaaactttgcgaatcacttttttggttgcatgaccaacgcacagcacagcacaccgtgggcttgcgtaagttcgggcttaaagtttggccaacgcggcgtatgagcaatgtttaaagggtgctacctgacagagttcagtccactcacctgacaaacaactgctcctgattgtttacccgccaggacacgaccgtcgcacctgcaaacagaaggtaggcaaataattcggtttattcgaataatatttacaacaaatatttaaaaaatacataaggaatgctgtggaataataactaaagatgtgcggatttctagaaggatatagggactacatgtactaatcaaataagaagaaatatatatcaagaggtattaactatgcccccagtaaatcgagttcaattcaagctttcagcggaacttaactagttttcagttttgtacaatcgtactatgatatagtaaagttaagaactagaaataaatgtaatataactatgtattaataactaactattaataaacacttatttaatctcattttattgcattgtcgttgaaattagtttcagtaacatcggaacttgtgaatcaatgaatgaattcgaagctggatcaactgtgggaattgcacaacaacaacctaaaaagcaaagtacatgacgcacacacttctaacccacatggctaacacatacaaacacacacacatacgcgcacacttgcacgcacacaatcgcagagtaagtaactggcctgtaagtaaactaactggctgagaccgaatctctggtacagttaaagactgggatatgggttggttttggttacgctacgggtatggatctctgggcatgacgatggcctacggccaatgggtgggtgagcacttggctgcgtgggaggagctgctgctattccccaaaatctcgctcagttggccccaatgtgcgatgggctttcgacaggccgtagccactgctctggcaccttgattattatgattggaaacactttggtgtcgagtttagttaaagctcctccgaaaactaataattaacattgttcgaattacatgtgataagatacactgaaaggaaaacaatgcatcagtttaagtatatatcttagtttttcacaggccatttaattgaagaggaagagtaagtggaacacgaaaaataatcatatacatgggatcatataaatatctttaagaaaatcattgcaagtgaatttagtaaagatctttaatccttaatgccttagccactgaaactctttccgataagaaactatgaagatctcaagaatttccattagatatatatgtagttatttcttccggtgtacgatatgctgtctgttccaaacgctgttgtgtctctggccgtctgactgttgctcaaacggctgcgacttggaaagcaacgtgggcagcccagacacaggcagtcgtaattgttgaaagtacgctgggtacaccagtgccagctcacatacatacatatgtacataggtgctcatagagagggacctgtatacatatatgtacgaaccatatacatatatatgacgcctaatcgaaatgtgctgcgagtaggagccgcatcgatccgatctccaagatccaaactccaagctctaagcttttccaaaaccgaaacccaactgatccccagcgattggatcgagtgggggcatatatgtacatatagcgcctaaattgcgacgatctcggctgataagatagcaaaggccctctggctggtgcgtagaacagcgaaaggtaaaaacaaggttatttccagaacgaattgataacctccagaggtcgcgaatacatcgagaatagggggcgaaacgggtttcggtttcggaagagtctaagcgccaatcatccgctaaaaataacgccaacaaaattttggcaaagtgctggtggtgtcttcttaattatgattaattgttcgccagctattcatttgttgtttatcattgtttcaagacattctgctcaccgtgcaagttgatggtgcaggttgtattgtttccgcgatccagaacaactacactcgttgcggccattgcggccgctgtcgtggccattttgaattttcctaacggtaaaggtatatccgggggatcgtttgagatcctgtgtatgtttgtgtgcgtgcctgcctactgagggagtatatctttgaaaaattgggtacgaaaagaaactgtagctccgtggcacttaaagcaaggcgatctggtttcgtactcaaaacgggcgtcgattgaactttaatttgcgcatttacataatgtttgcaaaaattattctgcacacaaagcaccgcactcacacagacgcgccagcacacacacactcactcgcacacacacatacacacgcacgcacagagcgcagcttgagtttttgtcaatgaacaaatacgtatggaaaaaactcgtgcaaaaaacgttcgggcgaaaagcgtcacgacccggaccttcgatgttctgccaacgagcgaccgattgaaactaaaccagcttgcgccaactgaccgccttctgttaccggcccatgttaagctttaaaattagctttatgtccatggtcgacgagggagtactctaccttaaaattatatttttaacgtataactaagtatttactgaagtggatgatattaccacattattcacgagtttatggtttcatataagttcattttttgctttaattaatgcatttttaatttaaatatttcttattctcaaaggtgtgataataaagaatacatacatagaactctccaaataatattgaaagtatttaaattgtaatataatcttaaaaactttaatcaaaattgcatataaaaatctaattattattattgtttgtgacgatcatgtactctgtcaaccaaactgcgcagaagctttgtgaattgatccgctgcctcgatggactctgatttttgtaggggacaccctaaagccaaccatgttaacgcataaacgagcagcagctgattggaaatcggacccatttgcggttatcgatagccaagacagcgttgttgtccaatcagaaaaggtgtaggcgcagcggaatagcataaataaaatccgagagatgtaagttgcaacttatttgtgcagatacaaatgaatctgggcaggaatacccgaaattagctacgttttcccgtaatacccggtacgattactcatttccagcaatgttgaggccgcgaagtgtggaacagagataactaatcccacaagcaagaagaagaactgcccaaaaaaagagccagcggattaataacattatagcaccgcacctgagcgtacagaacatcccaacgaaatgtcgcgcaaaatggccaaattctacaagctggacatcaatcgcaccgagtgggaaatcccggaaacataccagaacctgcaacccgtgggtcagggtgcctacggccaggtctgcaaggccgtggtccgcggaaccagc

SEQ ID NO: 19274 - DNA, 1962 bp, DROSOPHILA
cagaacatcgaaggtccgggtcgtgacgcttttcgcccgaacgttttttgcacgagttttttccatacgtatttgttcattgacaaaaactcaagctgcgctctgtgcgtgcgtgtgtatgtgtgtgtgcgagtgagtgtgtgtgtgctggcgcgtctgtgtgagtgcggtgctttgtgtgcagaataatttttgcaaacattatgtaaatgcgcaaattaaagttcaatcgacgcccgttttgagtacgaaaccagatcgccttgctttaagtgccacggagctacagtttcttttcgtacccaatttttcaaagatatactccctcagtaggcaggcacgcacacaaacatacacaggatctcaaacgatcccccggatatacctttaccgttaggaaaattcaaaatggccacgacagcggccgcaatggccgcaacgagtgtagttgttctggatcgcggaaacaatacaacctgcaccatcaacttgcacggtgcgacggtcgtgtcctggcgggtaaacaatcaggagcagttgtttgtcagcaaactagcctcattcgatggcaagaaggcgatacgcggtgggattccctttgtcttccctcagttcggtgcgtggtcctttgggccgcagcatggatttgcgaggattaccaggtggcacctggagagaccgccagacaggcttcacaatggcgatgtggaggccatattttcgctgatggacaacgattttacgcgatccatatggaattatcagtttcgcatcacttataggctgatcctgcgcgaaaaggagctgcacttccacatcggcgtctacaatcccagcaaggagctgagcttcaccttcaacatgctgctgcacacctacctaaaggtgcccgatgtgcgccgatgtcagatcaccggcctccagggctgtcacttcatcgacaagacgcgggagaatgcgctctatcaggagggacgcgaggtggtcaccgtcaatgagtggaccgacaggatctaccagcacacgccgcaggagcacgtcatcacaaacgtggtgtccggcaggaagatgagactgcacaagtacaattttcccgatacggtcatctggaatccttggatcgatcgatcgcgtgagatgagtgacttcggggacgacgagttccccaacatgttgtgcgtggaggcgggcaatgtgacatcgccggtgatcctgctgccgggcaccgctttcgaggccagccagatccttcagattatcatcgagggcaatgtgagtcgcaagaccaagcggaatcgctagcgtttaaagaatcggaacccgatgaggtaaaccgattcgcaaccatgtcaaagcgcacttttccacagatgagcatctgcgtccggagtagctggcggagaatcaggatgaacagaaggagggttgttcccgcacggtctctagactctaatctatctcttaagtaatctagcaatgtgttgtgcagaaaatgataatgaatagtacacttaactttgtttatcatccttagtttgtgcctacttaaaggaaattgtgcattgatagtagttacattaagttttacggattaggaagtgaaagagctggatcttaaaataatggaacgatcccctaaaaagtagcattaaatcttggttaccatacaagatatctgcgtccattgtgatgacctcactttttgcttcggaatcttacctacactcagcaaaaatacgcgaaataatgttatgagcaatgggcactactagctctggtcagcacccaatcaagaagttgtatacgattgaatatagataacttacataatgttttaaagctaatatgtgtaatatactaaaagcaattatatgtaccaattaattaaataatcaatgtaattgtaactttaaaatcaaaaggatgtacttgaaactttgcagattacaaatatttcacagt

SEQ ID NO: 19275 - protein, 297 aa, DROSOPHILA
MATTAAAMAATSVVVLDRGNNTTCTINLHGATVVSWRVNNQEQLFVSKLASFDGKKAIRGGIPFVFPQFGAWSFGPQHGFARITRWHLERPPDRLHNGDVEAIFSLMDNDFTRSIWNYQFRITYRLILREKELHFHIGVYNPSKELSFTFNMLLHTYLKVPDVRRCQITGLQGCHFIDKTRENALYQEGREVVTVNEWTDRIYQHTPQEHVITNVVSGRKMRLHKYNFPDTVIWNPWIDRSREMSDFGDDEFPNMLCVEAGNVTSPVILLPGTAFEASQILQIIIEGNVSRKTKRNR

SEQ ID NO: 19276 - DNA, 6223 bp, DROSOPHILA
cgatggtttttcattcgctcgtctggcaaatcgatattcgatgggcaaataaataaattaaatgtcaattaaatatcaatcaatttcgtcagctgtttttcaaggcacatttaactggttaattgaaggcctcaaaaataaattgtcatcgtgtatttagcgtatttttgtgaaaaatcgcaaatgatactggtggtgggagtgggggtgataaaaagtttcccttcatttaaattaaaacaattagctttgcggtttttttcctctctttcgattccccctctacacatggcctaaaggtggtgtcgataaagttgtaggctgtagaaaacgcagattgaaacgtcgcggccgaaaacaaaatcaacaaaaactaaatgcttatgaaaagtgtctgtggaaagagatggcatgtggctctccccctcatggaaaggcagccattttcctggcctactcgcagagggagtgaacagtgccgctatatgacccccactcggtaacgccccgtgagagagggagagcttgcgcctgcgcagttcgctggggacacagttgtcaaccggctgacagctccagcatgcgcataataaagtcatattgctgcctaacaagcccccctcgccaaattggcaagagagagtgagagcgagagggagcgagcgagagagcgctctggccagctaataggagtgagtgagccggcgaaaccggttcgcatggggcaggtgacaaggctaagagagagcgaaaatcgatcagtgtaaggccgaaaagacacatcttctactctcatctcttcatgtcactgtcaccaactgctgtcactcactcactcgctcgctcgcacacacttcgccagctacttgtgggatctcgccctctcgctcccgcactcggacctctctttccaccgtgacagttcaatcggctctcgcgttaactctccccgacgtcggcgctgcgattccgaagtagtcaactaattcagtcgttgcgctcgatgtgaacagacgtgcgtgtcggaacaacagttgcaaatcaaacacgaaagcataagccaaacaaaaaacaccaaacagagaagagaatcagaagattctgagcaatcagaagaatcagtggctcagtgtcaagtgacccagtgacaagtgtcttaagcgagttgcgatttagcaccaagtcgaaaccaatggccctggaggatcgctgcagtccacagtcagcgcccagccccattaccctacaaatgcagcatcttcaccaccagcaacagcagcagcagcaacagcagcagcaaatgcagcacctccaccagctgcagcaactgcagcagttgcaccaacagcaactggccgccggtgtcttccaccatccggcaatggccttcgatgccgctgcagccgccgctgctgcagctgctgctgcggccgcccacgctcatgctgctgcactgcagcagcgcctcagtggcagtggatcgcccgcatcctgctccacgcccgcctcgtccacgccgctgaccatcaaggaggaggaaagcgactccgtgatcggtgacatgagtttccacaatcagacgcacaccaccaacgaggaggaggaggcggaggaggatgacgacattgatgtggatgtggatgatacgtcggcgggcggacgcctgccaccacccgcccaccagcagcagtcgacggccaagccctcgctggccttttccatctccaacatcctgagcgatcgtttcggagatgtccagaagccgggcaagtcgatggagaaccaggccagcatattccgccccttcgaggcgagtcgttcccagactgccacgccctccgcctttacaagagtggatctgctggagtttagccggcaacagcaggctgccgccgcagccgctactgcggccatgatgctggaacgggccaacttccttaactgcttcaatccggctgcctatcccaggatacacgaggaaatcgtgcagagtcggctgcgcaggagtgcagccaatgccgtcatcccgccgcccatgagctccaagatgagcgatgccaatccagagaaatctgctctgggatccctgtgcaaggcggtctcgcagatcggacaacctgctgcccctacgatgacccaacctccgctgagtagcagtgccagcagcttggccagtccgccacccgcctccaatgcctcgaccattagcagcacctcttccgtggccaccagctcgagctcctcctcgtcgggttgctcctcggcggccagttccttgaactcctcgcccagtagccgactgggagccagtggatccggagtcaatgccagcagtccccagccgcagccaatcccgccgccatccgccgttagccgagattccggaatggagtcctcggatgacacgcgttccgagacgggatccaccaccacagagggcggcaagaacgagatgtggcccgcctgggtgtactgcacccgctacagcgatcgtcccagctcaggttagtatctatgcgattacctagcgtttaagtgggtcagaaagagggttcgtcgggcaccatcttcagtgttgtcaaaacaaggaagtcccaaaggttcgttaaaaaaaaaaagatgtgaaaatggtaaatggtatatggttacatggggaccacccttggggagcgttatgttggcggcagcctttcaagcagctctgttttgtgtcataaatccgaaggacactgccacaattaggcgacacgcggacaatggcaatgagcccgaatctgactcccatttctataaccatgcccattcccattcccatttcgtatccgaatccgaatccgattttgggcctcacgcagtgctgcgctgcttttgaagagcgacactttatgtgacaacatgtagcgcagagccagcgcttgtctatcggaactgttagatcctcaggtcgaaggtcaccgctcacgcacacacgccacgcagaagccgagaccctaaaacgcgctgacgattgacaggggaaaagtaggtgcgggggagatatgatggcgggggaagccccttcgaaaggagaagagttttccattgacaagcggagattttccttgcagctcttcttagatcgtgtgttaattgacgagttaagtgcttttttatggtcggcaatggttttttaatttggtgtcgatgcaatcgatggcagcccataagcgaggcgttgatggccccactccgcggctaggaattaatcaaacgatctccacttactggcggtcaattaaattataatttacaatgtgtggaaatctaataagcactacggattgctgcggtgccgcgttgccaattagccggtgacttggacttagtcgctaattagagagttggctagctggcaaatcatttgcctaaaatatgccgtagacctttgggttcgttaactcgccggagttctactcttctcttgcgctgacagctgacaaattgaacacttccccgccagcacgcgaaagggagctccagctccggccgaggaattccgcccagacatatgctaattgaatcattaatattattaatagtatgtggcgcatttatgcaaatagaactaacgtatttctcgtgtttttgtttattccaggaccccgctaccgccgccccaaacagccaaaggacaagaccaacgacgagaagcgtccacgcaccgcgttctccagcgagcagttggcccgccttaaggtgagattcagttcttttttccatatatggttatatggttataccaatatccatccatatccatatccaattgccctacgcttgttgtgtcatatttgcaccaaaatattgacaccgcccgctgctaatgcatcctggcaatgtggtgtcccgtccgtacttaaccaatcagccacgctcggccgaaaccgcaaataattgattttccctacctgactatacaacatggatatccttgccatccgaaactcatccagcattccatttcttccacttacagcgggagttcaacgagaatcgctatctgaccgagcggagacgccagcagctgagcagcgagttgggcctgaacgaggcgcagatcaagatctggttccagaacaagcgggccaagatcaagaagtcgacgggctccaaaaatccgctggcactgcagctgatggcccagggattgtacaaccacaccaccgtgccgctgaccaaggaggaggaggagctcgagatgcgcatgaacgggcagatcccctaagcgctgaccaatggttacccataaggggttactccttctgacgggggcgtgcaatattcgagggcgtacaaatggttttcatgtgatataattgtagcgtacatatgtttttgtatatatctctaaaaatatatatatatatacgtataatcctaacctagagtaagacccatccgtagcgaattcgagctgtaagttgttggcgtatttatttaaccacccctggatagccgaaagtattatcgtaatcacccgacacaaagcctatcgctatcgccgcacttcaaaagcttcgaccttcagacgtttattcctacacaaaacactatctatagttattactccctataaattacgcgcttgcaaccgctctgtaaattaagtaacttaacagttccctagcttaattcctagtttacacacttaaggattgctatgaaagagtattttagtttctaagcgaaatgttaacgagcaactaatagctggcaaatgcacctaagaaaataacaacgaaatgtttgtgctaaagcaagttcatgaaaagaaaattaaaaacaaaataaaagaattatggaaaaaaattaaaatgcaattggtttcctctgggaattggaagtctgctacattaaaggaaaatatgccacccatatatcggaggacatgcggtctaatcggtggccttatttgtactttgtgtagggcgccattatcttctctacgctttttcatctgtcacatcaaaggctatagaacattaaatcacgaacacttgtcgtcgggcgagggtgccgctaattgcacaatcacattccgaaccaaaatcggaggccgtcgacgagtaacggcagctcttgctcttcgattccattccgtttaattaaagccaaatccgcgcgtagtataaacaaatatctgtgacgagacagaagcccaacaaacagaaagaaaaaaaaaaatgcaaaactaaagcggcagggagcagtcatcaaatgatttattggcacagatctcgcggcgagcggcgttaatttgctgaaaataaatgcaaacgcgaaatgcaatgcaaaattgtgggagggggcgggatgagcagctgacatttactggcaagcgttgatgtgcacatacaatacacacacacacatgcacggctgtatgaagcgcatatgaattgatgccaaacgctaattgcacagctagcttgaggctcaaatccattcgcatgtctcgaggggtctcgctttttcagttattcagttactcagccttttagcctttcagccaaggcggattcaaatcggccgaattatagaggcgcaaatccatttgtgcacgtaatgaaccaattagacaatttgcccattagcaatacacacaaacatcgccgcaatctgtctcgccatctgtctatctgtatctgtatgtctgtccgtcggtcgactgtatctgcaaatcgaattaaatggaagcggaaatcaagtaaacttttttattaggcactctgtacgtttggcgggtatatggggatgaagtaacagatcgcctaaagcttttatttgggagtattgtttttggtttcaggaaaagtttgcgcactttatttacctctaatcccaacatttattacgattttttgaaaattaaaggttagtcaaccaatgaaatcactttctcaacattaaactactagcagtaatcaatttctaaggattttatagccagtgttttataatgttaaaaaaatataaaatccctaacctttattatacactaaacatattggttgtgtaaaatcgcactagcgcgcttcgtcactacgtgtactgccctttactaggcaggctcattaaccattatgagcaatttgtaagcaatagcgcaccacggtttttactttccaaagctacttgaaatattatgagctttatgattactataatattccacagaggaaag

SEQ ID NO: 19277 - DNA, 2408 bp, DROSOPHILA
tcgatgtgaacagacgtgcgtgtcggaacaacagttgcaaatcaaacacgaaagcataagccaaacaaaaaacaccaaacagagaagagaatcagaagattctgagcaatcagaagaatcagtggctcagtgtcaagtgacccagtgacaagtgtcttaagcgagttgcgatttagcaccaagtcgaaaccaatggccctggaggatcgctgcagtccacagtcagcgcccagccccattaccctacaaatgcagcatcttcaccaccagcaacagcagcagcagcaacagcagcagcaaatgcagcacctccaccagctgcagcaactgcagcagttgcaccaacagcaactggccgccggtgtcttccaccatccggcaatggccttcgatgccgctgcagccgccgctgctgcagctgctgctgcggccgcccacgctcatgctgctgcactgcagcagcgcctcagtggcagtggatcgcccgcatcctgctccacgcccgcctcgtccacgccgctgaccatcaaggaggaggaaagcgactccgtgatcggtgacatgagtttccacaatcagacgcacaccaccaacgaggaggaggaggcggaggaggatgacgacattgatgtggatgtggatgatacgtcggcgggcggacgcctgccaccacccgcccaccagcagcagtcgacggccaagccctcgctggccttttccatctccaacatcctgagcgatcgtttcggagatgtccagaagccgggcaagtcgatggagaaccaggccagcatattccgccccttcgaggcgagtcgttcccagactgccacgccctccgcctttacaagagtggatctgctggagtttagccggcaacagcaggctgccgccgcagccgctactgcggccatgatgctggaacgggccaacttccttaactgcttcaatccggctgcctatcccaggatacacgaggaaatcgtgcagagtcggctgcgcaggagtgcagccaatgccgtcatcccgccgcccatgagctccaagatgagcgatgccaatccagagaaatctgctctgggatccctgtgcaaggcggtctcgcagatcggacaacctgctgcccctacgatgacccaacctccgctgagtagcagtgccagcagcttggccagtccgccacccgcctccaatgcctcgaccattagcagcacctcttccgtggccaccagctcgagctcctcctcgtcgggttgctcctcggcggccagttccttgaactcctcgcccagtagccgactgggagccagtggatccggagtcaatgccagcagtccccagccgcagccaatcccgccgccatccgccgttagccgagattccggaatggagtcctcggatgacacgcgttccgagacgggatccaccaccacagagggcggcaagaacgagatgtggcccgcctgggtgtactgcacccgctacagcgatcgtcccagctcaggaccccgctaccgccgccccaaacagccaaaggacaagaccaacgacgagaagcgtccacgcaccgcgttctccagcgagcagttggcccgccttaagcgggagttcaacgagaatcgctatctgaccgagcggagacgccagcagctgagcagcgagttgggcctgaacgaggcgcagatcaagatctggttccagaacaagcgggccaagatcaagaagtcgacgggctccaaaaatccgctggcactgcagctgatggcccagggattgtacaaccacaccaccgtgccgctgaccaaggaggaggaggagctcgagatgcgcatgaacgggcagatcccctaagcgctgaccaatggttacccataaggggttactccttctgacgggggcgtgcaatattcgagggcgtacaaatggttttcatgtgatataattgtagcgtacatatgtttttgtatatatctctaaaaatatatatatatatacgtataatcctaacctagagtaagacccatccgtagcgaattcgagctgtaagttgttggcgtatttatttaaccacccctggatagccgaaagtattatcgtaatcacccgacacaaagcctatcgctatcgccgcacttcaaaagcttcgaccttcagacgtttattcctacacaaaacactatctatagttattactccctataaattacgcgcttgcaaccgctctgtaaattaagtaacttaacagttccctagcttaattcctagtttacacacttaaggattgctatgaaagagtattttagtttctaagcgaaatgttaacgagcaactaatagctggcaaatgcacctaagaaaataacaacgaaatgtttgtgctaaagcaagttcatgaaaaaaaaaaaaaaa

SEQ ID NO: 19278 - protein, 552 aa, DROSOPHILA
MALEDRCSPQSAPSPITLQMQHLHHQQQQQQQQQQQMQHLHQLQQLQQLHQQQLAAGVFHHPAMAFDAAAAAAAAAAAAAAHAHAAALQQRLSGSGSPASCSTPASSTPLTIKEEESDSVIGDMSFHNQTHTTNEEEEAEEDDDIDVDVDDTSAGGRLPPPAHQQQSTAKPSLAFSISNILSDRFGDVQKPGKSMENQASIFRPFEASRSQTATPSAFTRVDLLEFSRQQQAAAAAATAAMMLERANFLNCFNPAAYPRIHEEIVQSRLRRSAANAVIPPPMSSKMSDANPEKSALGSLCKAVSQIGQPAAPTMTQPPLSSSASSLASPPPASNASTISSTSSVATSSSSSSSGCSSAASSLNSSPSSRLGASGSGVNASSPQPQPIPPPSAVSRDSGMESSDDTRSETGSTTTEGGKNEMWPAWVYCTRYSDRPSSGPRYRRPKQPKDKTNDEKRPRTAFSSEQLARLKREFNENRYLTERRRQQLSSELGLNEAQIKIWFQNKRAKIKKSTGSKNPLALQLMAQGLYNHTTVPLTKEEEELEMRMNGQIP

SEQ ID NO: 19279 - DNA, 2468 bp, DROSOPHILA
tacgaaagtcgaggtagtcagcctggatgaaagtgccgagaatatgcctttctgtacaaatctcaaaatggacacagatcaatcggaggaggagctggagccactgcaattaagtgctggcaacacaccacagcacgtgatcacaacacaattcgatagcgatgaggactgcaagctggatgttgtggccacgctggcgaactgcaccaccaccgaagatagatcggaatcggcagcggcattacctgccaccacatcgcactctgagtctggtagttcccactcggcaccttggactcgtgaagaggacaaagtaatcctgatcgaaatgaaaataggggcacgggatcgagagcagctcattcggcgtatgcgcgccaagctaaagaatcgcagtatagaagaactacgtagtaggcatcagtttcttatggactttctgtccaaattgcagggaaagtgaggtttctctaagatggtcttttgtgtattataatccaagctgaaataggatactaataataactgtatataaacgaaatggtttaccccatacctacaaaccaaactttttgaagggaattctttgttgtactgattacctatttaagcatacaaaaattcccttcagaatacttagttttattattaaaaatttgaatattttgaaatctactgtacgttgaaattgactattaatagatatattgaaaccatgaatttaatatttttgtgtccgtctaagtttacttttctatatgataagaaggtcgcattgtttgaatttgattattctattctatagttttggttaacgagcacattgttttccattgtcttaaagattgtaaatatataaaaatataacattttttaaaatctctaaaatgtatctgatattgtcaaaccagcttgttcgggaacttcaaacgtattcgcatttgagaacttaaacaaacctggaattgttcctttaagaagtacgacgtaagactaaaatatggagctctcgttggatgaaccgcaatgcgcatccttcttttgcatcctgggtgccgtgtgcgccattgtcttttcgacattgggagccgcctacggaacagcgaaggcttctgtgggaatctcttcgatgtcaatcaagcatccgcagctgatcatgaaggcgattgttccagtggttatggctggcattatagccatttatggactggtgatcgcggtcctgcttgctggatcacttagcagcccctatagcgcctacaagggtttcctaaacctcagtgctggactggcggtgggagtctctgggatgggggctggaattgctattggcgtggtgggcgaagctggagtccgtgcatctgcccagcagccaaaactctttgtggccatcattttaatattgatatttgccgaggtcttgggtctgtatggtctcatagtggccatttatttgttttccaagtagtgggagttatgcctacctttgctgttattaaagaaaaactggtttgatacattctgttctgtctgttgatgcttcatcattagtcaaacgtcaaactatttgctcagctgtaagacagttttttgtagtcagcttcgttctatcttttagtggaatagttaccatttgggattcacagggttaacatcaaactgaagatgtatctccattatttttttggattcagcttagtctgcagtattgttctagttcaagttaagactcaacagaatgctacaagcaacgctaccaatatccatgggaataatactagaaggcacataatggtacggaaattgcacgctgatgagaagcagggtaaaggaatgatgagtatagtgatacacaagattcaacccgggcaatcctactacaaggtgtttgatggcgatgaggaggcagcgcgtggattcaccaataagatatggaaccgtttgtttaatcgctatagcacaatgcgcatataaattattagtcttaattctagttacgtatgcggaataagttagcttaagttataattataaagctagaactgaatatggattcctcgtctggtgcggaatcctttgagtgcaggcaggcactagatctggtgtagaaaacctctgactcatggtggctatgacttccttcgtcctgctcggaatccttcatggtgaatgttcccactgccgtcttgcaatgggcattgattttgcagctggagtcactggcccaactctcgcaaccgcagggcaatgcctcatctggtggcagatgttgtggagtcacactgctcaccacccgctcctctgctgtggccttctgctttctcttgtcctggcagcgtctccatgtccttcttacagcccggaaacaacacaaaccgaagcacacatcggaggttcccttaagacacaggaaaaactccggcataaacgatggattgatcacggcgtagacaactatgttcagggac

SEQ ID NO: 19280 - DNA, 468 bp, DROSOPHILA
atggagctctcgttggatgaaccgcaatgcgcatccttcttttgcatcctgggtgccgtgtgcgccattgtcttttcgacattgggagccgcctacggaacagcgaaggcttctgtgggaatctcttcgatgtcaatcaagcatccgcagctgatcatgaaggcgattgttccagtggttatggctggcattatagccatttatggactggtgatcgcggtcctgcttgctggatcacttagcagcccctatagcgcctacaagggtttcctaaacctcagtgctggactggcggtgggagtctctgggatgggggctggaattgctattggcgtggtgggcgaagctggagtccgtgcatctgcccagcagccaaaactctttgtggccatcattttaatattgatatttgccgaggtcttgggtctgtatggtctcatagtggccatttatttgttttccaagtag

SEQ ID NO: 19281 - protein, 155 aa, DROSOPHILA
MELSLDEPQCASFFCILGAVCAIVFSTLGAAYGTAKASVGISSMSIKHPQLIMKAIVPVVMAGIIAIYGLVIAVLLAGSLSSPYSAYKGFLNLSAGLAVGVSGMGAGIAIGVVGEAGVRASAQQPKLFVAIILILIFAEVLGLYGLIVAIYLFSK

SEQ ID NO: 19282 - DNA, 3244 bp, DROSOPHILA
agggctcccaggtgccggcatctatcattgtattagctgcagcattcggtggttagttcgttagttgtcctttgtactgcgtcgtcgtcttggcttaatcaagttagccgtacatggcctttgtgtgtaccggaccatttaattagttcaaagagtcgtgtttgatttgacactaattcggtgtatacttcattcaatggacaatatttgcccaaatgtgagctcatcgcatcgaagtaagctgcttgcagtccattaattttcatttgatcagagatctcgttttcaattgcaggctaaaatcgtaatggtcccgaaaatttatctcagctgggaaattaaattttgtacaatttgtaaaacttttccaaatggtgtcgccaactgccgcgaaccgagcacagccaaacttttaccatttccattataagttttacttgatgcacccaccgcaagcccaaccaaccgcccacccacagaaggagcaacctcaatcccagcttatgcgtttatttaatttcgctccaacattacgcatacgcccgagtgttcactgagcttctataattgccgcgtaattgccgagaagaatatctgtcagctacaacgacaactttaaactgtgagtgttgctgcactgaaccaatcgatgagggaagtttaacaaaaccttaaaaatttcaaaattacatacgtttcataaaaactcttcgatagtattgggagccctcagattattcataaggtccgacattaaaaaataacacgaccatttgtttgttttctatttacgtaactcgaattgataaaacatatttatatttttcattttgacgacttttgaagtacgatcgtgtaatttaagacagtgaagcaacatgaccatcattccaaaacaaaggacgtggaaaacgggcagccagttgcgcttttgtgttgtgttaccaaaatgaatttagatgtggaggatacaagcaggatgtggtgacccatcattggcttaaataatctcttcgccaaatattacctcattcacaccgtcgacgaagatcatgaccagtccgaggatggggcgcagattctccggcatgtgggtgttttcgccgcccagaacaaccacgcacggtttgccaatgaccagaccgggcaccaatcgggtgacataccgactcatgagatgttggttctcgcggcgatcgtccaacgtcatcagaccttcgggccagcgatcctcgtggcaacgttcaaccagcatattgagcatatgcatcggacagccgctttcacgcaaaacgtcgcgcaccatcaggtgcatgggattgtccggcgtggagatcagactgccccacgtatggatgttggccagagggagtccatggccccactgcatcagtgagaagcggtccagttgttcgccaatgttgcgcagcatgggattggtcgatcgcagtgctgcgatatagtactggaacagctccatctctcggcgctggctggagctctgctcctccatatcggattgcttctgcttcagatcggaaacctccttcgccagtttctccaccagctcgcgcagttcgaacacacagttgtggcgcgacatctcgtccttgggtacctttagcgggaatattatagctatcttaagcagttcaagttattcccagaatgttcaccttcattccgcaccccttgctgcactcgacaaccaccttgggattatgctcgcaggcggcgacatgggtccggaactcctcgagggccagcatttgggcacaaccgctttgcgagaaggtgcacttgatctttaggcgggatagcatgttgcgcattaggcgcgaaacgggcaccagatgtgaggtcagtagcccggagcggtccaccgggcaaatctgtttctggatcatccacttgtcgatgcaggcgcgacagaaggcgtgctcgcattccgatgactggaccggctcctccaggacatctgtgcaaattggacagatgagctcctcgtcaacgtggcccacaatgcagtttagatcaaagcccatgacgaaatggtttgatttctataccgaagtttatgtcgctggagaatctgagatgttatttttttttggcatggagccactctcatccacttaccactgagttcgatatgtacttatacctatatccgaaactcgatttttacaatatttcgatcaaaaagttagtttttacgtcggcgctgagttgtgtccgagctggcatctgattaaaagccaactatgtgtatagttatgcatagttatataaatagtatatatagtttatttttgtaaataaaaatccttttcttaagctaagaaatactaggcctttcgatcatctgttatgcaaacagctctcattgagccttctaccatttaggacacttcaatttcaattcaagcgcaactgaaaccagccaaacaaccaacagaacactgggagtcatccatccaagtgggccaagagcaagtggggtgggggcgaatgggtctgagaaaacgttttcttgaggcacttgcatatagtgcggtcgtaaaaccctttgcatatttatagtcccaactgctgcggaagttatgcaaattggaaaacttatggtacgacaacccggaataatgccaaacgtccagccaaccttcggcgaccacgttttaacttagcctgcacagagaagcgatgcgaagcgaagcgaggagttgaattttatttataaagtgaaattttaacaaattaacagcaaatgctgggacatgggcaaacaaataaactttccatcttcagctccacaatggccgaatttcgaacaaacactcatcagacgacacacaggcatgattgtgacaacatattgccatgtcaaaatatttacactatatcaactgctctatgcaaactcgaatgtatatacatacgtgtgtataatagaatgggcattgtgtgactggaaattcggtttttaatttcacttggaagcgtcattcgcttggatattaaatttcatgttttgcctaagaatgacatttgcttttgtgtgcctttttgtgcattttgtttgtgacaactttactgcatcgaatccttttcgttggattgcaatttcagtctagtgctaccaaatgcttatctccgaatgcaactgtcagtctgacattttagtttactttaaattcctgctcaagccttttcagtttgccataatattcaagactcattcttt

SEQ ID NO: 19283 - DNA, 1130 bp, DROSOPHILA
ccagctcggacacaactcagcgccgacgtaaaaactaactttttgatcgaaatattgtaaaaatcgagtttcggatataggtataagtacatatcgaactcagtgcgacataaacttcggtatagaaatcaaaccatttcgtcatgggctttgatctaaactgcattgtgggccacgttgacgaggagctcatctgtccaatttgcacagatgtcctggaggagccggtccagtcatcggaatgcgagcacgccttctgtcgcgcctgcatcgacaagtggatgatccagaaacagatttgcccggtggaccgctccgggctactgacctcacatctggtgcccgtttcgcgcctaatgcgcaacatgctatcccgcctaaagatcaagtgcaccttctcgcaaagcggttgtgcccaaatgctggccctcgaggagttccggacccatgtcgccgcctgcgagcataatcccaaggtggttgtcgagtgcagcaaggggtgcggaatgaaggtacccaaggacgagatgtcgcgccacaactgtgtgttcgaactgcgcgagctggtggagaaactggcgaaggaggtttccgatctgaagcagaagcaatccgatatggaggagcagagctccagccagcgccgagagatggagctgttccagtactatatcgcagcactgcgatcgaccaatcccatgctgcgcaacattggcgaacaactggaccgcttctcactgatgcagtggggccatggactccctctggccaacatccatacgtggggcagtctgatctccacgccggacaatcccatgcacctgatggtgcgcgacgttttgcgtgaaagcggctgtccgatgcatatgctcaatatgctggttgaacgttgccacgaggatcgctggcccgaaggtctgatgacgttggacgatcgccgcgagaaccaacatctcatgagtcggtatgtcacccgattggtgcccggtctggtcattggcaaaccgtgcgtggttgttctgggcggcgaaaacacccacatgccggagaatctgcgccccatcctcggactggtcatgatcttcgtcgacggtgtgaatgaggtaatatttggcgaagagattatttaa

SEQ ID NO: 19284 - protein, 328 aa, DROSOPHILA
MGFDLNCIVGHVDEELICPICTDVLEEPVQSSECEHAFCRACIDKWMIQKQICPVDRSGLLTSHLVPVSRLMRNMLSRLKIKCTFSQSGCAQMLALEEFRTHVAACEHNPKVVVECSKGCGMKVPKDEMSRHNCVFELRELVEKLAKEVSDLKQKQSDMEEQSSSQRREMELFQYYIAALRSTNPMLRNIGEQLDRFSLMQWGHGLPLANIHTWGSLISTPDNPMHLMVRDVLRESGCPMHMLNMLVERCHEDRWPEGLMTLDDRRENQHLMSRYVTRLVPGLVIGKPCVVVLGGENTHMPENLRPILGLVMIFVDGVNEVIFGEEII

SEQ ID NO: 19285 - DNA, 4283 bp, DROSOPHILA
agccactacttatgcaacattgctcttcctggcattgacattgacagttactactattatagtgtacgtgaaatcaaggactgcacacataccaagagtgaaagaaatagcgatgaggacagcagcagctgcagttccatagacagcagcgaattttccagcgacgaggtctgctatgaggacgatgtcaacgaagaagacatcaagaagttatattaaacagtgatttatttagccaaagcacagccagtaacccatataagtaactcatataacccatattagatatttcaagttataataaagtgctccggaggccatatatatacaaatttatttcatgtatgtttatttaaaacaaaggtgaaaacaaattatgatgaggttatattgtatcactttaactgaaagtccatctgtccgtatgaacgtcgaaatctcaggaactataaaagctagaaggttgagattaagcatagagattctagagacatagacgcagtttcttgacacatgttgccacgcccgctctaacgccctcaatgtgttgatattttttcacagttttattagtcttgtaaatttctatcaatttgcaaaaaaaaaaaaaaaaaaaaaaaaaaactgccacggcaggtttggcgcccacgcttttgaacaatttttaaattttttctcatcttattccccaatatctatcgatatcccagaaaatgataacatttcgcgttcgcattcacactagctgagtaatgggtatctgatagtcggggaactctcaatatgtttattgatcaattattttaattataaatagttagatggataactttaaaatagtttggcactgttaagcttttggtataatgaaatatggtgtaattttaaagataaaaccaatatgaaaataaaactaccaattcttttcaaggtatataattttacttttataaaatgtttcattttattcgcgtacacatgatgtcagtagtagaactttttacattttcgaaactggtttaaggcctagtatataaaagcattggcgcaacacagccgcagttgcctcgcacaatagaattcggctatgattgaccccaataatatcgccttgtttgttcttttcgatgcaataacaagagtcatagaattcggtgaacactgtgcacacctcgaagcaaaactcgcacaggaagtgcaggaaaagttcctttgagcacttgatgagtatgtcgtggagtttcagtagagtcttagccagcttccattccttttcgtggtccaacacaatgttggtcttcttcagtatttcgggtaaattggtgaaatcttcgccagagtttcgtgcaatggagcaaatacgtgtgtaggtgtaaagtaagtacaccgcagtgttgccgcgatcctcaagcatcttatcgaacgaaaatatatagtcgctgatccggttgtgacataaatccgaatacttaatgcatccatatgccagcgactcttgggcgtccttcagttcctgtggcgtgaggaccttatcgcggccacgactctccaattgctgcagggatcgcttcattccctcatccagcaaatcggacagcttaaccgtatcacccgatcgagtcttaaacttcttgccatcctcgcccagaacgacgccaaactgtacgtggtcaacacgatggctgagtggatttaggatagcagatcgttcggcagctttgaatatggtattaaaatgcgtgctttggccggagtcgaccacatagatgatccaatcgcaaagctcctcctccaagcgatggcgaatggctgccatgtcagaggtatcataggtaaagccgccatccgatttcacgattgtcagaggtatgccagttttcgtatcgtctggccacatgatctcgcgtccttcatccacttccagcagacccttgcctcgcaagtattccacaacggacagcatacgtgattggtagaacgattccccccgttccttgacgctaatatctaatcgttcgtagatcgtttggaactcctttcgcgacacattgcaaattagctcccacgccttaatggagttcggcacacctttctgcaatgaaaccactcgactgtaggcacgttttttgaactcctcatcttcatcgaatctgcaaggaagtattatttacctcgagcacatcgtaattacttcgtaatgttacaagtcttaccgcttcttggattccttgtagaacaattgcagatcactgatcggagggctttcatttaggtagttggggaaacgatcttccaaatgggcaatcagcatgccaaactgtgttccccagtcacccaggtggttgatgcggatcacatcgtgctgcaggaactccagcaagcggcataacgactcgccaatgatcgtggaccgcaagtgaccgacatgcatctgtttggcaatgttgggcgatgaaaagtcgaccaggactcgctttttgatcacttctggcggcttgacaccgttacgcaatagattgcttaaggctaaagatgcataatctctgcaaaaattaacatttttaatgtttataatggactttgtgtacttatgccactcacttgctaaggaacacgtttacgaagccagctccggcaatttccagcttttcaatgattggtgatgctgggcagtgtcctttcaactcggttgcaatatcacgtggtgctttattaatgcccttctctttcagcttcttggacaatcccatggcattgttgcactgatagtcgccgaatttcgcagacgtactattaactggtgcaattataacaggcgtatctctgaattccgggaaagctgatgcaatcgcctggcgaaagacgctttccaggtgttcggtgatcgaagaggattccttgggcttcgaaacgtcgccgccggcggcagttgattcctcagcaatggactaacagggaaataaaagacatgaaattcttaagcttaaacacattgggggtcataaactcaccttctttaggataaacaggcggttcttcagcttcttattttcaatttgaagctgaacaagatcgacgtccaactgttcaccgcttttggcagtttgtattctggcggcaaggccttgggtcttcagttcctttaaagccggcatgtcatgtcaaaatgttggcgtaaagtaacagctattcgcttaccagctccctgagttttttcagctccatatttagctcggacatgtttccaaattgtgacttctgttgctccgctgattaataacaacaacacaacgatgccacatggatggcaagtagtgtgcacacgtcgcctatcgataacgataacagctggtgatgtcacgcctcacagtcacttctaggatgtcgtttttcccactggcatttaaaagattttctcatttgacagttaaactatgcaacagacaaattgtattgtgtgtgcattttaaaatcacctctaaaattgtagatgtcggtatgtatggcaggctttttatggcacatttgagagcattgcttagataaatgtcagctgtgtgcggtggaaaaatcgcatcgggttcacatagcacttatgatttttatcgatagatcgacttatcgaccacctctattatgattaattgtgattgttctttcgcttaaggtgtctcttaaaactttttatgtgtatgtgtgtttaattaatttatagattttgtcacctttgtgtaaatacctatagtctagtggggccgcaacctaaactctttgatgtgtgctacacacagtccccgaaagatacgtgcgtgaaaacttgggaaaacagatgtgtgtaacgccgctcccattaaaattaaaactgcaatgcagacggtttttttttgttttacaaatataaatagtggataaaaacatattcaccgggaacgacggacggatacatcctatttataaacaggagataaactagttttcttgcatctgtgccaccaaattgccaagtgtcgatggggaatttgtaaaagttaaaaaagaaaaaaccattatgcagcgcaatgcaaaaaaaaagtttactttattttcatcatctgatacgcattttatctgcatgttcgcttgcttggtgacaatgggactatatattcaccggtttttatataagtgagtcagctctgctagataacaaagtgcgttccgatgataaggtatccattatcataccacacacgatcatcaattaggacattccaaaatgtttaccaatataggaggtttcaacg

SEQ ID NO: 19286 - DNA, 2041 bp, DROSOPHILA
ttgttattaatcagcggagcaacagaagtcacaatttggaaacatgtccgagctaaatatggagctgaaaaaactcagggagctggaactgaagacccaaggccttgccgccagaatacaaactgccaaaagcggtgaacagttggacgtcgatcttgttcagcttcaaattgaaaataagaagctgaagaaccgcctgtttatcctaaagaagtccattgctgaggaatcaactgccgccggcggcgacgtttcgaagcccaaggaatcctcttcgatcaccgaacacctggaaagcgtctttcgccaggcgattgcatcagctttcccggaattcagagatacgcctgttataattgcaccagttaatagtacgtctgcgaaattcggcgactatcagtgcaacaatgccatgggattgtccaagaagctgaaagagaagggcattaataaagcaccacgtgatattgcaaccgagttgaaaggacactgcccagcatcaccaatcattgaaaagctggaaattgccggagctggcttcgtaaacgtgttccttagcaaagattatgcatctttagccttaagcaatctattgcgtaacggtgtcaagccgccagaagtgatcaaaaagcgagtcctggtcgacttttcatcgcccaacattgccaaacagatgcatgtcggtcacttgcggtccacgatcattggcgagtcgttatgccgcttgctggagttcctgcagcacgatgtgatccgcatcaaccacctgggtgactggggaacacagtttggcatgctgattgcccatttggaagatcgtttccccaactacctaaatgaaagccctccgatcagtgatctgcaattgttctacaaggaatccaagaagcgattcgatgaagatgaggagttcaaaaaacgtgcctacagtcgagtggtttcattgcagaaaggtgtgccgaactccattaaggcgtgggagctaatttgcaatgtgtcgcgaaaggagttccaaacgatctacgaacgattagatattagcgtcaaggaacggggggaatcgttctaccaatcacgtatgctgtccgttgtggaatacttgcgaggcaagggtctgctggaagtggatgaaggacgcgagatcatgtggccagacgatacgaaaactggcatacctctgacaatcgtgaaatcggatggcggctttacctatgatacctctgacatggcagccattcgccatcgcttggaggaggagctttgcgattggatcatctatgtggtcgactccggccaaagcacgcattttaataccatattcaaagctgccgaacgatctgctatcctaaatccactcagccatcgtgttgaccacgtacagtttggcgtcgttctgggcgaggatggcaagaagtttaagactcgatcgggtgatacggttaagctgtccgatttgctggatgagggaatgaagcgatccctgcagcaattggagagtcgtggccgcgataaggtcctcacgccacaggaactgaaggacgcccaagagtcgctggcatatggatgcattaagtattcggatttatgtcacaaccggatcagcgactatatattttcgttcgataagatgcttgaggatcgcggcaacactgcggtgtacttactttacacctacacacgtatttgctccattgcacgaaactctggcgaagatttcaccaatttacccgaaatactgaagaagaccaacattgtgttggaccacgaaaaggaatggaagctggctaagactctactgaaactccacgacatactcatcaagtgctcaaaggaacttttcctgcacttcctgtgcgagttttgcttcgaggtgtgcacagtgttcaccgaattctatgactcttgttattgcatcgaaaagaacaaacaaggcgatattattggggtcaatcatagccgaattctattgtgcgaggcaactgcggctgtgttgcgccaatgcttttatatactaggccttaaaccagtttcgaaaatgtaa

SEQ ID NO: 19287 - protein, 665 aa, DROSOPHILA
MSELNMELKKLRELELKTQGLAARIQTAKSGEQLDVDLVQLQIENKKLKNRLFILKKSIAEESTAAGGDVSKPKESSSITEHLESVFRQAIASAFPEFRDTPVIIAPVNSTSAKFGDYQCNNAMGLSKKLKEKGINKAPRDIATELKGHCPASPIIEKLEIAGAGFVNVFLSKDYASLALSNLLRNGVKPPEVIKKRVLVDFSSPNIAKQMHVGHLRSTIIGESLCRLLEFLQHDVIRINHLGDWGTQFGMLIAHLEDRFPNYLNESPPISDLQLFYKESKKRFDEDEEFKKRAYSRVVSLQKGVPNSIKAWELICNVSRKEFQTIYERLDISVKERGESFYQSRMLSVVEYLRGKGLLEVDEGREIMWPDDTKTGIPLTIVKSDGGFTYDTSDMAAIRHRLEEELCDWIIYVVDSGQSTHFNTIFKAAERSAILNPLSHRVDHVQFGVVLGEDGKKFKTRSGDTVKLSDLLDEGMKRSLQQLESRGRDKVLTPQELKDAQESLAYGCIKYSDLCHNRISDYIFSFDKMLEDRGNTAVYLLYTYTRICSIARNSGEDFTNLPEILKKTNIVLDHEKEWKLAKTLLKLHDILIKCSKELFLHFLCEFCFEVCTVFTEFYDSCYCIEKNKQGDIIGVNHSRILLCEATAAVLRQCFYILGLKPVSKM

SEQ ID NO: 19288 - DNA, 2565 bp, DROSOPHILA
agggaaaatttaatgtatagaaacgaaaagtgaatgtgctgttttctgaaacaactttctcaacttgtaaattcagtttggagctttaagccattcaaatccttccatcgattaccacaataacacccaaatactaaataattgtaaatataaaggtcacataacaatgaaacactctaactataagataaaaaaattagataaatatatcggtagccattgtagagaaacattccgtattttgtagagaatctacatgttgcattgataataatttacaaatataacatatgtatgggtggctgttaatatgtaaatgatgattgtggcaggagcaacaaatgcaattccctttctccggtctgttaactcaattccccaattctatccaaggaatacgaagcaccaaagcaaatgtatctttatatcccaaacaaaatatacagctcaaagttttcaaatgtgttaaatctcaaatcagaaaggaacgtgttacgtaatcaataactagccagttagtgcaatacaaataacaccacaacaaccactggcaacctgtactagcataccaacctacatacataactataaagaatcgtaaacataaaaatatatatttattgttagtgtgtgagatagaaagcatacatattacggcatgcgaagtttgaaaaatacaatttaataaaatgagctatgttaacaacacacaatgccgcatttttatttaactaaaaatcttcgatcctcatggaagaccacaaactatcctcatcagcaactttaaataattattattagatgatttacatttgtatgtatctttttattttcttgttcgtcggggatattggtaatttatgcgtgaatggaaagtgtatgtggaaagtgtagatggtaagtctagatggtaagtgtagatggtaagtgtagatggtaagtgtagatggtaagtgtagatggcaagtgtagatggtaagtgtgtggatatgggtgcaagtttccgagtcgaccagcggatccgcttcctctcgatgctgatcacctaatctgattcctgtgtgcagctattccggtaagatgtggagtggaagtccattcgtgggcgttcgatttgcaggtctgggaagcgctaactctttggtgctagcgtccaccatactgccagtctggattgaagcgcgactttccggccgaacaccttccgccgggacaacagttgccgccaggacaacccggctggctcattcctcgagcgccgtagctactaccacccgcctccattcgggggcagtggccaccggggcagttgccacacgatccgcagttgccacttcgcgaaccctgcgagcagtagccgccgttgttgctgcaactgttgctgttgctgtagaagccgtccatgctgctcactgaaatcgtagtgttaaaaaaaatataactattattactatttctcagcacacctgacacttttgtatgatattaggcctttgaattttaataaaaaaaaaaattgtgttttttttttttttttgttttgctgaacggacttccgtgtagcttgaagaggccgaatggaatgaacaactggtagaaccaaactcgacaggctgagaaatgaaaaacccccagcctcctgtgtctttcgaacttcagttcgaactgagcaggcgcaggcgctgattttgcggaaagtggtgagttttctttctttgcctcgggggcgtggcctaacctcacacgcacacaagcataccagtcggggttgttggagcgaaagagagcacaaatgctcatggggtgggggcatagaaaaatgcgacttcttgatgccgcaaatttgccatgtgtgcggagagcgggggcagcggagccggtggtggcaggcagtgggtggtgggttgtgggtggttgagttacgaccgacggcgacgctcacgtcgtagctgcaaatgactttgcgttctgactggttaatataaccgcaggatcgcactcgtgcgaaggtggaaggggggctgtgcgtttgggggctgccttatatacggctgcgagagggccggccccgtgggagcagagtcagccaaatgggctgtgtaatggacacggggcttatcctgagaccctcgccgaatcgacttacaagactccaccctctaagccgagtgtcatgtgccagaacgtcttgctgcgcggtcggtcgtgtgggcaagttcggagcaccccccgctcacactgtcgcaaaagtcacttcaatttggatgagagtcagtaaatcaacccctatcaacataccaacaaccgaccgagctgcgattgcgattgcgatttcgatagccatagttactccggctggggaaacgccattgtggaatcgcccaaaaacactaccactcactaccgagccatatgcaggaatagaatagtctgaacgctatatatcctttacacatatcgcaagctaccaggctatatggatgcttcctttctgctttctatagggtctttgcagcagtaaatagcaaaaaaaaatacaacgattttatggtcagcaagtcacca

SEQ ID NO: 19289 - DNA, 511 bp, DROSOPHILA
agctacacggaagtccgttcagcaaaacaaaaaaaaaaaaaaaacacaatttttttttttattaaaattcaaaggcctaatatcatacaaaagtgtcagtgagcagcatggacggcttctacagcaacagcaacagttgcagcaacaacggcggctactgctcgcagggttcgcgaagtggcaactgcggatcgtgtggcaactgccccggtggccactgcccccgaatggaggcgggtggtagtagctacggcgctcgaggaatgagccagccgggttgtcctggcggcaactgttgtcccggcggaaggtgttcggccggaaagtcgcgcttcaatccagactggcagtatggtggacgctagcaccaaagagttagcgcttcccagacctgcaaatcgaacgcccacgaatggacttccactccacatcttaccggaatagctgcacacaggaatcagattaggtgatcagcatcgagaggaagcggatccgctggtcgactcggaaa

SEQ ID NO: 19290 - protein, 85 aa, DROSOPHILA
MDGFYSNSNSCSNNGGYCSQGSRSGNCGSCGNCPGGHCPRMEAGGSSYGARGMSQPGCPGGNCCPGGRCSAGKSRFNPDWQYGGR

SEQ ID NO: 19291 - DNA, 14831 bp, DROSOPHILA
cggaagaggtcctgactttagaactaataatccgacagcctacaagctccggattgcgccaagcaaagaggaaaaagtgtaggaaaaaagcgagagaagccaggagagcagctgagcatctctgccgacgaaggatgttttggcaagcacaggagcaggacatccgagggcaggctgtgggagcaggacggcgccagcacataccaatacaatgtcgcagccgttccacggctagcttttcgtcattcttgacattttgtggtgaattgtcgaaagccacaggatatgtgcgccagtgtgcgtgccgagcgccactgcgctagtgtgcgttttcagctggttgaatggcgagtgtgttggtgagtgggttggtgtgtgtgtgtgtcggtgagtgggaaaaaacaaaaatggtggacggcaggaagtcccctcatttgctgtaatcgcatcaggccggggcagtgaaaaaagggcgttttccggttggttacccggcactcctcgctctcctccctcggctctctttcgcactctcttcgaggacttcacgccgacatgggagagtcagtgggtgggtgcatgggtgcttgggtggctgggctggtcggtcgcttttggtccactatcaggggatgaaatgtaacatttggtagcttttcgtaaattttcgactttcgtttggtcttcttttttttgttctgtttgtttttgttcgtttctgggttctcggctctcgactctcgattctcggcgctcgccgcttttcattttcccatctcaactgggtttttcgcctttccgtttgtggctttgctgcgggggggagtgaatgggagtgggattgcgggtgggggtggctactgcctttggcttggctcgccctcctgtcaaattgactgcaaaaaaggacctctccttggcagcttcactttcgtaattggcggtctgttcgctgctggctctgccagccttagcttcccgtttcattcgcagttggtccgtcagcccaggcgatccgcatttgcgtccgcagcaggtttccgatttcagaactctgattccagcggcagcgaatcgcgtcggcatctgaacatttgaaaataatctaaaattgcaagtgactttgtgcaccggttacactaaaattgttaacaaatcgccatatattctgaatttaaatttaaagtgcgcagtgcggaatataaatcagagcaaactggatacgttagggttcaaatacttccatcaacggaaaatgggcacaggtacgaaatgcgtcggaatttcccattaacatctagtggctataccgtcggcaattgaaaagctgtttaaacactaattatttatgagcatccacatccgatagattgatagccttatgcaaacgtggaaaagcgatgcgttcagttttaaaacatttttttgtaaatagtattattgtctgtaattgcataattttgaagaaattagagtatagccatagtggttcttttaacgcgtaaacgataggtgaacttattgtaaaatcatgaagtatttgtcttctataattcatcaaaattgttaagctgaaaggaatcgcttagtatgttaagtaatgtgcaaatgataaaccttagaaaagaaggaatattgtattagcaaatgttcacatttagtcaacattggtttttgaatcacattaactagtttacaatattagatgttttgtttcgttcgctctttcatcctgattgcttgcaaattcttaacaggataataaggcaaatctatatagccatgtaaacttatctgtagcaattcatttgcgagttaacttttaatgattttattgtaaacttgacagaaacgtgacagacattgccagaccatattaatgacattttgattcgttaaaaaatgaaaaagtaattaattttctcgttttcctagttcaagaaaccattgactctctagtaaaaagtgttacagctagattgtaatttacaaaatcctttcacttcgttttccgatgttcttccaattatggcattagtaattccatttccatcctgttgggctcccacgtcactccgattttagaatgacccattgtgaagctctcacgccgataatgcaagcccctcacgttttcccacacccgataggctttttgcctatctaaacatgtccgcgatttccataaaaaggcaaaaagcatattgaatatgtttaatataaagacataacccgcacacaccggccaactaccgaataaaaaaaggggttccaaaataggaagtgatggcgtaaataaacagaaatatgtaaaatcaacaatagcgaaatttaaaaaagaaaacaacggacttaaaaaggttcgtggcccaaggtgtcagtggtccttcagattcctattccgcatccgcatccgaattcgaatccgatgcaaccccagaaaaggcccactcgagaggtgttaacacgctgcggacaattgacgatccggagggtgtgaaaattggcaacacgcgccaaacggaacggcgacccaaaaccaaaaccatggccacaaccgagggaacttcaccagcgacaatatgtcaaatgtcacaggacaaaggaccgcaacaaagggcgagcgttttattttgacaagtgccgagtgttgaacttaatttgcgaagcgtgccagtcaaagggctactatccaacctcacatcattccatcctgctcccgcccatttttccgcacaggatatgggcgtgtgcgggccattttcacaagctaatccgcggcaaacactctccaagcagcgccgcaaagtaggcagcattccttgggcgtgacgcactggttttaacagggcgcaagagctccggaaggattagctcttaataaaagttaaatatgccaatgattaaatacacttacttgccattgttgtcgcacaaggcagcttgtattttccagtgtcatacattttaagtggatatatcaaatgttgaaagaaatttaagacaatcaaatgcatttatatttatttaaaaattattgataatatttctaaagaagtaaatgcttgctacaaattgataaggaatctaaaacgctcttaccatatatattcaccttattatcctttttagcgggcgatcgcctgttggacattccctgcaaggtgtgtggcgatcgcagctccggcaagcactatggaatctacagctgcgatggtgagtcctggatccgatcgagttgacaacagtgtaagcttagctaatccctttcaggctgctccggttttttcaagcggagcattcatcgcaatcggatttacacctgtaaggccaccggcgatctcaagggtcgctgtccggtggacaagacccatcggaatcagtgtcgcgcctgtcgcctggccaagtgcttccagtcggccatgaacaaggatggtaagtaccaccaggacataccataccaatccgcgccacaagtattgttttacttgccaaatacacttaattatgcagcaaattagctcgggaagcctgttttcgccaaggcttttgggcataaattacattaaaagggggggagggtaaccgaaatgccggtggctcccgcctttccagcacttgtggccagactccagaaaatgccatttgaattttggctgaatttgtcattaagctgattataaattatgcgagccccaatcctgtggtcgtgcctcgggggcaaaaaccttaatgggggaaagtgttgaaactgatttaagtgagctacacaaagatacattttactttgttttaaaaatggaaaagggcaatggtttcggaaaacatttgttcaaaattaccaaaattaaattttaaatatatattggattaagagaataggagccattagtctgctgattccaactcataattaaaaaaaaaccagcaacgttagctgctcgaatttggatatcgaccgagtgtaccccattcaggcggtaatcggcagtcggatagccatgaccaaaccgagaacacagctcaatgcaacaatgctagctttaaagctcttaagccaacattaaatgtagcataaaaacacataatagcgaggaacattctccgtatcaactggcagttggcagatggcgatggcagtcagggtgcggactttgggcgactacatccaggagccaaactcatctcatggatgcgatgccagtattcaatgttcagtatttggtattcagtgttcaggagctgccattgatgggttcactgcacagaagagccgggccagaaacaagggaccagagcagcgtgagaatcgcagcagattttctcacacgcaaaggccactcttttgggtgggcggtggattgagtgggtgtgggtggatcggtttgaggcgtgagggtcgattgacaatgtgcacttaatagcggattacacgcattatccgttcgctgaaaatgcgactaaaatgtattgacaatcaagtgatgatgcccaaagctcgaacttagacgtcagtcaacccaaggaccttcgcaacgatgctggcttgtggaccgagatgaggggcgctgaaacggaaagggtcctttgccaccaccgcccaagtgaaaactagagctgcccacaaaaaaaaagcacaactggaaaaaaaacaggatggaattataacgattggaatgatagccgacagcatagttctctataaaggagtatggacttgatgcagttgggatgatagctccataacttgcaagatctatattaatgtaacaacgatgtaagaagtaatgcaattaaaattagagtttgctagttacaccttataatcctaaactgcctttttgagccttagaattcttcttagattccaggtagctgccaaaatatccatcattactacaaatactgtactgtagaagtccaatttcccaaccaaattcggggatcctgtaaacatcgaaaacggcagaatatgagcatgctgagagatgtacacacgtgttcctcacattccttgcgatattttcttagtttgccgctacaaagcctcatgttgggctgcctttttggggtttttcttggctggttccgtaaataaacaacaaacagccatggacgccaaacacttcacacatcttccacaagccccacactttggcacccaccctatgtgctatatgtacccccagaaaaatgctccgccctaacgccattctagtttccccagacaaaatgcttttgttgtttagagcagaaagcaaaaaagccacaaaaatcgttcaaggcacgtttgtgtaacatttttgtgagtttggattgggtgggtcatgcgagtagtaaacttgttgttgggggtcgctggccttatgactgtggtgaggattttggggattgaaagaagttgcgactgtggtttgcccttctcagttttctcatttttcgttttaagttaattgcaaaggtaagggaagatttgttataaatacatccaaatacttactatctatgtatctaaaaattacaaataaagttctcaaaataagatgaagatattttttgagctgcttctccttagtttcatacatatatcaaatatataatgtcccattaagctgtgaaattgtgggttttttacaaagacagctcgtttgcccaaaggacatggcaatttgacagttttcagctgaccaatcagcatgccaccgtactttagagctgacaaataagttattatgggaaaatatgacaggcgtcgcacatttcgctgtcaaagctttcagaattcagaagcagaactgcctcccccaaccaggctgacagaattacaaatgttggctactttgtatgctaatatcgtggcgggcaggatgcggattgaatgttggaggtttgagaaaaaatggaagggacgacaagagctctccttacaaattatgttgccacttgtcacatttaatggtatttgcatttgtataccccaaagtgtcagtcacacgtagcgaccctcctgaaccatccaacagtttttcactttctttttctttgccaatatttacgcggcgatttaagcggatttctcattttgagtgatttgtgtcgcttctggaatcccattcttaaaaagctcctttcacccgagctccgtaaagtgggcgtgtaataatgatggggtcattattcccccggttgtgtgatgagccgaaaagtgatatgtaatgatgcttataatggccaagtaaaatgtgtaaatatcccaaatggagacacttctcacaatggaagttacaaaggaagatttagaaccataattttacaatgctggtatttgattataagttgaatagagcattcccctgtgttttggggttaatattcaataaagttctttttaaataatttgtttacaaaatatggcgaggtattatatttgtttgtaagctctataaggaggtcattgcaaataattccatatttgttaagtaggggaaacgttgcgtatgagtaataagcttagaaactattgtgtgacgtctcaatcttatgttattggacctttccttattatatacgcacatgataatagataataccaattattaaagctaaaattgaaaggaacataaggaacataaaggaacaggaacataagaagtaattttctgagctgtatgtcattttagtttgccatgttcttgccaaagaaaccaatgaaattcgagcttctgcaggtcagcatgtctaagtttattaatcaatattggaataagacttacaattgtcctttgatttccattgcgaggcttaatgtgcatcggaatccagtcttctcgacttgagtcgatgtgtactaactttaacttttgcgcttaacgaaggcaactttctccgcccacactttctggcaaggattaagcgaggcaaggcgataagacaaacagcagagacaattccaagtggacgagcgaaaaccttttgcaagattcagccaagtgtaaacccattggaaaggacggcagaatggagtgctcttagtttctgttggtgtttcccggtgtcactagcaccttggagtgtatactctgagttgtacaagtattttgttgcatacttctgggctcttaagcccttttgtcaacagactgtggttccccaggctggcttcatttttggcccaagtctgtgggattggcactcgtttcgttcgtgatggtgtcaatgtacaatacacttttgttgttgttgatgtctattctggagacgactttttggcgctggcgcaaaaggcagtcactgctaatttcatgaccacattttaacgtattgatttttgctgatgtgcagccatatacacactccttcatatattcgtatatatatatatatgtatgtgcgtacatacatacatacattcgaaccctgctgatatttattgtgtagcttttaagccgcccggttcggttgagccagcgttgaattccccacgccacattgcgtatacgcaatttcatttacacatggctgcagggcacagaaagccatggctgagagacacgcccacacatgcaaattcacacgcacacccacacacgaacacacacacacatggctgcgtgttttacttaattgacattatagcctactacgatatgtgcatacacttttgccagagactgtgcgacatgtaaatgcgcctggcttgcacatgtcatggacacgaaccccagcattcaggacaccatcatgcccatgcccatctccacccacacccacacacagatgcacaccatacacatcctgcctgcattgcagtgtgcgtgagtgagtcaaacgtgtcagtgtcaacattaaaagcggatttaaaatcacttacccactgggcgagcacaactcgaatgagagtcagaggcgtaaaagccgttggcctcatcatgtccgtagccacttgccacgtcgaatgggcggtaaacacacggacatgcacacaaagtgttcaggagtcaagcagcaaatcgatggaacgagagtatcaactatctcctaccgatcgaatgattcaactataagcaggaacaattccatacccttgattaccctttggattaccctaagctgctgctatcaataggcataataaaagtaacctattattataatataataataataataataataataaacattacctaaactcatgaatatttcattattatgcttacaaggcaaatagctggcatagtatgcaaatctcatgaatatgaaatctaattaacacttgacttataaactcttacggaaatcaaggagtttcccttttactccaaatttcccgcccatttcgaaacagaaaaacacctgggaaacctcccaggcttttccgaaatgtgttacaaaaagttacgcccgctgggagcgaaaagagcgagtgagtaaaaaaatgacaatctacaaatctaattagcaactcattacgaggatcgcaaccctgctcacaggacaccacctccgccgcaggacagcgaggcaaatggaaaaagagaaacatagcgaacatattgaccgatttgctgaagttaatcaattaattagggtagagcacagggaagcggaccagaagttccacgagagcaaaaacaattatgtcaaaatacatgcgtttgagggggaaaaggaaccatttcgtaggcggcgaagctgaggagcgtcggacaaaggccgcaatgtctggatgccaaggaaaacgcggcggaaaaattaatgataagtggcagtggaaaagcgagctgccacacagctggcaagttcccacggcgagacacgaccacggcgacttcacgacgatgccgcacgcaaactaccaaatgatggtcatcatcatcaacatcacggcgagcggtggccaggacgaaggatacgcagccgcccataagctgaaaagcgcaacgcgtgccccagaaatcgatgcaaataaatcggcaaaatcggtaatgagcagatgcggggcatattatgtcgtaatcaaaacggagcgcaaaaggacttccgactcgagtatatcaaaatgcgttcgttttgtttggcaggcaaattaaaagtaaataaggcaacgtttgcaaattgtgtgtgtgtgtgtgtgggcatgggcgtgaggcgtaacactcgagaacaaaccgaaataaaataaaaagatacataaaccgtgaaattaggaaaacacttgaagtgattcgatgtgctccgagccgagccaaacgcaggggtgtctgtgcagacccagtttttcgatcccatcagggggttgcaaaaggactagtagccgagtgtttaatagtccataatggccacattatgtcgacacaagctgctccagtgcgcagtcacccacggaattgtgaggccaacaatggagtaagaaatggccaattgtcaagtacttacggatatctcaaccattcaatcattacaatagacacttttaattatgtaattacggtgtttggggaggaaatgctcatccattttattatgatctagctatcaagctaacttgtagcttttgatatttattagattttatggtttatggaattcttagagccttagtagcatgattagtatgtataaaatagtcaaattataccgcattgatattgcgaaactaactcactaaaatcaaatgcaatttataaattttataagatcctcaaaagttgattcccaagttcaaaaagtatattccacttaattctagtaagcttttttgaaacgcctgcagtgatttgcccgttttggtgttagagagcagacacgacttgtgcattttccattttcataacttggcagtaagtaaatcgttactttttgctcatcaacttacttttctgcttttgccttcggttgccttcaaacaaagtttgctacgagaaaaaatgtcgacgtccgtagaaagcgtagaatgccaaaatcaaaaaggatgtgaagcaaacaagtacttaagtttaagtttttcctgccaaggcagctaattttgttgcctttttcacgtgtttctgtgtttaaggaaacaaaaaaaaaaagaaaagtgaaggaaagtgggtgttccagagtcagagccaaagggttagcttgaagtttgagttccgcagggagtattttcaacttttctttcgcattcagctgaaccgcaatttttttgagtcgcgctgaaaatggggacctgaagtttgctaaacccgcagcataaaaatttgatgagtttggcattttctttaattgaaatttgtgatcttttaaaagctttgagacttcttcccgctctaggtggcaatgtgacaactttttttctagtttcaaacattcgtggagcgcggaatgaagatgaagccaagctggtgggggcaaaggctctcaagtgactgtagtcattttgcgggggaaagacgcactcacatatgcgattagctgggtattaaaatgtcaccccttttgcgccacgtcatgcaatctacaagattcgcagcgctactatagatacatttaattacaaacaaataaaagtcatgacagccactcacacacgcacacacacacatggtttgtcagcagacagttatgtgcccaggtttttggctcgaggcatgtgcaacagttctcacgcccgaggacagttcatctatccaatccgctactttgtgttcttatagctcgtatctttgcatctccagcttcctaataatcggtttattatttcttccctctggtcccgcccttcccgcaccactgacccaaatcggctaaggcccaaccttttgcgaccatgccacaaaaagcccgtcccgaaaagtttcaaaagggatagatagctgcggaagatgagaagaaagccagccgagagtatctttgaaattaactttatttatttaactacttagagccagattatcgcaattacacacttcaaatgtttttatgcaaaccagatggcttcgtcacatgtaaatggcaagccaatgatttaaaaattgatataaggttaatctatatatacgtgtgaacttagatcaaagtactagttgcagaatgaatatatctagattttgtatctaagagtacgctttgtttattataagatactacacatgcacttcttactcggaacttctaaatgttttcaaaagtcaacactcattttcctctcccccagctgtgcagcacgagcgcggtcctaggaaacccaagttgcacccgcaactgcatcatcatcatcatcatgctgctgccgccgccgctgcagcgcatcatgcagcagccgcccatcaccatcaccatcatcaccaccacgcccacgcagcggccgcccatcatgcggcagtggctgcagcggctgcctccgggctgcatcaccaccaccacgccatgcccgtctcgctggtgaccaatgtctcggcctcgttcaactatacgcagcacatctccacgcatccgcctgctccggcggcgccacccagtggctttcacctgacggccagtggcgcccagcagggaccagctccaccagctggccacctgcaccatggtggagccggacatcagcacgccacggccttccaccatccgggacatggacacgcgctgcctgccccacatggcggcgtcgtcagcaatcccggcggcaactcgagcgcaatctccggcagcggtcccggctccacgctgcccttcccctcgcacctgctgcaccacaatctgatagcggaggcggccagcaagctgccgggcatcactgccacagccgttgcggcggtggtgtcctccactagcacgccctacgcctcggcggcccagacgtcgtcgcctagtagcaacaaccacaactactcctcgccctcgcccagcaactccatccagtccatctcgagcattggatcgcgcagcggtggtggcgaggagggcctcagcctgggcagcgagagtccgcgcgtcaatgtggaaacggagacaccttcgccatcgaactcgccgccccttagtgctggtagcatttcgccagcgcccacgttgaccacctcgtcgggatcgccgcagcaccgccagatgtcgcggcacagcctcagtgaggcaaccacgccgcccagccacgcctctctcatgatttgcgccagcaacaataacaataacaacaataataataacaataatggagagcacaagcagtcgagctacacatccggatcaccgacacccacaacgcccacgccgccaccgccgcgttctggtgtaggttccacctgcaacacggccagcagctccagcggcttcctggagctgctgctcagtccggacaagtgccaggagctcatccagtaccaggtgcagcacaacacgctgctcttcccgcaacagctgttggactcgcggctgctctcctgggagatgctgcaggagacgacggcgcgactgctcttcatggcggtgcgctgggtcaagtgcctcatgcccttccagacgctctccaagaacgaccagcatttgctgctccaggtagggatgctctcctaggttaaatagtattcttggccatatacgtatgcaataaattactcggaattctaacgaaatcaatccactttgttccaggaatcctggaaggagctcttcctgctcaacctcgcccaatggactataccgctggatctaacgcccatactggaatcaccgctcatccgcgaacgggtgctgcaggacgaggccacacaaacggagatgaagacgatccaggagatcctctgccgcttccgccagatcacacccgacggcagcgaggtgggctgcatgaaggccatcgccctgttcgcacccgaaaccgccggcctgtgcgacgtgcagccggtggagatgttgcaggatcaggcgcagtgcatcctctccgaccatgtgcgactgcgctaccctcgccaagcaacccgcttcggcaggctgctgctcctgctgccctcgctgcgcaccatccgggcggccaccatcgaggcgctgttcttcaaggagaccatcggcaatgtgcccattgctcgactgctgcgcgacatgtacaccatggaaccggcacaggtggacaagtgaaccggccacgcatgacagtcgaaatgaaatcaaaatcgattccctagcacctaagcgccacccatcggtcgtcgtcatatgcgaacttatttgtattccaatgcgacccgaatcctattcagattcactgcggcaggaggcggtccaaatgtggggcggaagctgcagatgctatggttcgcaggacgccatgtaatggaggcgtatgtactaaccgcgctcctccattggcgatgcagtccgcgatgatggcgcactcccacacccacacccgtacccacaccttgatttatcgccggcaatgcgtcggagtctccttactttcgcttcgttttctaacatttgtatccttattttatttcatctttttccacggatttttcgttttgactgcctgggcggcactctttatttatctttcattcgacgttttgtcgtcgcttttctaaaaattccccatgttatttcaacctggcaaggacctcgcagtcccattcccgcgcccttacttacaaatcacttcccatcccacatccagcaattccgtggtttgaattctttcgtgcattgactacgaaataccctttaatcagacaaataaagaatattagttgtaattcttttttctgcaatccagctctaaaacgggtttcttaatcgaaatcgataaatgtaaaaattatacatatcctttaccaacattgtttgcctactatagggtattaacagtcgtcaaagatccttcatccctgaaagtctgcccacttttacattcatgatttaatatgactgctttttttttaataccttcctcccggtttttctcagtttccacttttttaccattcggggtatcatttcgaataacgcgtttagaaatcgtgaaaatgaaaaaacaactttgccgcaggtcaagcgaccaatttatgttgcatgttatgcctcactgttactgttggctcgttggttgcctctctggcttgatgtttcggttagttgtatctaatgcatagacggatacaaatgtatccgtgtatctggacaagcacttgcatccgtactccgcttgtgcaagtcgccgaatgctttataattgagtttttcacattgatactcgtaagaacgcgaagttagatatagcgcaaacaaaacattaactaatataaatgaatgtaatattatggtcaatctaaccatctaaggcaaatttaaataaataataatatattaaaaaaaaatttcattgcttttctattttttttcgttaagaaaatatctattgggtatttgggaactttcttttagtttttaaaggagactttggtaattgataagtaagtatagttatttcttttgcgaatgtgttccatacatacattcccttggctttaaaccgaaccgaatataaatggatattggtaagatctacaaagcttcaagcatttcggttccagataaatttcagcgttgtaggcgcttggtgggcgtggccaaaatgttagtgatatgtatttcgtaggcgccacgaaaatgatttttttaccgtcctgttactgagatttttgtatgaggatattaatatatacatatcagcatctggcattcatttgacactcaaactcataacgtttgaaataaaaatccgacttttaagtacttacttggtataggtactatagttaagtaaaacctttttcaattttaagcaaaac

SEQ ID NO: 19292 - DNA, 3043 bp, DROSOPHILA
gtcagcccaggcgatccgcatttgcgtccgcagcaggtttccgatttcagaactctgattccagcggcagcgaatcgcgtcggcatctgaacatttgaaaataatctaaaattgcaagtgactttgtgcaccggttacactaaaattgttaacaaatcgccatatattctgaatttaaatttaaagtgcgcagtgcggaatataaatcagagcaaactggatacgttagggttcaaatacttccatcaacggaaaatgggcacagcgggcgatcgcctgttggacattccctgcaaggtgtgtggcgatcgcagctccggcaagcactatggaatctacagctgcgatggctgctccggttttttcaagcggagcattcatcgcaatcggatttacacctgtaaggccaccggcgatctcaagggtcgctgtccggtggacaagacccatcggaatcagtgtcgcgcctgtcgcctggccaagtgcttccagtcggccatgaacaaggatgctgtgcagcacgagcgcggtcctaggaaacccaagttgcacccgcaactgcatcatcatcatcatcatgctgctgccgccgccgctgcagcgcatcatgcagcagccgcccatcaccatcaccatcatcaccaccacgcccacgcagcggccgcccatcatgcggcagtggctgcagcggctgcctccgggctgcatcaccaccaccacgccatgcccgtctcgctggtgaccaatgtctcggcctcgttcaactatacgcagcacatctccacgcatccgcctgctccggcggcgccacccagtggctttcacctgacggccagtggcgcccagcagggaccagctccaccagctggccacctgcaccatggtggagccggacatcagcacgccacggccttccaccatccgggacatggacacgcgctgcctgccccacatggcggcgtcgtcagcaatcccggcggcaactcgagcgcaatctccggcagcggtcccggctccacgctgcccttcccctcgcacctgctgcaccacaatctgatagcggaggcggccagcaagctgccgggcatcactgccacagccgttgcggcggtggtgtcctccactagcacgccctacgcctcggcggcccagacgtcgtcgcctagtagcaacaaccacaactactcctcgccctcgcccagcaactccatccagtccatctcgagcattggatcgcgcagcggtggtggcgaggagggcctcagcctgggcagcgagagtccgcgcgtcaatgtggaaacggagacaccttcgccatcgaactcgccgccccttagtgctggtagcatttcgccagcgcccacgttgaccacctcgtcgggatcgccgcagcaccgccagatgtcgcggcacagcctcagtgaggcaaccacgccgcccagccacgcctctctcatgatttgcgccagcaacaataacaataacaacaataataataacaataatggagagcacaagcagtcgagctacacatccggatcaccgacacccacaacgcccacgccgccaccgccgcgttctggtgtaggttccacctgcaacacggccagcagctccagcggcttcctggagctgctgctcagtccggacaagtgccaggagctcatccagtaccaggtgcagcacaacacgctgctcttcccgcaacagctgttggactcgcggctgctctcctgggagatgctgcaggagacgacggcgcgactgctcttcatggcggtgcgctgggtcaagtgcctcatgcccttccagacgctctccaagaacgaccagcatttgctgctccaggaatcctggaaggagctcttcctgctcaacctcgcccaatggactataccgctggatctaacgcccatactggaatcaccgctcatccgcgaacgggtgctgcaggacgaggccacacaaacggagatgaagacgatccaggagatcctctgccgcttccgccagatcacacccgacggcagcgaggtgggctgcatgaaggccatcgccctgttcgcacccgaaaccgccggcctgtgcgacgtgcagccggtggagatgttgcaggatcaggcgcagtgcatcctctccgaccatgtgcgactgcgctaccctcgccaagcaacccgcttcggcaggctgctgctcctgctgccctcgctgcgcaccatccgggcggccaccatcgaggcgctgttcttcaaggagaccatcggcaatgtgcccattgctcgactgctgcgcgacatgtacaccatggaaccggcacaggtggacaagtgaaccggccacgcatgacagtcgaaatgaaatcaaaatcgattccctagcacctaagcgccacccatcggtcgtcgtcatatgcgaacttatttgtattccaatgcgacccgaatcctattcagattcactgcggcaggaggcggtccaaatgtggggcggaagctgcagatgctatggttcgcaggacgccatgtaatggaggcgtatgtactaaccgcgctcctccattggcgatgcagtccgcgatgatggcgcactcccacacccacacccgtacccacaccttgatttatcgccggcaatgcgtcggagtctccttactttcgcttcgttttctaacatttgtatccttattttatttcatctttttccacggatttttcgttttgactgcctgggcggcactctttatttatctttcattcgacgttttgtcgtcgcttttctaaaaattccccatgttatttcaacctggcaaggacctcgcagtcccattcccgcgcccttacttacaaatcacttcccatcccacatccagcaattccgtggtttgaattctttcgtgcattgactacgaaataccctttaatcagacaaataaagaatattagttgtaattcttttttctgcaatccagctctaaaacgggtttcttaatcgaaatcgataaatgtaaaaattatacatatcctttaccaacattgtttgccta

SEQ ID NO: 19293 - protein, 691 aa, DROSOPHILA
MGTAGDRLLDIPCKVCGDRSSGKHYGIYSCDGCSGFFKRSIHRNRIYTCKATGDLKGRCPVDKTHRNQCRACRLAKCFQSAMNKDAVQHERGPRKPKLHPQLHHHHHHAAAAAAAAHHAAAAHHHHHHHHHAHAAAAHHAAVAAAAASGLHHHHHAMPVSLVTNVSASFNYTQHISTHPPAPAAPPSGFHLTASGAQQGPAPPAGHLHHGGAGHQHATAFHHPGHGHALPAPHGGVVSNPGGNSSAISGSGPGSTLPFPSHLLHHNLIAEAASKLPGITATAVAAVVSSTSTPYASAAQTSSPSSNNHNYSSPSPSNSIQSISSIGSRSGGGEEGLSLGSESPRVNVETETPSPSNSPPLSAGSISPAPTLTTSSGSPQHRQMSRHSLSEATTPPSHASLMICASNNNNNNNNNNNNGEHKQSSYTSGSPTPTTPTPPPPRSGVGSTCNTASSSSGFLELLLSPDKCQELIQYQVQHNTLLFPQQLLDSRLLSWEMLQETTARLLFMAVRWVKCLMPFQTLSKNDQHLLLQESWKELFLLNLAQWTIPLDLTPILESPLIRERVLQDEATQTEMKTIQEILCRFRQITPDGSEVGCMKAIALFAPETAGLCDVQPVEMLQDQAQCILSDHVRLRYPRQATRFGRLLLLLPSLRTIRAATIEALFFKETIGNVPIARLLRDMYTMEPAQVDK

SEQ ID NO: 19294 - DNA, 3767 bp, DROSOPHILA
ggagcatggtgagtggcagcgctgcttggagaaggccaaagggctgaatcccgctctgctgcagaaatacgtggccgtctatgcagcccaacttattcgggaaggcaactgcaccacagccctggggctctacttaagctacggagcgccaccgatcgaagctcactttaatatatacaccaggatagcactggactgtttggctctgagggaggagcaaacggagagaggcaccacttggcgccagttgagggactttctcttccgcttgctgcagtctcttaaggccactccggcgcagtcccagacgaaatttgcagccagcatggagcagttcctgttaatagcccactactacgccaccagagccgcatgcaaggaggtacaggcgcttcaaccggtggctctgcgcttatccttggctctgcttcgccacacggatctgctgccggtggacaagggtttctacgaagctgggatggatctccgccaggcaggtcgcgaagccgaggccttcgttatgctcaaccactatctggacgtgtgcgaggccattgaggagggttccggtcagttggtagaccactccgacctggctagcaccgattttcccagttccgtgcccttgccggaggatatccacctgaagaacgatcccagtcttcacgaggaggtgcgtgaatgggttctcgccgtgagcatggaccagcaagtggaccaacagctgcccaccgatgatcgcggcttgtacgagtccagtttggggcccaacgatctgccctgcatgctgagtggattcccggtaagaggccgtcaaccggtgacctttcaaggatcgagcaaccaggtaaaccgcgacgtgtggagcaagttctcggtcgccttgaagatgtcaccgggcagcggaattgccgacatcatttcgttcaccgaaaaatggcagggagcagccaactacgtgatgcattgaagatgtacagaagaagaagtccaagaatgtaagttgcttgcaattagatgctatattgaaatcgtcattcttgtgtgtgcttggattacagtcaggggatttgtgggcgcggtgcgattagggggacaattgcaaatatatatgtaatcttaaagtgactccttcgtttccttcaatgcagggcgttgaagagatcgccagcggagggcaggggcgcaagtccgccagtcacatccggcaatcgggtcaggtcgggcaggttggagaggtggtcgtggatctccttctgcaggcccaacatcttggccagcttctttttgtgttcctgcaaagacacaaagaattagccgacgatgttcaagacgtgcaattaaaggggactgcattagattagcttcggtttcttttttaatatgcaaataaaatattaatacaaaatgtggatagccgacaaacgactagactaggtaacataaaatagaggcagtgacgaacaacatcccatagtttttggataacgatctttatctaacaaccccaaggaccatgcattgcctagaccatgaagaacgtacatcgaggcgttgctcagcctgggagagaagttccttctgctccgcttgaaaatctcgcagcatggtcgccaacttggagcgctcctccatctccgccgccaaccgagcattgtagtcgttcagcagatccacagcttcgttcacctaagaggaaattgattaatagtatccaatcaagattattttgaccacatcttagtgcatttggattttgaccccacctgtatggccagttccttggccttgtccttatcctccagcttgctgatgcagctaatctcggatatttcctggggcagcttggcgatacgttcgcgcaccacagcatcgctggatgcggagttttcgatgctggtcagggccctgatgagctcctcgggctccggtggctctcccaaaggcaagtagggtggcgtgtggccgttctcgggttccacagaaactacttcctccgtcggaggagctgagttcgcgctgctgccttggacgtgatggcgcgagcgcttggacttagagtggcgatcctcgtgcttgcgcttctcgcggcgctcggatttctcgggcttgccgctgccgccgtgatccttctccttctcgggcttctcactatcgccattggtcttgccattgctgctggagctgctgccaggagcctccttgtgtaatcgcgacctccagtcggcaatggtcttgggatcgtagacgccccgctccagccagatgtttaggatccttcccaggctgcccagcaacttgtccgagttgcacttctcgccaatgtgggcgaacaccttgcccagcacaaggctgtactccttgccgtactccgggcccttcttcttgctgttctggatcacgtcgttggccaggtacatgaaggtcagcttcttaggctccggcactgtttggggatgcatgtgtattagtaggtgtgctgcactgaatggccagtaactgccaggggatacccaccgttctccagctcccgctgccaggtccttacaatcgctgcactgtgttttcggtggtgaattagccacagggagagcgtctggatgctctgctggctgctgtttagctcggccagcttcttgagtagcgccgaatccgtgaaggccgacatggctgctgctgcttttccgccgcttttccgtacttattatcaaatcagtcgaacgattgcaatatttgcaagtttctgaaaaataaacagcttggaatgcgtatctatttttgaccaaaataccaaatacggctagatcgcaagccgcttcaaattacggcaactggtcacactcgctgtggcgggaaatcagttttcttcgaatttcaaccgaaattctcctgttcgattttttgctgtcttgttctcgaaagttgcaaagttggttgttgaatacactttgcaagaaatacattttaaagtaattgattttacctcaaagcagagttgccgtacaaatagggctgaatataccagcttccaacgtaaaccgctagagggagccagtacgaggcgccagaaaaatttaaatttgaatttgaaccttagagcaagcagaattatggtttatttaactagttttgataaattacaataatccagagcagacttttaataatttcacttgacaagcaagcaccctacggctgtgtcatcaatcaagtgccagcgccgccaaacacttttcacactgataagcactccactttcagcactcaaccatcgagaatccaagtgcgaacgattggacaggtgtggtgggctcgttggagccctcagttggtcgcagcagttggttggagtcggtcgcgtgtgttgatagcagctccggcgggcaattaagtcggacggaatcgaatcggggcgagcgcttatcgcggcaaaagagtaatttgtgatacctgtccgccgtgtattggcttgttggagcgcaacgcgcttaagtggtgttaattttttattaattattatcgtatttattacccaacgaaagtgaagtgcgaaatcggtcgcctcaagtgcccggccgtacgtgcaaagcccgtaaataaattacacagccatatagccctgatccttacctctacactcgctctcgcccaccgcagctgataatgcagacgaattccgcctgatcgattcccattcccatttcgattgcgatttggagtgcgagtgcgggtgagtttgatttacagaccattagctattaccacta

SEQ ID NO: 19295 - DNA, 1369 bp, DROSOPHILA
cattccaagctgtttatttttcagaaacttgcaaatattgcaatcgttcgactgatttgataataagtacggaaaagcggcggaaaagcagcagcagccatgtcggccttcacggattcggcgctactcaagaagctggccgagctaaacagcagccagcagagcatccagacgctctccctgtggctaattcaccaccgaaaacacagtgcagcgattgtaaggacctggcagcgggagctggagaacgtgccggagcctaagaagctgaccttcatgtacctggccaacgacgtgatccagaacagcaagaagaagggcccggagtacggcaaggagtacagccttgtgctgggcaaggtgttcgcccacattggcgagaagtgcaactcggacaagttgctgggcagcctgggaaggatcctaaacatctggctggagcggggcgtctacgatcccaagaccattgccgactggaggtcgcgattacacaaggaggctcctggcagcagctccagcagcaatggcaagaccaatggcgatagtgagaagcccgagaaggagaaggatcacggcggcagcggcaagcccgagaaatccgagcgccgcgagaagcgcaagcacgaggatcgccactctaagtccaagcgctcgcgccatcacgtccaaggcagcagcgcgaactcagctcctccgacggaggaagtagtttctgtggaacccgagaacggccacacgccaccctacttgcctttgggagagccaccggagcccgaggagctcatcagggccctgaccagcatcgaaaactccgcatccagcgatgctgtggtgcgcgaacgtatcgccaagctgccccaggaaatatccgagattagctgcatcagcaagctggaggataaggacaaggccaaggaactggccatacaggtgaacgaagctgtggatctgctgaacgactacaatgctcggttggcggcggagatggaggagcgctccaagttggcgaccatgctgcgagattttcaagcggagcagaaggaacttctctcccaggctgagcaacgcctcgatgaacacaaaaagaagctggccaagatgttgggcctgcagaaggagatccacgaccacctctccaacctgcccgacctgacccgattgccggatgtgactggcggacttgcgcccctgccctccgctggcgatctcttcaacgccctgcattgaaggaaacgaaggagtcactttaagattacatatatatttgcaattgtccccctaatcgcaccgcgcccacaaatcccctgactgtaatccaagcacacacaagaatgacgatttcaatatagcatctaattgcaagcaactt

SEQ ID NO: 19296 - protein, 375 aa, DROSOPHILA
MSAFTDSALLKKLAELNSSQQSIQTLSLWLIHHRKHSAAIVRTWQRELENVPEPKKLTFMYLANDVIQNSKKKGPEYGKEYSLVLGKVFAHIGEKCNSDKLLGSLGRILNIWLERGVYDPKTIADWRSRLHKEAPGSSSSSNGKTNGDSEKPEKEKDHGGSGKPEKSERREKRKHEDRHSKSKRSRHHVQGSSANSAPPTEEVVSVEPENGHTPPYLPLGEPPEPEELIRALTSIENSASSDAVVRERIAKLPQEISEISCISKLEDKDKAKELAIQVNEAVDLLNDYNARLAAEMEERSKLATMLRDFQAEQKELLSQAEQRLDEHKKKLAKMLGLQKEIHDHLSNLPDLTRLPDVTGGLAPLPSAGDLFNALH

SEQ ID NO: 19297 - DNA, 3515 bp, DROSOPHILA
ctagtttatgttttttgtttttgtctgtgtttcgtatttgcatgctcaagaactaatcgtgcaactactcacggagtcccgactgatgtactactccaagaaaagacatttatagcttgaaagctatatgatattatttttgaaacccttgtcttcgtttccattcgcacatccaacttgtatatcgtgacgcatagctatggaattatctcaattcgaatttacaagacgtttccgtgctatcattttggagaaatttactgaataaatgaatttacatttttgtttgtttttctgccagacttttcgtaaaagaacatctttaactcttgtaaataaactctataaaaaatatataaatataaatactaaaatatactttaaggaataaattaaatttgaattgcagatacagtgaaggcgaaatacgtttacaaaataattaaataacataaattgataaaaaaaaaatgtattcaattcaaattgacaagtgaaaaaatgcaaagaaacgaaacaaactcaaagcgaacaaagcagaactatgcttttagtttttctcaaacatagaaaacaaagaacaaaaacaaaaaacatttaactattaatttaattaaaataaataaagaattaattaattgactttaagtaaactaattaattatgattatgaacaaatttcttaaaaaagaagaatgaatatgagaaaagataataaaaacaagaaaaacctactattttataaaatatacaagcgtgtctttatttaacgattcttttgcgcataggatccgaaattaaaccagcaggaatacatatatgcatctattattttgttttattttcattagtgaaactaagggtcaaggcacattgcagaaatacgcattagtttaaaagtacttataaattagtatacgaaaacgggtttggttaacaacgaacgagacgaacacatttgtaattccatgggatcttgggatcttctggtggagaatcactatgcgcgaattcgagaggccttcttgcttttgtcagctttgggtggcggcggtccactgcgtcctgcttgcaagtggcggttgtagatgctgtcaaggaaaaggatcagatgaatatacatttatggatatatggatctatggtgcactcacatcttataggtctccgttttgaggtagtcgatgacgtgactaatgcccagcagatattgctcggcgatgggattgacccagggattctcctccatcttcatgaccgacttgttgctcagtaggtccaactgggcgatctctggtggcagcacctgcagcctattgttttgaatatgtagctcccgcagtcgcaccaaatccccaacttcgcggggcaattccagaagatcgttgtcacgcaatccgagtatctgcagattcttcagctgacccacctccttcggtatatactcgaagtcattgtcgcccagatacagagcacgcagtgtctccataccaaagaaattaccaggcaggacctgttcgttgagattgttgtaggacaggtcgagcacttccagcaccggaaaggctccaaagccgcgaggaagatttatcagccgattgatggacacattgaggatgcgtagctttggcatggacgacagcgaaacgggcagttcggtcagctggttgttcgagaggttcaggatctccagattcagtaggttcgcgattcccggactgattacgctgatcttgttgtgggacagggtcaagcgcgtgatgttggacatgttgactgcaaaaaaaattatattaataagaatactaaactctttaaaatacatatttttcctttttcgtgatatcaaagattgtttttcataattgtccaatgcactgtgaattcaccactgggtttaaatgcaaacagctgattgcaggcaacaagtatagacgccgaatgttggagcgggacaacaatataagcagaggcatgcgcaatgttttttttttctcaaaaatttaatggttttaagattaataattgtagtatattctaattttatgtaaatgaagtcatagttatggagttgtagtacatttcccagatatgtatacacatcttatttgcggtatttacagtgtttgtttacgttctctacactcaaacttatgcatattttgctgctggcgtcatcacaataaataaaactaagcgactccatttaaaaagatgcttagactcattttaaatgaatattattaccacaacataaatacatacgctagaatattattaatttacaatttttttagcagctgggcgaggctccattctgcgtggaagtaacccaccattatgtttactcagaagtgcaaaaatccgtataattccttcaagatcctttggttttgatacttacacagtccgggcaactcctcgaaggacgacagccccttgtcggccaaatccaactcgggattgtgagtttctcgggcttcatccaaaaccttctttgccttcgacatctttgcgctcactggtatacaagactgactcattttcgttgattcctaatacgccctaaaaaataccagaacaaaatatacatttctaattaattattttgaaggttagtcaataaatttttatttctaaaagcagaatagtaaaagaatttggcaaactaattctatgcttttttaaattttgtaagcaatttttttgtaatgtgagctattatatctgttatatgtatttcagggctgccagacaagtagaaatatgtaattttacatcgacaggaagcaatgtaagatattgtaaatgacttaatcgaataataagtattgagctcatttattaaataatatttatatttatattatttaaaaaaaaagatgttcattattcatttgtatctacttatatatgaatgtgaaatcaaagctcaccaaacaattgttgataaaaaggtaccaacataaattttacgcgcgttcgatgtatgttatcatatctacatgtagaaagtgtgtttacttgtgattggtaaaaacttaattgtaacgtgttttatttattgaatttataataacatgcattctttaataatattgatataattttgtttatttttactttgctcgattaatgaaatattcaaatgtcttaaaggacttaacattattattatgtattatgttaaattatgtattaatttatgtattaaattaaaatataaaatattgttgtaaaatgtatttatttttatttttatatatttttcgtgtagttggtctaaaactaagtaatgaaccacaattacttacagagtaattctaaaactgttttggcagccactttcagtagctctcaaactgcgccaactgcactttttgttagcatatgtttttcttcggtcagttttcagcacttttcatccacatgaaaacgaatttaaacgttttttaggtcactatgttacacaaacactgcacttgacctatttttgtaggaaaacaccaaggctt

SEQ ID NO: 19298 - DNA, 824 bp, DROSOPHILA
caaagatgtcgaaggcaaagaaggttttggatgaagcccgagaaactcacaatcccgagttggatttggccgacaaggggctgtcgtccttcgaggagttgcccggactgttcaacatgtccaacatcacgcgcttgaccctgtcccacaacaagatcagcgtaatcagtccgggaatcgcgaacctactgaatctggagatcctgaacctctcgaacaaccagctgaccgaactgcccgtttcgctgtcgtccatgccaaagctacgcatcctcaatgtgtccatcaatcggctgataaatcttcctcgcggctttggagcctttccggtgctggaagtgctcgacctgtcctacaacaatctcaacgaacaggtcctgcctggtaatttctttggtatggagacactgcgtgctctgtatctgggcgacaatgacttcgagtatataccgaaggaggtgggtcagctgaagaatctgcagatactcggattgcgtgacaacgatcttctggaattgccccgcgaagttggggatttggtgcgactgcgggagctacatattcaaaacaataggctgcaggtgctgccaccagagatcgcccagttggacctactgagcaacaagtcggtcatgaagatggaggagaatccctgggtcaatcccatcgccgagcaatatctgctgggcattagtcacgtcatcgactacctcaaaacggagacctataagatcatctacaaccgccacttgcaagcaggacgcagtggaccgccgccacccaaagctgacaaaagcaagaaggcctctcgaattcgcgcatag

SEQ ID NO: 19299 - protein, 272 aa, DROSOPHILA
MSKAKKVLDEARETHNPELDLADKGLSSFEELPGLFNMSNITRLTLSHNKISVISPGIANLLNLEILNLSNNQLTELPVSLSSMPKLRILNVSINRLINLPRGFGAFPVLEVLDLSYNNLNEQVLPGNFFGMETLRALYLGDNDFEYIPKEVGQLKNLQILGLRDNDLLELPREVGDLVRLRELHIQNNRLQVLPPEIAQLDLLSNKSVMKMEENPWVNPIAEQYLLGISHVIDYLKTETYKIIYNRHLQAGRSGPPPPKADKSKKASRIRA

SEQ ID NO: 19300 - DNA, 5437 bp, DROSOPHILA
tgctttttgattgcttttaaatggtggttaaatatatatacatatatgtatatatatgtttaatatatatataagtatgtttatttttagtgttattccgctgattccgatactttctttgattccgattcttcactggttttcgctggattcttcaattcttttcaatttttcctgccttcgccgtatttgcgatgtgattattctgcaacgcgttcttcgcgtttcactttgcactgcagttgagcagcgtaggtgaaggtggtggtggaggaggacaagaagaagaaacaacaattaacgggacacgaagaagcacacaacaaacaagaaagaacatgaaacgagaaacgcgtaggatcagcagcgtgcaacaattgccgactgcgacgcctactgcgacgtcgacacgtgcgcggcgcccccacttcccccttccataaatcccctctcgccacaccaccaccccctcccaccgtttacactgttgtaattttcaaaatatttcaggcgaaaaaaaaataaaaaaaaatcgtattcgattggcgcacacaaaatgctggatttatttgctggattttcgaactggaggacgaatcccggattctgaggaccgctcgacgcgagagttgcgtcttcatagtttttcgcgactacgcacctaaaagtcgactacgagtgagttgcgcgctgctagagctgggaaaacatcgatgtcgctgccgattgtaccgttactttcacattgacaatcatcgatggtgtgcagcgttctacccacccgctaggtggcgctactcacgttagtatcgatatatcagcacgtatggcaaaaacggttaaatggcaaagaaacacgattcctatcgattttcaaataaataaactgggcgaatttaaagagctccattcactggaaaaatgatatagtcgtcagagagagtagttggccacgttttaatgatctaatcttttccattttttattcgtcacccttcagtcagtcagtcagtccatttccctttgcaccaaaattttgtactcatttttcaggcatcttttgtgattgaaaattgatttgtacaaactttagctgagttcgccatgtataccaaaaggtgtctcagtgatgtgctatgctacattgcgcacaggtatatggatatacccttacccacctgcagaacatactccatctggaagttcccgcctaatttcgatgcgaacaatcagcgtgcaggcagattgttttggttctccgagcagatattccccctcatgttctactatgctctgggcattagtatcattggatcggtgcgtatatgcaaattgctttatatttcagatgtgcatttattacacctatctcaacacagactcacaattgtctagaattcataagcattttgttcaagaaggcgcatctgaagaagtcgcatcggctaaggaaggtaaagaatttcaaatacaagcaattgcgccgctttcgtatcatcggatgcattttaatgttaacggcgtggacaatactgctatacgccttggccaccgtgagtactaaaaatatcatatacaaaaaaaaaaaaaacgatatctattcaaaaacttctttgaattccattaatatattgtaaacattatttgaatccagctcaagccgcattacattggtccatggtttgtgatttatgccaccattacatccatcgatatattattggtgctgtcagatgccttagtgaacaggactataggcaacggcttcttgttcaagactttgatcccggttatcaacttgtactgtgtcctttctgtgcggtcgactctcaggcaactgatcgaattttacggttatcaggatgttgtttggtggtcaatggaaagatatgccccataaattgtcaaaataagtgaaaataatatttaactacattttacgtcgtactgtatttttctcatattaacaaaatgtaataaaaaaaattaattatttaacaaaaacagcgccacctggatgttgtgccgagtaatggcaattgaccaacaggtagcgcacatgtgcaacattgttattaacgcttcaattgttataaagcttttggtttttaagctttatggatcacattttatcctaaagaacaacttaggcttagaggaacttaataaatagatctgttttaaataggaattgaaagcttctttttgaggttaaaaaacccatttaataatatgtaatgattaatattggtactaaacatgattttaggaatcatgaaatatgacaaaatgtaatactgtcactttctatctatctattaaatatttgttataaaataaaaataaaaatatagaattaaaaaaaaaatggctaaataaccattactgatgtctaaacccacccccgcaagcagcgtgttcgctcaccatctacctctcttttcaagagagcacgttgcaaagacgttcagacccgccacctccgcgctccacggcaccctttttttaggacagagcatcaagttggtggcagttccccagcgaacactgagcacaacagattaccgaattagtgcgcaggtgtttgcgtgagtgatagacgaaaaactgtaacctgtggcaaatccccccactaaaaactgataaaacaactgaaaaggctgttgggttcacctctgaaatctaaatcccacccataaccaagctcgaaaatagccaagataaacaagttggagctgcagcaaatgaaaagaaaaacagacgtataataataaaacaaaaaagcaacgaaaaacgaagccaaaaactcacatgcaaccgtcttaatgaagttgagaaaaactggtttgctgagataaacattttggagtttgttttggtcccgctttcaacggtcataaggggaagggggctgagccagggtccaaagttcaacacaaaacagcaccaagaaagtacgacgactcgtttgcgcgaaacgcacacattttgcatgctcccgcacaggctagttcgaacttttagcatatccaacatctgtacgcaaaatatcataaaatcttctcttggcattacacagaaattacttattgatcgttgggcttctttataagtctcaagagaaagttgagacaaacgaagtcagtatcttttattatttacataagtagatcttatcatttagtttttaaaataacctttaaagccccacgtagttctttacgctttatttaaaaaaaaaaatgatccgaaacgttaacatttcgaagatctctatcatagaaacatgatttatatttaagactggttataccaaacttaacagataatacattagtgatccattatagcacgtttactaatttaattagccattatactttcaatattcacaattaataagcctgtggtgctataattgtgagctcaactgtagatgtgggcggggggcagagcaagagcgagatatagtgtgtgtggtgcattaaaaatgctgtttgaaatgttatgcgaataaaaaaagcacattacatgcgagtgtacataagataagttcgaaatgcaatcaactattgaataacaagtatcccacatctatataataccaaactatatgctatactgtataaaactggatatcaggcccactgtaactctctccttttcatttaatttctctcaatgcaaatgcaactgtaacgcgatcgatgtaagagaaagagagcactcatttgcatagagctcgctttgcaagagtgtttgagtggtcgagggaggagaaaggtagagggcctcttttttggccttgagttccgcttacgttgcatacatgagatatatgtatgtacatatatatttataaaaaaccgtgaatagcattgccgtctcacaagtgtccatttcaaacgcagaattttccccagctggtgaaacgtgtggcaacagagtgttgagtttaccaagagggtgaatgcactggttaatgtttaagttttagttccagaaaggaagtgcaatgctattgaaaacatcaggtttaaattacccttcaaggtcatttatttctgcaccagatattccacttctaccaaaatctggatgatgctccaagaagctattatcaccctaaagaaatgtctttttagggggtaagcggaaaatgtacccaccttcataagaaataggtacttattaaataagctaaaacattcataacaaactattattttccatctggccagcaaataatgtgcaaacctctactctatgagtaaatggaatccgattcattgcagttcaggtgttccaacgggattagcggttcttgagtcagtgttcaaggttcaacgccatactaacatatcgacggcttcatcgacggctcgccataccgaaattctagtgataagcgcggggaaggcctggaggaagtcttgatgtgtagacatcaagaagccactgcatcgcgataacgataaggcacgggtggcgaaagagttctcaaggaggggaaggtgcgtgggaaggcaagtctagcacttcacagccactgtgtacgggagttgcctcaagtggtgcactggaaagaattcaaaacagcctcttcaattgtaaatgtttcaagtgttaataatggcaactaaaggtgtaattatatgtacgttggtacctacactttccgaaggaacaacgtgacaacttaaagggcttcctttcgagtgtgtgtgtatatcaaatgactaacggagtggttataaaaatatttcaagatagtacaagtatatttattattgatatttatacttctttttttcagtttccttatcaatttgagatcattttaagtagcattatatttttgacagatcgtttccctttacaatttacagttgcagtctgctgagagtaagagcggataagtgagagagtgcattccgaagaaggcccaaaaagagcaaagctgcatatacactgaggaaattgcatatatcaaccaaggtacgctcacatatgtcgattgtagaaattaactattccggttggcttacagtttaaaaatatttattatttatggtttctagagagctttcgatcaatctaagtgattaaatttttttgtttaaatgatgacccacgatcatttgaatttgtacatcttattaataaattgctagatcatagatcagtaattaaatccgcaatcaaaattagttttatttatcatttattttcagtgtatgcacgaaagagagagcaatatcgcgcaccgccaacgcgatcgtgtttttgttggcgttgctttgtttgtgagcagcagcagcggtattacttctctcagcgccgcacggcgtcgccagtcgtgtctcaacactcgacagcagcagacgtgttgcagcagcagtaacacttgattgatcgcatctcgaagagccagctc

SEQ ID NO: 19301 - DNA, 995 bp, DROSOPHILA
tcagtcagtcagtccatttccctttgcaccaaaattttgtactcatttttcaggcatcttttgtgattgaaaattgatttgtacaaactttagctgagttcgccatgtataccaaaaggtgtctcagtgatgtgctatgctacattgcgcacaggtatatggatatacccttacccacctgcagaacatactccatctggaagttcccgcctaatttcgatgcgaacaatcagcgtgcaggcagattgttttggttctccgagcagatattccccctcatgttctactatgctctgggcattagtatcattggatcgactcacaattgtctagaattcataagcattttgttcaagaaggcgcatctgaagaagtcgcatcggctaaggaaggtaaagaatttcaaatacaagcaattgcgccgctttcgtatcatcggatgcattttaatgttaacggcgtggacaatactgctatacgccttggccaccctcaagccgcattacattggtccatggtttgtgatttatgccaccattacatccatcgatatattattggtgctgtcagatgccttagtgaacaggactataggcaacggcttcttgttcaagactttgatcccggttatcaacttgtactgtgtcctttctatgtctaaacccacccccgcaagcagcgtgttcgctcaccatctacctctcttttcaagagagcacgttgcaaagacgttcagacccgccacctccgcgctccacggcaccctttttttaggacagagcatcaagttggtggcagttccccagcgaacactgagcacaacagattaccgaattagtgcgcaggtgtttgcttcaggtgttccaacgggattagcggttcttgagtcagtgttcaaggttcaacgccatactaacatatcgacggcttcatcgacggctcgccataccgaaattctagtgataagcgcggggaaggcctggaggaagtcttga

SEQ ID NO: 19302 - protein, 296 aa, DROSOPHILA
MYTKRCLSDVLCYIAHRYMDIPLPTCRTYSIWKFPPNFDANNQRAGRLFWFSEQIFPLMFYYALGISIIGSTHNCLEFISILFKKAHLKKSHRLRKVKNFKYKQLRRFRIIGCILMLTAWTILLYALATLKPHYIGPWFVIYATITSIDILLVLSDALVNRTIGNGFLFKTLIPVINLYCVLSMSKPTPASSVFAHHLPLFSREHVAKTFRPATSALHGTLFLGQSIKLVAVPQRTLSTTDYRISAQVFASGVPTGLAVLESVFKVQRHTNISTASSTARHTEILVISAGKAWRKS

SEQ ID NO: 19303 - DNA, 3579 bp, DROSOPHILA
atgcaataacatacgggaaaagctggcggtgggaaagagagatggcacacactgcgcatgacaagcgcagccatgcacatttgcatttgttaaccaatgtgcgtgtttagtatacacacacatcaacgcgcgtgccacttaagaaataaataaataacttttatatgtttatgccaaccagcataaatacgattactcatactttttggcgccagttttcgcacattggcaaatcgtttttatttatttttttaattttctttttgccaatttcatcaacgactgcaacttttttatttcttgctattctcctgcttggcggccattttggaaaaaaaaaaaaagcagcgcacctcaccattacaactaaaacaacaatgcaaccaacagtcgtgcgaatacgagacctctcacatcttcgtgtatttgtgtatgtatccaccagcgagaatgcgcctgtgtgtgtgcggtgaaaaatagggctccgctggacggccggcggagccccaaaaacggcaaaacataaactcaggcgattcacaacgaaaaaaaaatttggaaaacagtgcacacacgcacatattcagcggccacaagcacgtgcgttttaagaaccacacttagtattataagtatttagcaataaaaaaaaactcaccgttaaacacggaataaagttattcttcacaatttgtcactttcaacacgagacgaacaaattcggacgagagaaattttcacaatgatttcgtttcgttgagatctagagatggtagcctagtaggcgaaggcctacttcgattgtattcgattacactcgattgtctgacaagaccatgcccgccaaatagtttggttctgttctttgctaattacatttttataactttttaaaatttttttaactccaacctaagattaaaaatgaatatgttttaatgggttggactctgctaattttaatgaaatataagcttcattaagcaaaaaaaaagccaagttcttttatggattgtgggtttctctctgcagagaactttattttagtgcattgtgtgttacatttgagttgaacgaacgtgcatactactgcgacttcttgtcctccttggcggccctgcccacgggctcatccttgaagtgaaggaacacgaatgagaagacaaacacgccgatcatcattgagaaggcgctggtgtagtaggggaatgcgctcgggataaagcgctcgtactgtgtgtgctccagcggacgcaccgacacctgggtggtgctgtacagatgcgtgtagcccacgcgattgtagtccaccttgaactgataaacgccgtagacgtcgggtatcttgaatttggcctggtaggcgcccgtgttcgtttgcttcagataggtgcggacgaagggatcgatgcgcacgaactccagttgaatgtcgctggccttaaaggcgcgccactcgccctgcaccagctcctcgatgccgatggtgtagacgaccggatcggtgatggtgtacgcctgatccggtggcagcagctcgccctccttgtgatgttgcacggatgccacgcgcaagcggccagtctctccaaatacccacttgctaatggactcggccacgtcgcgattaccggccagcttgtggaacacaccgctctgtgcgtactgcacggccgttgtgaagctctcgtcagagaagaagagcagcgagccggagaacactacgcgggcattgttcctcgcctgcagggcggcgattagcagcgtgcctcggccaacggcatgcggatagtcggagacacttgcctcgggattgtagctataggcggtgctctcggcggtcagcagcttgagtaccagcgggttctccttgtcggcaatcagtcctgtaccgcgatagagcagcggtgcggcatccgcctgcctgttggccttgcccacaatggtgtcggcctgtataagattcttggcggaggtcaggatggttgtgtgctcgccagcatcgctaacatcgtagtgcagatggtcaatgaccgccgcattctcctcgtccagctcgaagccgcactcggaggcgaattcccttagcgcgtcgccggatttctcgctgcccgccaccagaacattgccgccatcgtcgacgaactgggccaaacgctccacgctcacatcgccgccgaattcctcgacacttggtgcgaatatgatgacgttcttgtacagatattcaccgtatttggacagcagcaggctggagtcatccgccagtttgtaggtgagcttaaatccgcgatctgtagcccaaagttaaacaattatcaacacatttcattgtccacgtcagaggttaaccggcattttcactcaccctgcagcgatttgaagaagatcgagtgggtttcccggatggccaggttgtccagcagaaccaaggtgttggcgtccgtttccagtaccgcctggcagtgggcaatcgccaaaacggcgatcaggagagccttccacatcattttatccaactaaaacacaaaattctctccggcttttcttgaaaaaaaaaaatgactggctgtcagtgtggccgaatactggtagggtgtgccaaaatatatacaaatataccagaaggaattcaagaaattataaaaaatcgatgatttgattaataatcgattacatttactagccaatttataaacaaaacattttaattcaaattttagattgtgaataacattccttagcaacaaccataatggacatattcgagagcttctgtcgcacgtgcggaaacgaatgcctggaatcgctgtccatttacaatgagtgtgcccaagtgcttgaccagatggtgcccattgcggatatgctagcgtcctgcctgcccgcctccttgccgccactggacccagaggacgactatcccaaacagatctgccgcatctgcgtgaagaagctgtcgatggcctacgagttcagccaccagtggctgggcgcccacggcgagttcaacgtggccctaaagttcgagcagcgccgaaggcgcagccaggccagcaaatcccagtcgcacacgcaaacccaaactcatccggtggaaccgaagaatgagcaactgcccacggtgctggcggaagcagtgtcgaccaaaagaggtgggtgtacaattttcttatctaggctaggtagatttcaaacttctcaatcttccccagcagctgctactcccaccaacgagttcagcagcgactccggaccggccttcaagtgcggcttctgcggcgaatgtttttacacggagaaggcctgcaaatttcacttaaagttctcgcacaaggatctttagagaactgtctgttttttcccttacttgtaatttggttttaagtgtataaatcttttgtgaaattaattttaaattaggaatatatatatatattccttctctttatacaagtgccttctttgagtttttaaacccaaaacgttgcaattgtagggatatagagtgcatttgtgtaagtatgaaacacaaaaaaaacctggaaaactactacccgctatagttgaaccactgaa

SEQ ID NO: 19304 - DNA, 1505 bp, DROSOPHILA
acactgacagccagtcatttttttttttcaagaaaagccggagagaattttgtgttttagttggataaaatgatgtggaaggctctcctgatcgccgttttggcgattgcccactgccaggcggtactggaaacggacgccaacaccttggttctgctggacaacctggccatccgggaaacccactcgatcttcttcaaatcgctgcaggatcgcggatttaagctcacctacaaactggcggatgactccagcctgctgctgtccaaatacggtgaatatctgtacaagaacgtcatcatattcgcaccaagtgtcgaggaattcggcggcgatgtgagcgtggagcgtttggcccagttcgtcgacgatggcggcaatgttctggtggcgggcagcgagaaatccggcgacgcgctaagggaattcgcctccgagtgcggcttcgagctggacgaggagaatgcggcggtcattgaccatctgcactacgatgttagcgatgctggcgagcacacaaccatcctgacctccgccaagaatcttatacaggccgacaccattgtgggcaaggccaacaggcaggcggatgccgcaccgctgctctatcgcggtacaggactgattgccgacaaggagaacccgctggtactcaagctgctgaccgccgagagcaccgcctatagctacaatcccgaggcaagtgtctccgactatccgcatgccgttggccgaggcacgctgctaatcgccgccctgcaggcgaggaacaatgcccgcgtagtgttctccggctcgctgctcttcttctctgacgagagcttcacaacggccgtgcagtacgcacagagcggtgtgttccacaagctggccggtaatcgcgacgtggccgagtccattagcaagtgggtatttggagagactggccgcttgcgcgtggcatccgtgcaacatcacaaggagggcgagctgctgccaccggatcaggcgtacaccatcaccgatccggtcgtctacaccatcggcatcgaggagctggtgcagggcgagtggcgcgcctttaaggccagcgacattcaactggagttcgtgcgcatcgatcccttcgtccgcacctatctgaagcaaacgaacacgggcgcctaccaggccaaattcaagatacccgacgtctacggcgtttatcagttcaaggtggactacaatcgcgtgggctacacgcatctgtacagcaccacccaggtgtcggtgcgtccgctggagcacacacagtacgagcgctttatcccgagcgcattcccctactacaccagcgccttctcaatgatgatcggcgtgtttgtcttctcattcgtgttccttcacttcaaggatgagcccgtgggcagggccgccaaggaggacaagaagtcgcagtagtatgcacgttcgttcaactcaaatgtaacacacaatgcactaaaataaagttctctgcagagagaaacccacaatccataaaagaa

SEQ ID NO: 19305 - protein, 449 aa, DROSOPHILA
MMWKALLIAVLAIAHCQAVLETDANTLVLLDNLAIRETHSIFFKSLQDRGFKLTYKLADDSSLLLSKYGEYLYKNVIIFAPSVEEFGGDVSVERLAQFVDDGGNVLVAGSEKSGDALREFASECGFELDEENAAVIDHLHYDVSDAGEHTTILTSAKNLIQADTIVGKANRQADAAPLLYRGTGLIADKENPLVLKLLTAESTAYSYNPEASVSDYPHAVGRGTLLIAALQARNNARVVFSGSLLFFSDESFTTAVQYAQSGVFHKLAGNRDVAESISKWVFGETGRLRVASVQHHKEGELLPPDQAYTITDPVVYTIGIEELVQGEWRAFKASDIQLEFVRIDPFVRTYLKQTNTGAYQAKFKIPDVYGVYQFKVDYNRVGYTHLYSTTQVSVRPLEHTQYERFIPSAFPYYTSAFSMMIGVFVFSFVFLHFKDEPVGRAAKEDKKSQ

SEQ ID NO: 19306 - DNA, 10499 bp, DROSOPHILA
gaacctggcgataacatcgccttacttatcagctgaaaaagaggcgttgtgtgttcatcacttaatgtgatgttttggtcgagtggcaggccataaataaatgtctatttaaatgcggcttaagtaactgggttagtagccattttttttggctccgttgataagctgcacttttttttaaatttctctcaaataaaaagacatgcatcatgcttataataagttttattggcagtgcaattgcagtgagggctactttcgcaaatatttgctaggacaattaattaacacccactcattagcacccaacgacgcctggcacgggcaataatgacaaatgaaaggcttttgtccggaagcaaacaccaaagtgctattaaacaaattaattaatcaatcgatgcaaattgtttgaacagacggtgcaaggcgtaaatagtttgaacaaagggtaaacaatgtgaagcgtgaattatgctacttaggcatttttcaatgcacttcgctttgtttatataaaaagccagcttaggcatttcaacaaaatgaggtgtgaaattgcactagaacttatttgacgtaattgcgcaaaacgtgcatatttaccagcttgtttatattgcctacaacgtcacataaaaacgtcaaataatttatatttgcagttgccttgtgcaaagtacaattaaatttcaaatgaatatacaaaaacctatatttcagttcgttgcaaattcgaaaaaaaagatatgacattaattagattctaattagtttgctcatttttccccagtggtggttgcgtttatttgtttttgaattttccgttgcgactttattgaccaagaattgcattaaaccgacaataagctgacaaaaagtaataattaataatgatttggcatgcgctgcgcaagtatcaatcaactgtttttgcgatctctgacttctgtgattcgttgttcgattactaatctgtttggtctgtattttccatttgcagaaatgtcgaaattcgttggcgttgccgacataaccgagaacaagaaaatctggcgcatgctgctcggcgaactggtgggcacatttttcttgatcttcgtcggcgttggcagcacgacgagcggaagtgtaccacaaatcgcattcacctttggcttgacggtggccaccatcgcccaggtaactaaacgcacataaattgcagctaggatggaccaaagatcgcagctcaacagggcgtatgattaatttttaggccaggcttactagaagttgccttaaaatggccatgtttagttttaaattcgatatgtttatcccattttcaaaaacaaattcaaaatcctaataatattttcataagtttttcttgtgaaacttgggtccaccctagacgagaccaaaacagatcattcgtacaaagagaacgcatcgagctgcagattcgagatttgcgatctgctagccaagtcggtgatttcaggccagaagtcggcggtgcgtgcgccgattggcgagcattttcaaggacacgccaccgccgcgttacactttcggctcattcacaaacgcagcgtttttggccaagagacattggcatttaaaagcgacaacatcgcgggcctgccatatatataaaaaaaaaaagaggaaaaaaaaaacaaatggccagcgaatgcagctccagcttgccggttgccgctcaaaacacagaactgaaaactcaaagctcaaaactcaagactgcgtgcgaatgtaatttagaaaattgacagatttacaaacgcacactcgcagtgcggataataaatgcgcgctcgcagcaaaagcgtctgcgctggcaattaacattaatcaacacgcaaaatatgcaattagattattatgcgtttaattacgctatgctgtgcgttgcgagtgacgactgttgtcgtgccttagcatttaaagcaatctgtgctttgcattcgatttattcgatttatggcactacaaaagtcaagctcaacggaccgaatccatcaagaacacgaaaaggcttctatggacttctatttttagattcctgtctcattagtttgggcagtatgaatgggaaattctacgatttgattttcatttttgcatgactattaatcatcgtaagtggtaattttaaaaaatatacacagacttaattctggaaaaccactatttgtattaaaaagctctagataagtaggtcgattacttttgctacataatcgaaccgattaagaagtatccatttctttgtgccccacgttgggcgctagatatatttctacatgctggtcttacatgtcgtatgactaatatggcttggccaactgaaagcgctcccctctcgaatttatgcttacgactaaaaagttgcaagttaataatcatattgaaagcgttgataatttccacaatgaaatcaagtagcaatattggcagcataatgtatgcttgtttctgccattttcccgcggaaaacacgaaaacatttgcaacacattcgttattagtcgcaaattagttgcccgtcgcctgccgaatcacgtgaagagatcagtcatgtgcttgccacaaacgccaggcttttcagcctttccacattgccatgacttgcagtggcgatcgattggctccgctcgagcccaagaaaaaccccggtattcatatgcattgccaatttcgccagcaggtgtgacgacaatgctcgttcgtcatcgccatccttatcgccagcgccgaacccaaaggccctgccaaaggtgttcaatggagcaagacgcgtggcgtcaaattggaaaacgtgctaattgccagcgatcgagcgccgtggaatggctctagtccagtaatagtgctagaaataagtcaagaaatacgatattgctaggtatctgcttgggctattgagttacccctccagatcggcacttcaaatgtgcaaatctctagaagatccacatttgtatgcagtttgcatgcggcgatcgctcgaaaggcggcaaagaagaagtgaatcaaagaaaatgaaatttaatgcacctgaaaaagcttagagaaaatggcaaacaacaattgtgtacgtgcatggaaaaattcatattaaccgatttgaatgtgggttgtaaattgtcatgtcatgttaaccgattgttatcgaaaattcagctagagggattggcttttattaggggcttcaattaaacacattgttttagtataggaaaattacttgctgctgatattaaagcgtaggatgaatatgaaattttactaaataaatactaacagtttaaataccgacaattgtttaatggtatcatcaataatgaaattaagttttgaattaaatgtatagttcaatgaagtttattctttacatgcacattatttggctctaattatgcagttaagccaaataaacaaaagaaaaacaagttaacttagtgcgtgcaacgttcacgtttttgttttcaattcgccgatcgcaatcgaatcgagttggttgaacaaacttcgacttcgactttggctttggcccgatgcgaacttgaattgaattggccaacaagcagaacacaacaacaatcgccaaaatgccgctgaaaagcagaacgaaacaaacaagttagcattcgattttcagctgaaaagccataaaatatgatttaagcgtaaatgtcgagcttcgatttccactgcacatgcgtaagccaatcgatctctatgttgtatgtctacgtatatacatataagttaacgcaagttccacttgcatcagggttctcggcactcgctgccgcatacctcacctcgatatgacaaccaacatgctgtggttctccaaataatagtcaagatagttaagagggttcgagtttacgattagctttattttaagattcagttcgcgatctgctagcggttccgttatgtgtccgttcgacactggggcctcttctcccgccccgctgcttttatatccgcttcccccgttgacccctcaccctgagtgcgaccaacggcacttgttccgaatgcacacatacacaaacatgttcctagacaggccccgagtcgcctgctgacggggcccgaaaacacgagagccgagcgctggtgagtcctgacgaagagcgcaagaagagggttcttaactcctcccccctcaagatctgcgtcccgcagattagtgagccttgttcagctcggtttggcccaatgcttctaagtttgcggcaatctcgcggacatcgggcatgcctttggtggacatcagcttcttccataggaaataaaagcctaggaatatgcagattgcgagtgccgcctcggtgagaagagaggctagtagctcactcgccatgttggacatcttttccaaattcttcatgctcacgtcgtggacgtattccagagaaagttgaaagttgctggccgttatgtggctcaacacggccggcatcgccattagatgactgaccgagtaactggaatagttttgaccgttgaccattatcgtctcattgtcgaattggatgataaaggagccgatcaggtcgtagttctctgcagcccgttcttagagttccgttgaagttggtcaggaggagcattccatcgtcgacttgcttaaccactcgttggttacttcagtagccgagggatacagctagcctcctccagtttttgcagttcctcgaagccgtcgcttgcgcggccaagacggcgttccaatcagcagcatctggagatccagctacccatttccaagccgaccccagccagtccagtgagcgggatttgcgccgcatgcagaaatcgcgcttacaaaaagacaattcgtaaatatctggtcgtctaagttgttctaagactacgtagtgtgtgggggtacggtacattttgtgtacttatatttttatttatttcgtttcgggaaattggggaaattgtactatacttgttttcctttgaattgtggtgttgtgcatgtgtttatacaatttttgtgcgctattccattttgcaatattttttccttgcgtgcgtgctgttacagttttttattgatgacctctaatttatttcggcactgggcacggtggttccgtagtatcccttttggctggttgcctactaaggtacggccgccacacaacttgttgggcggttttttttgggtgcattccacaccacttaacgtatccaacaagctgccacacaccaccttatcactctgggcgctcatattactcgtactgccgcaggtaaactgctgcaatggttaattattggtttattatacacaatcttttgcactcgcgaattggcaaggagagaaaaaaaaaaattttcccacaagccgtaccgccgcagtggggttgatcgtgttttaattatgttataggtatcgtacaacttttgcgctcggcatgggcgacgtggcgtcctccggtagcgggtcgttgttttattaatttaaattaggtcttggcgcaacataggtttacatttttattttagaaattttacaccttttattgaattatgcaatatttgttgcgccccgggatgggcgtagttccccccggcagcgggtaattgctattttatcattttatacacagctcacgcagcacttctttttcatttatggatttcagatcttaatctgacttatgcacaccaccactatttttacgcacaaatttccacaattttttcgtatcacttttatcggccggacattgccggtccctgttcgggcgccagttaacgcaagttccacttgcatcagggttctcggcactcgctgccgcatacctcaccttgatatgacaaccaacatgctgtggttctccaaataatagtcaagatagttaagagggttcgagtttacgattagctttattttaagattcagttcgcgatctgctagcggttccgttaggtgtccgttcgacactggggcctcttctcccgccccgctgcttttatatccgcttcccccgttgacccctcaccctgagtgcgaccaacggcacttgttccgaatgcacacatacacaaacatgttcctagacaggccccgagtcgcctgctgacggggcccgaaaacacgagagccgagcgctggtgagtcctgacgaagatcgcaagaagagggttcgtaacttacacgaacatgttactagacaggccccgagtcgcctgctgacggggcccgaaaacacgagagccgagcgctggtgagtcctgacgaagagcgcaagaagagggttcttaacttatatatctcgatcgggggaagagtcttgccagactttttgtagccaatggaaaaccttgagagcacggagagtgctgacacaaaataatgaaatagtggtcaattcatataggattatatgtatattcgtaaataaagtcttattccaacttgttcgttttgaaataaacattatacttatttcctccataaaccatgtggtaaatgtcagatatcaaaaactaatattaacttcaaagagataaatatttttgtattatatttcaatagatttttcgcaaataaaatagagattggcaaaacatgagttatcgttcatggtagttttcccattgaatgttcggatatccacacactctccatcttttgtgggttccccatcggcccaactcaaaaaattggccttcgatcctttggtcacagaaacgaattcactttcgttgaactgattggtcacgtcgatccagtagcgattcaggccattaagttggttattgaatctatccaattcctcctgactttgcagactggccagatggccacccattttgtggcatttatccaaagcatcgtgccagtttagcttctcttccttttcgatgtagtagtatttgcttcccagttgttggaaaatttcgttttcttccagttttctgcccattgctgtaccgtgtgtcagcagttgttgcgaagtattttgattttccagctgcaagttcgttgaagtgccaaaattgtccagtcttcggtcatttagggctattctcgctattgcaacagctgcttcacaggcttcaacccttcgttgcaaattgcccatgctcgcgatgcagggattcaagacaccgtagcaatatgcagcacattgggaatcgctttcaacgccctaagaagatatgtgaatgtaaatatttagcatttctaaaccacttctctacttcactcacctcgcaggctgctgaataacttgaactcagacacaacgggagtaccaaaaatataatagatttttgcattgctgcgattctgagatcttttaaatccgagtgccaaaaacagactgacttaaatgcttcgaaaccaagtatattagaaagaaatccaataaagaaagaaacagaaaatctgacgctgcatgatgataagagataggtactatgtacgacttatcgctctgcacagcatgtgggtatagttatctgcatacacagaaaaacataatgcaattcataattcataaaaattaaaaatatatttaacattttttaattagatcggcttagaactaaaaagtcacatagtgtaattaacccattcgaaatgcgtaataaactcgtagcgtaatcacataggcctaactcgattagagccatatttcatcgatgactcacgtctaagttcagtcagtccgtcattcgcggttttcacacgcagccggtctgtcgatctcgattgctttcgttgcatatattaaatttaattatgggtttcgggctcgacaataaatttgattaatttcacgactcttcgagtgtgtgcagctaagacgagtggaggcattgagtcgagaacaataggcctaaactattgtggctaaaagctttagatccaaacgattaggtcaggctgagtggcggcagcaaaggcggcaacttagtcttagtatagacgaagtcgaaattgcgctgcacgcatgcgcataaccaaaatgtcaagaagttgttcgagttgtagtggctgctcggatttgtggcctattgccgtttgggccgcaaaacgcgactcgaacttgctcttggcggcatttgtaattagcgttttgtggccgaacagccaacacacgggcatttttttttgtttttttcttttttgcgcatttattaattaaacgcacagcgacgcacgacattggccgtgcgtccaatgcgaactgcgaaccgcgaaatccatatcgaaatcgaattcgtatcaccaaaacgtagagaaacacggctggaaagagatatcaaacatagaagcctgcacatcgaccttgggcgcagagtgaacagtgcatttcgggctccattcataacacttgatccaatccaatccaatccaatacgatgcgatgcgatgcgaggcgatccgatccaatgcgatttccatttaagtgattccatgtgatctcttcacgggcaatgactcaacagaaccccgaatcacttttacttcccagccagctccacctgaactttgcagacacgctaaacacaataaatgcactcgagtgcatctcacgtctgacaaattgcttgtatccgctggcagttcgatatgcaacgatattgtgcaatggaaaattcggaaaatcgcacaatcagcttcatggcaaagggcaaactttgagcgcagctatggttaagatgttgcgttgtcaactcgacatttgcaagcgccgatggaggtggagataggccattatctacattatgttcgactgggccttagcctccttgatttgatcttcatactttttttcctcttttattgagccttataataaatatattcttgaatatcctcttattttgttctctctctcagggcttgggccacctcagtggctgtcacattaatccggcggtcacccttggattcctgatcgttggtgagatcagcattctgaaggctgccttctacatcatcgtccaatgcgtgggcgccattgctggagcggctgtgataaaggtggcactcgatggagtggctggtggcgacctgggagtatcctcctttgatccctccctgaactgtgcacaggcggtgctgatcgaagcgctgatcacctttattttggttttcgtggtcaaggctgtttcggatcctggacgccaggatatcaagggatcagcgccactggctgttggtttggccatcgccgctggccatttgtgtgcagtgagtacgaggtgatggagttctccgactggaggttaataagtgtaccatttacagatcaaactgagcggtgccagcatgaatcccgcccggtcctttggtcccgccgtagtgcagggcgtctggacctatcactgggtttactgggtgggtcccattgccggcggcctgttggccggaatcatctacagattaatcttcaaggtacgcaagggcgatgatgagaccgactcgtacgacttctaaacagtggccgaataccatatatgtatttttgtaaatgtccgcacctgctttccattcccatcacacattcgctttcccatcgaattcgtttgccgaaatttctcgtagtttaggtttgctccaccatcacaaccaagctgaattttcaacgcaatttgtaccattttattttttaaacaataagaaagcaaatgtctcgtttagttgtaccgcgatgccccagcactttaaaatatgcaatattgtatttgagtaattttaagctaaattatatgcacatcatcattacgcgaatcgaaggaaaactgtattgaagcttaactaaattgtactgggaaatcactttccaaagcagcgaacaggtggattacctacgctgttgatcgccacttgctgagcacctgcgaattgtattatgactatgtgtaataaaaaaatataaagaaattaccaatgttcatctttgtctgaatgtcctggggcttcattcattcattgccaatcgtcatcagttactcttttttattatttctattttttacttgtgcgtcatccttaaagcaacgggtataaatgtagtaaaactaagtccagaaatcaggaatttgatgctagcatttgggcttaccaatacatcacacttaatcattgggtgacatttatactaattatgaagtttagacctatgctgctttcggaaataaactaattcgggaaattgagtatagttttccgtaattcggaaggagagcattcaatggatatcgcttggttttgcaataagtataaagcgggcgttaagccgtatcctgggtatttttctgtgtggatgctaatgtatacatttcagcttaagaagggctgtaccccatttcaaggtcatgaatcattgtggtcactagatgccctcagaatccctgtaatggcatggttcgcattttcaatcctttgcatactactgatgatgtactgcgtgctcacacaaacataacgtggatct

SEQ ID NO: 19307 - DNA, 725 bp, DROSOPHILA
cagaaatgtcgaaattcgttggcgttgccgacataaccgagaacaagaaaatctggcgcatgctgctcggcgaactggtgggcacatttttcttgatcttcgtcggcgttggcagcacgacgagcggaagtgtaccacaaatcgcattcacctttggcttgacggtggccaccatcgcccagggcttgggccacctcagtggctgtcacattaatccggcggtcacccttggattcctgatcgttggtgagatcagcattctgaaggctgccttctacatcatcgtccaatgcgtgggcgccattgctggagcggctgtgataaaggtggcactcgatggagtggctggtggcgacctgggagtatcctcctttgatccctccctgaactgtgcacaggcggtgctgatcgaagcgctgatcacctttattttggttttcgtggtcaaggctgtttcggatcctggacgccaggatatcaagggatcagcgccactggctgttggtttggccatcgccgctggccatttgtgtgcaatcaaactgagcggtgccagcatgaatcccgcccggtcctttggtcccgccgtagtgcagggcgtctggacctatcactgggtttactgggtgggtcccattgccggcggcctgttggccggaatcatctacagattaatcttcaaggtacgcaagggcgatgatgagaccgactcgtacgacttctaa

SEQ ID NO: 19308 - protein, 239 aa, DROSOPHILA
MSKFVGVADITENKKIWRMLLGELVGTFFLIFVGVGSTTSGSVPQIAFTFGLTVATIAQGLGHLSGCHINPAVTLGFLIVGEISILKAAFYIIVQCVGAIAGAAVIKVALDGVAGGDLGVSSFDPSLNCAQAVLIEALITFILVFVVKAVSDPGRQDIKGSAPLAVGLAIAAGHLCAIKLSGASMNPARSFGPAVVQGVWTYHWVYWVGPIAGGLLAGIIYRLIFKVRKGDDETDSYDF

SEQ ID NO: 19309 - DNA, 5668 bp, DROSOPHILA
cgaatgtgaagtaatcgcaggcagagcgaaacgaaatcgatatcttttctttccctattcaaataccctatgaaatccgcacccttctcctttcgacagatttccttacctcaccatctacggtcaattaattccttccacaaaattactccaattactcaacgccaatactgaatagatttccagccggagttgttaatgaatgcaactcacttcgtaagatatgcaaatttatttatgatccgagagaaaagtcaaacaatttataacgaaatcggtcaaagaatttctcacgttcgccccgagtagtggacaatgtccggccggtaatgatttccctttttaataatttaaaaaaataaaaaattctcagcaactgcaacttctctgaggtggcacaggaaatctaggggttgctgtcaaaggggtgcaaggaagcctaaagtgcgataagaaggtggttgttgcagtttttaagagctcataagtaaatgcagctgagacgcggctttgtaacggcttttggttgaaagcacaaaagagtgcgtttcaagatcttaagaaaatattaaaatgtttccaaatgcaaccccacagggtttcctattttctaagtattcaataacattacataccataaaaatcttttaaaacgtaatacccagtacacgaaaatgggtccaagtccgctgattaaattaaaaataactaaaaagttgtcatgcaactattggatatagtaatgtgattataattagggtgaacctacaaagtaatccccataccaatgacatctgaaaggtttagatataagccataaacagccatattggcattgaaacgcttattttgctaatcaagtagtcgcgacggaaagcttttgctacgtcaaagcaacaggttccccgaaagctcattgacaaagcttgccgcaacacacccaaattcaacacagttgaactcaacacttcagctgatgtgccgtgatgttttcatttttctgtgttcctcaaactttgtttattgctgtgtaaattttaccgaatactcttttatttgtttgtaaatacaatttcgcgagtgatatgctttagctctgatcaagtgtatattttgtgataatcaaaagactgtaatcgcaacaaaaaaaaaagtgctcaattaacagtaatttattaaattaggaactttatcaggtgccataagctagctcaatagtgattaaccaagaataagaaagtgcaacaacaataatcgagtatcgcattcaaggggtaaatagaaatctacacgaggcaaataattacacacgaagcgtatctatcgcgtatacgaacctcaatcagatagaaatacgagtccaaaatgagaatagttggatccagtatgctggcagccctcaagcggctatcaacgaaccaaccccccaccttggtcagtaacatccggtacctgagctcgtttggaaccatgagcctgccggagcgccagcccttttctccagacttcttcttccgtcaagtacgtaatcggatggactatgttgaaatattctagtgacactattcacaagcattcattcagctttttgatggagaaagcagcacctatagctaccttctggccgatctaaagaatggtcaggccgtaatcattgatcctgttttggagcaggcgaaacgagatgcccagctggtcaaggatctgggcttcgagttgaagtatgccagtaagttagagagagatctctatctatgtatggatagatcattggatgataatttcatcatgacactacaatatttccccattcccccaagtcaacacacacatgcatgcggatcacataacgggcagtggctggttgaggaagttaactgggtgtcaatctgtgattgctgccgccagtggagccaaggcggatcgtcacctgaatgaaggggatcgcatagatttcggcacccatgtgattgatgctctggccactccgggacacacaaatggctgcatgacctatgtgatcaaggatcagggttgtgtctttaccggagatactctcctgatacgaggctgtggacgcaccgatttccaggaaggctgcccacgtaatctctacgagaatgtgcacagtaagatcttcacactcccggaaaactttcgcatatatccggcgcacgactataagtgagtgggatctggaatgctatgtgatatcaatctaatggcggtcatttccagaggtcaaatggaaagcagtgtgtgggaggagaagcggtataaccccagactgactaaggatattgaagagtttgtcaaaatcatggaaaacctaaatttaccatatcccaagaaaataggtggggatgtgaacatattactatatgcgtcttttactaagtttaatatcttttagatgcctcgctgcccgccaatcgagagtgcggggtgtacgatatacccaaggaataattccaacccctgcaaacactatatacgcagcttatataataatgtttcaaagagacttgtaatcttttaaataaataatcataataatcttatcacgatcaagttatgacagcctcattttactccctgacttctgtgcttaataagataaacttaaaaaactcacttctttgttcgccttcttttgttgcagaccattctcaatccgaagggttgtggcagtgccgtcaagtacagtctgcactcgactgcagagacgaaccaggagactgccagtaccacgaccacctctacccattgttccacaactggaagaaggcgcaagggtggctccctgggcggtactctctcctcgcgatcgacgcgcagcgaatccaaggaattgcgatcggctcttcaggatcgggaggctgtcatccagaatctgcgtatacagctttgtctgggcaaactgccacgtcccacgggaccaccgctggatgagtccgagaagccggcggctgagcaaaaactaaacagactgaagacggaggcggagaataagcgaattaagatcaagaacctgaagagtgccctggagaagctggacatcacagagtgagtagaatgttttaatactatttagcttgaagatatttaatacttactttattttatccacagcaacatagacatccgcatccgtcaagccgaattggaatacgcactcggcagagaagaactccagatgctctcgattgtggaggaggctcgcgccttgcaggcacgtctggaaaagtccaagcccgaggcgcagaccctctacaacatcatcagctctggagtctccctgagtctgcacgccgtgcatgccacctcgggaagatgggcagttcaacagaggacagaccagccgggtttctacgtagaatgggctttagagggtgatggcttgtacaagggcgatcgcattttggagatcaacggacgactggtaaccggaaaatccaaggaagagctgcagaagcaagtaggaaactctggcaagtgtcagatggttgtactccgcaagaagtccgtacctataccacaaaagcaactagaccaggagaaggagaacaacatgaggctgcagcatcgcatatcgtacctggaagagcaggtgcgagaactgcagacagtcaaggagcatcatccatcgcaacagcagcagcagcagcagcagcaacagcaaaatccacagcaaaatccacagcaaaatccacagcagacatcctccaatcaatctcagcatgtgaccagcatcagcatatcatcacctccatcaacaccgcccgagaaaccgttgatctttcagcggggcaactatattaccactttggtggggggcaaacccatcgagctgatgggtgacgacatggcctcgacacaaacccctcccggacatgtaaccaaaacactgatcaaggagaatacccacatcgatttgagagatcgtctgtcgcacatgtactccatgccctccaaatcgctgtccgcctcgaagatctcgattaatagcgattctgcctatatgcagcaccatcgacgtgataaggagcgccatcgcgatcgccagcaccgggaacgccccagagatcctctccagcaacagcagcaactgcatcgcgaacatctcatgagcacgcacgcacgcagtgtagagcacctgaatcattacaatgggtaggttattcgcgattcttcgagattcttgtgtagatgttctagcaaagacaggctttttcatagatttaaattttcctgactaatctccccgatcttcttcgccattccagactggatcgtcgccgagacacgccccgacaaagtgagtcgaacacacttcgagcccgcctgcccagcgatatgaggagtgtaaaatccctggatttcgatagcgaaaacgaatcgaagcctgcgactgagacgcgtaccactagacccactccgcccaagaaacccctccggctatcgctgcaacgagcccaaagtctgcagaccgtggagctgcacccctgtgcggatatcgaacgaaagcggcccatgaagagggtccaccacaacaacaacaacaacaacaaaggtggagaatcaccgactggagagggccagaccatgctcatcgagaactgcagtcccatgcacacggcttccctcggcaggcacaagctcatctagaaacccgatcccaatccaaccaaaactaattgttaatcgaagtagcttaatcctcgaccgatcctaaccggcggttaaacccaaaaaacaggcggacatgtgcaaaattacagtaggcaatataattttaaccagctcccaagtggaaagtttcttattatgtagtagcagtagtatgtacttacattctatatcttgtataagtagggcttggctatcaacatttagtattgagagaatcaataattaagagtttttgtatgtacgatgattttattagcacaatttacaaatgtgaatacacgaatattttcacctacttaaatgcgttatttatttaaaaaattcgatcccggcctgctataaatgtgatgtaactacaatttcatggcatcggttggcatatcagaagctattacctggcaactcattttcaaagaatttgtagcagtagttcttcaaattgcttcgccgtatctggaaagcatgccaatatttacgacctccattgtaggcacgagcctggcacatattttatgacgccacagtgataaggtattcaaatgaaaagcacgttagcgtgtttcagctgcgcttttagtaagttcaaagaattacttaatagctataatttggatataattaaaaaaaaggccgttaataggataataaatatatcatcagagctggacaaaagaatctgatcaatctgcagttgataaaaaaaactcaacgagggagatagagcgatagagcggtgaagtaagcccgagataaacctgagagcggaactctcgcctacgcgatcgtgctgaccgccaaatgcaatatccgccgctccacctggtggcgctctcaattctcaattctgcggtcttcttgctctcgccaaatctgccccaatgttctctcagcgagtcgatttgcgatggcaatgccagaggctcgaaacagttccgtcgcaggtttccaacggtacagaggtgcaatcgcttaattc

SEQ ID NO: 19310 - DNA, 2984 bp, DROSOPHILA
ctgtgttcctcaaactttgtttattgctgtgtaaattttaccgaatactcttttatttgtttgtaaatacaatttcgcgagtgatatgctttagctctgatcaagtgtatattttgtgataatcaaaagactgtaatcgcaacaaaaaaaaaagtgctcaattaacagtaatttattaaattaggaactttatcaggtgccataagctagctcaatagtgattaaccaagaataagaaagtgcaacaacaataatcgagtatcgcattcaaggggtaaatagaaatctacacgaggcaaataattacacacgaagcgtatctatcgcgtatacgaacctcaatcagatagaaatacgagtccaaaatgagaatagttggatccagtatgctggcagccctcaagcggctatcaacgaaccaaccccccaccttggtcagtaacatccggtacctgagctcgtttggaaccatgagcctgccggagcgccagcccttttctccagacttcttcttccgtcaactttttgatggagaaagcagcacctatagctaccttctggccgatctaaagaatggtcaggccgtaatcattgatcctgttttggagcaggcgaaacgagatgcccagctggtcaaggatctgggcttcgagttgaagtatgccatcaacacacacatgcatgcggatcacataacgggcagtggctggttgaggaagttaactgggtgtcaatctgtgattgctgccgccagtggagccaaggcggatcgtcacctgaatgaaggggatcgcatagatttcggcacccatgtgattgatgctctggccactccgggacacacaaatggctgcatgacctatgtgatcaaggatcagggttgtgtctttaccggagatactctcctgatacgaggctgtggacgcaccgatttccaggaaggctgcccacgtaatctctacgagaatgtgcacagtaagatcttcacactcccggaaaactttcgcatatatccggcgcacgactataaaggtcaaatggaaagcagtgtgtgggaggagaagcggtataaccccagactgactaaggatattgaagagtttgtcaaaatcatggaaaacctaaatttaccatatcccaagaaaataggtggggataccattctcaatccgaagggttgtggcagtgccgtcaagtacagtctgcactcgactgcagagacgaaccaggagactgccagtaccacgaccacctctacccattgttccacaactggaagaaggcgcaagggtggctccctgggcggtactctctcctcgcgatcgacgcgcagcgaatccaaggaattgcgatcggctcttcaggatcgggaggctgtcatccagaatctgcgtatacagctttgtctgggcaaactgccacgtcccacgggaccaccgctggatgagtccgagaagccggcggctgagcaaaaactaaacagactgaagacggaggcggagaataagcgaattaagatcaagaacctgaagagtgccctggagaagctggacatcacagacaacatagacatccgcatccgtcaagccgaattggaatacgcactcggcagagaagaactccagatgctctcgattgtggaggaggctcgcgccttgcaggcacgtctggaaaagtccaagcccgaggcgcagaccctctacaacatcatcagctctggagtctccctgagtctgcacgccgtgcatgccacctcgggaagatgggcagttcaacagaggacagaccagccgggtttctacgtagaatgggctttagagggtgatggcttgtacaagggcgatcgcattttggagatcaacggacgactggtaaccggaaaatccaaggaagagctgcagaagcaagtaggaaactctggcaagtgtcagatggttgtactccgcaagaagtccgtacctataccacaaaagcaactagaccaggagaaggagaacaacatgaggctgcagcatcgcatatcgtacctggaagagcaggtgcgagaactgcagacagtcaaggagcatcatccatcgcaacagcagcagcagcagcagcagcaacagcaaaatccacagcaaaatccacagcaaaatccacagcagacatcctccaatcaatctcagcatgtgaccagcatcagcatatcatcacctccatcaacaccgcccgagaaaccgttgatctttcagcggggcaactatattaccactttggtggggggcaaacccatcgagctgatgggtgacgacatggcctcgacacaaacccctcccggacatgtaaccaaaacactgatcaaggagaatacccacatcgatttgagagatcgtctgtcgcacatgtactccatgccctccaaatcgctgtccgcctcgaagatctcgattaatagcgattctgcctatatgcagcaccatcgacgtgataaggagcgccatcgcgatcgccagcaccgggaacgccccagagatcctctccagcaacagcagcaactgcatcgcgaacatctcatgagcacgcacgcacgcagtgtagagcacctgaatcattacaatggactggatcgtcgccgagacacgccccgacaaagtgagtcgaacacacttcgagcccgcctgcccagcgatatgaggagtgtaaaatccctggatttcgatagcgaaaacgaatcgaagcctgcgactgagacgcgtaccactagacccactccgcccaagaaacccctccggctatcgctgcaacgagcccaaagtctgcagaccgtggagctgcacccctgtgcggatatcgaacgaaagcggcccatgaagagggtccaccacaacaacaacaacaacaacaaaggtggagaatcaccgactggagagggccagaccatgctcatcgagaactgcagtcccatgcacacggcttccctcggcaggcacaagctcatctag

SEQ ID NO: 19311 - protein, 865 aa, DROSOPHILA
MLAALKRLSTNQPPTLVSNIRYLSSFGTMSLPERQPFSPDFFFRQLFDGESSTYSYLLADLKNGQAVIIDPVLEQAKRDAQLVKDLGFELKYAINTHMHADHITGSGWLRKLTGCQSVIAAASGAKADRHLNEGDRIDFGTHVIDALATPGHTNGCMTYVIKDQGCVFTGDTLLIRGCGRTDFQEGCPRNLYENVHSKIFTLPENFRIYPAHDYKGQMESSVWEEKRYNPRLTKDIEEFVKIMENLNLPYPKKIGGDTILNPKGCGSAVKYSLHSTAETNQETASTTTTSTHCSTTGRRRKGGSLGGTLSSRSTRSESKELRSALQDREAVIQNLRIQLCLGKLPRPTGPPLDESEKPAAEQKLNRLKTEAENKRIKIKNLKSALEKLDITDNIDIRIRQAELEYALGREELQMLSIVEEARALQARLEKSKPEAQTLYNIISSGVSLSLHAVHATSGRWAVQQRTDQPGFYVEWALEGDGLYKGDRILEINGRLVTGKSKEELQKQVGNSGKCQMVVLRKKSVPIPQKQLDQEKENNMRLQHRISYLEEQVRELQTVKEHHPSQQQQQQQQQQQNPQQNPQQNPQQTSSNQSQHVTSISISSPPSTPPEKPLIFQRGNYITTLVGGKPIELMGDDMASTQTPPGHVTKTLIKENTHIDLRDRLSHMYSMPSKSLSASKISINSDSAYMQHHRRDKERHRDRQHRERPRDPLQQQQQLHREHLMSTHARSVEHLNHYNGLDRRRDTPRQSESNTLRARLPSDMRSVKSLDFDSENESKPATETRTTRPTPPKKPLRLSLQRAQSLQTVELHPCADIERKRPMKRVHHNNNNNNKGGESPTGEGQTMLIENCSPMHTASLGRHKLI

SEQ ID NO: 19312 - DNA, 2597 bp, DROSOPHILA
ataaaaatcaatatattttttatgaccctagcgactgtgatgtgttgtaaattgatttaatggccaaatgctcactttgaagctcgagagtgcgttataaactgacatcgaatgaagccgggcccatttacgcaagttgactgtacaaacgccatgcatttgagacaactccttaccgaaatgggtaagcaatcgatgtacaacaatactacatttattttatattagctgttcttaattttgaagttattatcttgaccatattgaccattcctggctataccattcacaccttggcagagaagaaaatcagccaatatccttggatcccgaagacgtcaacgcatattacaccttataagatatctggggatatatgaaatatgaaatgtgttattatgtatgaataaatttcgacgaatttgtctgcccaacaatatattctaaataaatgcatattttaaaagatactaagagcgcatgaaataaaagtttacttcaataagcttgatatttttttaaaaaaaccaatgtggttgtgaatgtgcagaatatacctggtatttttagattatttttttataagcacattggactctcaatttatttatgtatatttccaacctaatattccgtgcaataagtaattatccaaaccaacttggatatctctacaacttactaattattgacttccatcaagcatcttttaatgaatgtaaacccttccttagttaatttatccgaagccatcagaatgatcaaacctttttagttttcaaacatttttttaaaaatgcacttgcaactgcatcagtattgattatgtcctatcagagaaatgctaaacaggcctgaaagaattgaccatatcagtgagcatggcgagcaataaatctaattgattttgatcgccgtttgatggccatacttgaagcaactactggcgacctataaaagagggaacgcaatcatcagtcttcagttcagtttgaggatcatgaaattcttgaccgtatttgcattcgcctgtggtaagtagtccgcacgacttggccaacgtttgataaactaaagataggcatcgttattctgttagtggcaacatttgtggtgctccacggcgcctacggctcaccactgccggagcccattcccgatccgagtccggtggccgatccgagtccggctgccaatcccagtccagttgccgatccgaagcccgttgccgagccatctgccaatccagggaccggaaccaacgcagaaccaggtccgaggagcaaaccgaatcccagtccctcggcaccagcaactcttttggaagccaataagcaagacaactttgcggttccgctcctagaaactgctccgcaaaagctggatgatgttcaggccgatccccagccggcttagtgggtgcatgaccccacatcaaggagcagcagcagcagcttaatccaactggagcctgcacacccacacacaagggagacacgcacacatatatatattaatcttctgtattcaatgtatgcatttatgtattccaacttctagcatgggcattaataaaattgcaaaaaaaatatttaaatactttttggtcatatttctatcccccaaaaagaagcagatggtatctaaactaagatatatctttcaataccattatgatatgcgtgatgttatgaatcaaagataaataaacattgaatcagtacataaattaagcaccacctctgttaaccgaattcaacaagccgcgattttagggaagtgacgcggagtatttgctacacaaatccatttcccacaacaacttccgccaggcagtcagacagtccactgggccacggcaatcacatgacatcgacaccggccagggagagaccaagtgaccaagagaccagccgaccagatccggccagccagatttgcgttggtataaaaaaaaaagaagccaccgagactggggggaaaaaatcgcttacaaagaggaagcgacaatgaagtcagcagtgtaaggttgacgacgccacgaatgccggcaatccgaccacaaagacaatgtcttggatgccaaccggcattggagggcataaaaccacacgaaagccccattgatcggggggcatcgtcggttaatccatttgtggggcatcattaccaccgggtttattcatcgcatatatggtatgtaaataggtttatttgcatctttcttttgcctcttccgacgatcgtaaattttaactcaactttagttcgttctcaatcgttaaggcagtgaacaattttgagatatcaatttacatgttaacacatctcgatttttgaatgaacagttgactgacaaattggcccaatcggttgtgaatgaaccgccatagtattgaaagccattgataacgatttcagattcgaagaactatagaaaagtaaacctttgatggactagaattggcaagcttcaaatgatagtcaatgagttagaatgttcaatttagtttttagcagttttcgaaattttgataagtagttaagatacatctttagcattcagattcagataggattaattctttcacatattt

SEQ ID NO: 19313 - DNA, 532 bp, DROSOPHILA
atgaaattcttgaccgtatttgcattcgcctgtgtggcaacatttgtggtgctccacggcgcctacggctcaccactgccggagcccattcccgatccgagtccggtggccgatccgagtccggctgccaatcccagtccagttgccgatccgaagcccgttgccgagccatctgccaatccagggaccggaaccaacgcagaaccaggtccgaggagcaaaccgaatcccagtccctcggcaccagcaactcttttggaagccaataagcaagacaactttgcggttccgctcctagaaactgctccgcaaaagctggatgatgttcaggccgatccccagccggcttagtgggtgcatgaccccacatcaaggagcagcagcagcagcttaatccaactggagcctgcacacccacacacaagggagacacgcacacatatatatattaatcttctgtattcaatgtatgcatttatgtattccaacttctagcatgggcattaataaaattgcaaaaaaaatatttaaa

SEQ ID NO: 19314 - protein, 116 aa, DROSOPHILA
MKFLTVFAFACVATFVVLHGAYGSPLPEPIPDPSPVADPSPAANPSPVADPKPVAEPSANPGTGTNAEPGPRSKPNPSPSAPATLLEANKQDNFAVPLLETAPQKLDDVQADPQPA

SEQ ID NO: 19315 - DNA, 4532 bp, DROSOPHILA
catgcacacggcttccctcggcaggcacaagctcatctagaaacccgatcccaatccaaccaaaactaattgttaatcgaagtagcttaatcctcgaccgatcctaaccggcggttaaacccaaaaaacaggcggacatgtgcaaaattacagtaggcaatataattttaaccagctcccaagtggaaagtttcttattatgtagtagcagtagtatgtacttacattctatatcttgtataagtagggcttggctatcaacatttagtattgagagaatcaataattaagagtttttgtatgtacgatgattttattagcacaatttacaaatgtgaatacacgaatattttcacctacttaaatgcgttatttatttaaaaaattcgatcccggcctgctataaatgtgatgtaactacaatttcatggcatcggttggcatatcagaagctattacctggcaactcattttcaaagaatttgtagcagtagttcttcaaattgcttcgccgtatctggaaagcatgccaatatttacgacctccattgtaggcacgagcctggcacatattttatgacgccacagtgataaggtattcaaatgaaaagcacgttagcgtgtttcagctgcgcttttagtaagttcaaagaattacttaatagctataatttggatataattaaaaaaaaggccgttaataggataataaatatatcatcagagctggacaaaagaatctgatcaatctgcagttgataaaaaaaactcaacgagggagatagagcgatagagcggtgaagtaagcccgagataaacctgagagcggaactctcgcctacgcgatcgtgctgaccgccaaatgcaatatccgccgctccacctggtggcgctctcaattctcaattctgcggtcttcttgctctcgccaaatctgccccaatgttctctcagcgagtcgatttgcgatggcaatgccagaggctcgaaacagttccgtcgcaggtttccaacggtacagaggtgcaatcgcttaattctcgcaaaaaacaatcagtacccaattataaaatagttgctaacaaggtgagtttgcaacggacgcgaaaaaaaagaagatcaagggctagtaatcgagaatattgggtgaaggttaagctgaagttgaagttacttgagttaattgtaattgttaattgttcataatttattggtttgcttacattttagaacctgatttagatatattacccacaattgcgtgttaccaaaaagaaaccagttaccgcaaaaacggagtttacttcactgatttttgattctctcattcactgtccgctcacccttgagtgggttaaggtaaccagttattaatccagaaaaatgagtgggcaaaaatgcagcacagaccagacacaaaatattgtacatatccattacaatccacacattccacggcttaaaacttcaataaacatttaaattcccaatcgtgaacagttggttgaacaagtgtttacgatattctatcttttcatatatgtaaaattatggcttgttcttatctcaaaactgcatagcttcggcgtttaaattagacgcgaagtctctgtgtgtgaaatcaagtaatcttggctgtattgtttgcaaattcacgaagagagccctgcgatcaaattgttcagataagcatcttcattagcatatcgtttcacggtaaaactcaaactgagttattattttcaaatcaatcatatttaatcagcaagcaagagccctaataaaccttatttgatggacaagcagtggctattagttgcaatttgtgacccatttcgtgacagtttgaaccagaataagtaaatacctggcaaaaaacagattaaaatacttatacgtaatgacaatggcatttttagttccgaaattcagtcgctctacgagcgtgagaatcgtaaattatgggaccgattccaagtgcagataaggatacgtgtgtagagcaggtactgaccgcgtttgaagatcgtttcagaactcgagcgtgcaagatcgccagcatatcgcagacacattgataagaccgtaaggaaaccggacccataaacaaatattgccccgataaagtgtgacacccatccatttcatttgtggaactttggaagcgaagtgcgtacgaaaaagagattgttgattgaccttcccgcagccgcacttaaccctgtgaaaaaggctgtttgcatttagtttcgtttgggtatcgctcattattcacacacataaataataatacccgttcgcacatcatatatgacccacaaatcgtttcataaattgaggctaggcgcttcaattccgcacacaactgtccgtttaaatggaatcaagagaatgtacacctgatgacgtccaagccagagatgagctggaattcaagtgccagagatgagttggcatcacggaatttgagattacaagacataaaccctcctagcatttcccaaaactgaaagtatttggttccaaatcatttaaagctttactataaagcattatataaatagttttggaagatgtttttaatattgagtccatatcaattatcgaaatttcaggattatcatttagttcatttttagctatgtccagtagatcatccctggtgggattttctctgcttgtgccactcaatttaaaattatttatttatagacatttaaacatttctaacatttgctatccgagtcgtacacgtgtctaatttaactatgatttccttgcagttcaaaatgatgcaatatcttgttgttagcctggcactctgtgccacaatttgctctgctgcgcagacggtaagatatataatctcgttaatttgaaaatccacttataattaggacactgaacttactttgcagcgcaatatgcccattcaagccattgcctatctgattggacccgtgcaatcggataatacccaggtcaagggcaacgtgacctttacgcagaacgactgtggccagaatgtccatgtgcgcgtccagctggagggattgaaggagggcaagcacggcttccacattcacgagaagggagatctgaccaatggatgcatcagcatgggtgctcactataaccccgataaggtagatgcgggattctttataggattaggtgtctaaatcactaatataacttttatgtctcaggttgatcacggtggccccgatcacgaggtgcgtcatgttggcgatctgggcaacctggaggccaactccacgggcattatcgacgttacatacacggatcaggtgatcaccttaactggcaagctggggatcattggcaggggagttgttgtccacgaattggaggatgatctcggtctgggcaaccacacggattccaagaagaccggcaatgcaggcggccgcattggtaagtagtcagtgtaaaataataaaataataataataataaaatatttgttttaaaccttctttcagcctgtggtgttattggcatcaagtaaatatcccttccaacgtgtcagccaaatcaatatgctgctcgaatactttatgtgtagttgtgtaactccaggcgtagtaactaatgaaatgttttcccaattttcccaattcccccacccacaatcacactcacccttacatgtttggcttacacatttccctcaattaattgtctcagttcactgactcactcgatttgccgtgtgtgtgtttgtgtgtaataaaatcaacaaaaattaaccgaaatctaagctaaacattagcatactctgtaccacttgtgttctaccacctcatattcatggcctaaacaaactttcgcgctttgctggggttgcttttccgagtgggtaggtatgacagagagcctttttacctatcatttttactaacatcattagcattagtcggtcggtcggtcggtcggtcggtcggtcggcgaagagaaggggatattggaataacaactgccgctggaatcggaactttactgatccaaccagggttcaatcaaaaaactcacattgtatgttttccagtggcccatctgtacctgcacctgcaccaccaacaccacgccatcagccactgtactatgtgccccatggggagccacaagatcatgttgtctatccactccagcactatcctttgccatacccacacccatatccatatccgcacccatacccctatccgtatccgttgtcgcaccaattgtatctgtgagatcgcgagactacaccgttcgcctgttccaccttctaattgcagctcggatgtggacgagtggccatgtcgcgatggtggcgccggcgccctgcgctactccttctccatcctgaccgtcatcgtggccctcatcatggcccgcagccttgactaatccgaaacatgcacccggatcggatcgaatgcacgcatgtggcatgggattgttggccatcgtagtgatctgcatacctacttacacactaaccacacaaccatgagtcgcac

SEQ ID NO: 19316 - DNA, 632 bp, DROSOPHILA
cgcaggtttccaacggtacagaggtgcaatcgcttaattctcgcaaaaaacaatcagtacccaattataaaatagttgctaacaagttcaaaatgatgcaatatcttgttgttagcctggcactctgtgccacaatttgctctgctgcgcagacgatgcccattcaagccattgcctatctgattggacccgtgcaatcggataatacccaggtcaagggcaacgtgacctttacgcagaacgactgtggccagaatgtccatgtgcgcgtccagctggagggattgaaggagggcaagcacggcttccacattcacgagaagggagatctgaccaatggatgcatcagcatgggtgctcactataaccccgataaggttgatcacggtggccccgatcacgaggtgcgtcatgttggcgatctgggcaacctggaggccaactccacgggcattatcgacgttacatacacggatcaggtgatcaccttaactggcaagctggggatcattggcaggggagttgttgtccacgaattggaggatgatctcggtctgggcaaccacacggattccaagaagaccggcaatgcaggcggccgcattgcctgtggtgttattggcatcaagtaa

SEQ ID NO: 19317 - protein, 179 aa, DROSOPHILA
MMQYLVVSLALCATICSAAQTMPIQAIAYLIGPVQSDNTQVKGNVTFTQNDCGQNVHVRVQLEGLKEGKHGFHIHEKGDLTNGCISMGAHYNPDKVDHGGPDHEVRHVGDLGNLEANSTGIIDVTYTDQVITLTGKLGIIGRGVVVHELEDDLGLGNHTDSKKTGNAGGRIACGVIGIK

SEQ ID NO: 19318 - DNA, 2741 bp, DROSOPHILA
attctgggcctgctcgcaggccatcaaatccaaacaaaagattgtcaagcgggtcacagcctgagcagttattgttatgagagtttaatgagctggcagccagccgggcgaacagtgcccacttattcgagaagtacgcgacagttgcttatgagaaattttagctttaggatcaaatgtgggatgggctatcgatttctcctactggcgtcattgtcacatctttttggatctcagcggcagtacggtaggccgtggggtggattttaaagccataaagcctgggaaaacatagttacattagttatacattattagtaactaccttaaaaacatagggaaatagaaggaaacacaggaaacggaagatctaacctgggcacaaacttctgctttgcccgcttgggcctagcatccggtttctccataaagaacatatgagggaatccagtgccaaagaaggctccatccagattcgaatgtctcgacgccttgggaatgtacacatcattgcacttggggcaatagatgcgtaccatatcctcgccaggattatcactcaaaccaatgggcagcaccggctggctatggcagaatgcacgtggacatgtgccgaattcgcccttgttgtacttgtccaacatcagttcgatgcccctgttggttaggataaagcgagcatggatcaagccatacagtttctctgcactagcctccagttctggttcagcggggtcttccgaagctgaacccggattaagatccaggatcacctccaaggcacatttgtagttcttaacgttcgaatcaagaaagttaaggttaaacttgtcctggatatattcctcatccacctcgcaaaagaattcgttgccacgctgcttgcaaaaccaatgaatccaggaagattcgtccgaatcggtcatagctgcttcttttaagctttaatttaatcagtcaaaatcacgagagcttaacaataggacttatttaatttcgaatgacagctgtcagggacggagtgttcaatcaagggttgtcaactcaaaacgaaaactgtaatgtaaatgcaaccctgaattttcattcccaggcttttacatccattgccctgctcgtgtgcctggctgcctggacccatgcggaaccaccagttccccagaaccagtacctgccccccaatcagtcgcctcaggcgccgtccaacaactacctgccgcccacgcagggctaccagtcgccgtcgagcaactacttgccaccccagcgggccggtggcaatggaggagcgcccagcaacagctatggcgcccccatcgctcctccccagggtcaatatggtgctccagcgctgactggtgccatcttcaagggcggaaacggaaacggaaacggcggctatggcggcggtaatggcaacggcaacggctacggacaacgggatgaggagcagtatggaccggccaagtacgagttcaagtacgacgtacaggactacgagtcgggcaatgacttcggccacatggagtcccgcgatggtgatcttgctgtgggccgctactacgtcctgctgcccgatggacgcaaacagattgttgagtacgaggccgaccagaatggataccgcccaaccattcggtacgagcaggtcggcaatggcaacggaaacggcaatggcaatggtcgcaacggtggcggttatgatagcaacgcgcagcagggcaaattcaacggctactaagatggggaagtgaggatacccgatttaggtcgaccccgcaactatactcgtctacttcatgggatcgctggccgagtattaaacgcacatccagccagtgggccagcgatcgcagtcagtctatccatataaccctattcccatctctgtgcatacccttagtgggacgcccgccattttgccatagacaggcgcgttcctttccgtttccgtttcactgctgttcgttatcctgttttccgtctctacacctggaactccttgccgttttgttttgtttaagcgccttcattttgtgttagtctacgcacacactccaacacaccattcacccacaacatgaccattacgcattcatacatacatgcataaggattgtatttagtttttaaacgaaaatggaaattcgaaagtgaaacgaacttatgagatttttgtgtatatttaataattattaaatgaataaagaagcatttttgtataaaacaaagtcaaaaagaaaaaccaaactgtttttataattaacaagataattcattctgagaattgaatacattgcacaactctattttacatattcaaatagctatatccaaattgcctacttcaggacccgctccagttgtccctgtctgttgtatcgatacacaggatccttgagttgccccacagtggagtaagtcaactgagccgtaaaatcatctgcatctgcatctgcgttttgctgggagctgaaagaaactctttgtagtttattgtcctgcgaaatgacgaagtaacgtccctctctgattttgggctgctgattgtctacgatattttttgcagtaactggctcctcatcatcaggataaatgattttaaatttcggatctgccggaccgtacttgttggacggtcgtgaggtgggcaaaatctcttcctcgggtatatccagttgatttggaggcaaataatttggctggggcttttccactggatcgaactggtccactcgtgc

SEQ ID NO: 19319 - DNA, 741 bp, DROSOPHILA
atgacagctgtcagggacggagtgttcaatcaagggttgtcaactcaaaacgaaaactgtaatgtaaatgcaaccctgaattttcattcccaggcttttacatccattgccctgctcgtgtgcctggctgcctggacccatgcggaaccaccagttccccagaaccagtacctgccccccaatcagtcgcctcaggcgccgtccaacaactacctgccgcccacgcagggctaccagtcgccgtcgagcaactacttgccaccccagcgggccggtggcaatggaggagcgcccagcaacagctatggcgcccccatcgctcctccccagggtcaatatggtgctccagcgctgactggtgccatcttcaagggcggaaacggaaacggaaacggcggctatggcggcggtaatggcaacggcaacggctacggacaacgggatgaggagcagtatggaccggccaagtacgagttcaagtacgacgtacaggactacgagtcgggcaatgacttcggccacatggagtcccgcgatggtgatcttgctgtgggccgctactacgtcctgctgcccgatggacgcaaacagattgttgagtacgaggccgaccagaatggataccgcccaaccattcggtacgagcaggtcggcaatggcaacggaaacggcaatggcaatggtcgcaacggtggcggttatgatagcaacgcgcagcagggcaaattcaacggctactaa

SEQ ID NO: 19320 - protein, 246 aa, DROSOPHILA
MTAVRDGVFNQGLSTQNENCNVNATLNFHSQAFTSIALLVCLAAWTHAEPPVPQNQYLPPNQSPQAPSNNYLPPTQGYQSPSSNYLPPQRAGGNGGAPSNSYGAPIAPPQGQYGAPALTGAIFKGGNGNGNGGYGGGNGNGNGYGQRDEEQYGPAKYEFKYDVQDYESGNDFGHMESRDGDLAVGRYYVLLPDGRKQIVEYEADQNGYRPTIRYEQVGNGNGNGNGNGRNGGGYDSNAQQGKFNGY

SEQ ID NO: 19321 - DNA, 3380 bp, DROSOPHILA
ttgtatataactattgcagtttggcactataggactgcaacatatttgtactatattacgagcccttcctttttcttatactatccgacaggggaaacaaacaaaatcatttcagaccataaatataagctgcaaaaggcggaacaggaaatcgccaacctacagtcgagcctagcgcgctccgaaactcaagtaatccgatacaaaagcaccgcagaagctgccgaaaaggcggaggctgagctgaagctggagcgccgcaagctgcaacgcgaggtgagtggtgggaatgccaagcgaaatgagcagtttatgatctagctaatccatttcgcagcaccgggaactcttggagaagttggaggaagctgaaacgtccaacaaccatttgttgaaacgcctcgataagttgaaaaacgcaaagagtgccattctaaaggacttatgatctaagatgggaaatgcaatctcgccaaccattgaaggatcgcacccgatgacataggaaacgcaagtacacgacatcatcaacacacaaatcaacatgctgcaattgaaatagcacttcggtagcaatttaatcggtcttagtggtagcaaatcgataatttttgaaggataatccaaaatactctaccttaaaaatatatatatatatatatttaaattaaaatataaactaactggataataattaacataaataatgtctatatgtgtatatttaaagcgcaaaatataagtaacaattcaattggttcagcattatgtgtataaaatcattctatacaaatatgcgttgacaaaattatagcaagaaacctatcactgatcccaattaaaaggcttctggtgaacctgaccaatagttcttttcaaaattacaatattctattgagtctatatttaaatctttgctagaagtccgtttcatcggtcgcgatctctaaacggaacgcccaaataaatgccacatttaagaacaattaaaatcatcgtgtttaaataaattacatttatttaattttatttatttttcatgattttacaacattgcagcttcggcggatcttagttgttgcgaatcattctcgagtggccactgaaaagcatctaggattccgattgggtttgacgctctgcggacagaaaaatggcaataatcagcatttgctttggataatagtttttcatcacaaagaaatagttaatagttggtcgcttgtaaacttttggggcgggcaattttgggatatatatatgtatattaatataaacattatattatatgtaaacacatcgcatttgcatgcagatcagcttgtaagcgtagttagaaactttgggaacaaagttagatacataaactgtcgttgagtttaatgcgaacgctgggataatttgggttttgtctgccgcggcaggcacttacgccagtttttaaattattaatttgacgatggaacacctaagccctttcatctgaaaaatatattcaaatatgacgcaatatgaaacataaattctattactttatggagcgtttgtcttgaaggaatggtaagcaattttgcctaattttgtttcgatattccaataagttacgaaaattttgaaattaaagttttagaaatggtttggatgagtatgaacgcttcaatgttgatgatcaggatttaaacagattgcaaatatatatgatatatgcaataatatacgaatatctatagatgggaacagtttttacacgcgatattacgcctgtaaattggcaacattttcggagtaaagtgggaacacgagtgaaccgttcatttttcggtatttttcacattgccatttcgaaacggggcttttttccgaaacttttgggtagaataccgtgtggaaaccacttgtggatgacttcgaaacattcctaataacacattgataacggtttccccttggatttcgaattatccggagttaatttatataatggctgctatttggccgtctaaagtattatgatacgtacgagctggcttgccatttgcccagggagtgaacttcacatggctcgcgtcgcgcttggcggcatccgcacgcagtcccgtcttcaaggactcgcgcaaaatgcgagcggcgatgttggagtattggatgtagctgcaatcggtaatatttggattaattatgttatgtaatcgggcagcaaaggcgtttttatttgcatgagaatgctgccacaacacagctggtgtggcaggcacttatacaatgcttacgtaattccggcagctctccaggcagtcattgtgatcggtttattcgaaatatattcacgctacacaaaaaatatataagatattccctttctgaatccggtcagtgtggccaactagtttttgagagttaagtcagaaatataccgtcgattgtcgcacatataccttaaatactagcttacgcgcgtcaagatagcgacgacgactgtgacttctgttattgaacatacacactgttagtaacatttgttatcgatatccaaactcaaacttttcaatatttaaaaatctaatttacttatttttcttcctttgggaaaaaccctaataaatatggatatgccaaactgttttattcgaaagaacgaagcttgttacttattcatgcctacacaaataattaagcagacattgtttaacgtgccttgcataaagcatttcaagaaaaattgttacattaaaccatcaacttaaaaaaaatattccccaattttccttgaaatttgtttttagttctaggctaattaatcaaataaccaccaatgcacccaaaataggataagctaaggatatattagattatttatttatcattgactttaagttagactttacagataatattttaaaacttaacagaagaaaacacttaagttctaattaaatgtgtatatatacagaacaaaaatttctttaatattctttaacgcattaaagaatcgatctgacaagtaattgctgattttatttagtttttcggtagacgcacacttaaaagcagaacgcaatgggaaaattacttattcttgcacataattagttttcaatattttcgacatatttgaaataagtgttgtaattacccattctctaattaggttaacaagtccggtttctaaaagcaattagcattgtattcgtatattacatgttataaatatgcagtctagcaactttaatacagagtatacgcattttgcacatgctcatgaattcctgtgtggtatatatataaaatatatattgtatgtacattaatagttgaaacaaagcgccttgttgatccagacatacattattatagtttaataaatatacttctgactgcac

SEQ ID NO: 19322 - DNA, 380 bp, DROSOPHILA
gccacactgaccggattcagaaagggaatatcttatatattttttgtgtagcgtgaatatatttcgaataaaccgatcacaatgactgcctggagagctgccggaattacctacatccaatactccaacatcgccgctcgcattttgcgcgagtccttgaagacgggactgcgtgcggatgccgccaagcgcgacgcgagccatgtgaagttcactccctgggcaaatggcaagccagctcagcgtcaaacccaatcggaatcctagatgcttttcagtggccactcgagaatgattcgcaacaactaagatccgccgaagctgcaatgttgtaaaatcatgaaaaataaataaaattaaataaatgtaatttatttaaa

SEQ ID NO: 19323 - protein, 61 aa, DROSOPHILA
MTAWRAAGITYIQYSNIAARILRESLKTGLRADAAKRDASHVKFTPWANGKPAQRQTQSES

SEQ ID NO: 19324 - DNA, 3012 bp, DROSOPHILA
gggcgacccacaaaacgcaaccaatcgcctcgcctcgcctcgctgctttggtcaaagttctttggtatcgaatgctaaatcaacagtgaaataagccagcacggagttccagcccctatagtccatatagtccgtcataggcccatgcccgatccctattccgattccagcctaatcatgcctggcctaaattcgaatcgggcctccaagactttcactcgctttcgcttttgttccgccgctacccattgctagccgtaccccaaccgcaatccggatccgttgccaccaccaacccggcaagtggcaagtggccacaacagaaccgggcccttctaaagcccagccggaccgtcgctccggtcagttcgcggttaaactccagtgcggtcagtcgatttgggccatcgctctggatcactaagtcatatcacgcaccaaagcgattctgtatttgaattgatctaaagttgaaataacttgaattagtgcttcgccccaaaaggaatctcaaaatgcgttcttgcggtccgagtttaattaaatatgtcttattcgcatttaatgtgctgtttgcggtaagtgcaagtgatatgatatatgagtaaaatatctaaaggatactgagaatattatgctaaatacaatacattgcatcatactgcaaatcactttgtttctaacaaatcatatgccaatcaaattgacttattgatattaatttcaaaaaagaatcataaaattttatgaaatgacataactattttctgggaattttcgaggtgcaaactgttactgcaattatgaaaacggattgaaccgtccaaacgtaacattctaccagatttatttttgctcgtaattagttctaattcgccataagcactataattacgcttgtgcttggagtcttgttcgcctgcctcatttagataagtatcgctggaaaatggcactctcactcacggaaaatcggataatcggataatgttcaaacgcgatggcctgtaacgacatgcgagtgatgtatgcgtgctccaaaggacatggacatcgggtgtccttcgcattgaccaactgcgcaagcagttgactttcaatgacggcacggacttgaacatggaaatgccattgactaagtcgtgggcgatttttatcgttcaattagaatagggaatgtaaatataaatgcctgccatagcaaattaggacatgattggaagccattaactaaattgcttaacggttctattggaggtcgattcgattaatcgaaggtactaaaatttcttacagatctccggcctgggaattcttattgctggtgccgttgtcctggccgatgtgaatgaattcaatcactttgtcgaaggtcgagtccttgcaccgccaattgtcctcatagtcacgggcctgatcatattcctgatagcttcgctgggctgtttcggagcgatcaaggagtctccaacgcttctaattactgtaagttttctagagaagctcccaagaaatgtcctaacccattcgaatttcattaacagtttgctgtccttttggccgtcatcttcattgtggagctggccgtcggtattgcggccagcgttttcaagaaggatttggagggaatggtgaagaactcgctgcaggagtccatcaagcgatcgaacagcgaagacaccatggcatgggacaacatccagcagaagttgatgtgctgcggagtcgactctccggcggactggaggacactcagtgcgaacaaaacgctgccgggcagctgttgtcagccgcagtacatcgactcgaccgtgggtcactgcctggagtcaccggctctcggcaaggataagtacttccaggtcggctgtgttggcaagctgaaggatcgaatcgagaagaacgccatcatcctgatcggtgtgggcatcggcattgcttttatccagattttgggcatcgttctggcctgctatctggccaactccattcgacaggagcgggccaagtaatacccatcgaagcaaattacaccgagtgtatccctaaatataattgatagctgtctaatattatatagttgaaattcttttaccgttgaattctgctcaatttacattacccttatccattaaacttaccctcaacatcgaaggatgcacacatatattgatgaaaaacgcaacaacgcatatcagattaaaccattttcataaacttcgtttcccaaacttactttcaaaacccaatctatcttattgttttcaaagatctatcttttaaagtgcatttttgtaaaaacaaccatgtttcatttaaatttgtttaccgaatgcatggaaaattgttgctttgtaatatcgaataaatattatccatatttatcaataaatattacccaactaccgtcttagccaaaaagttcaacaatctctggctttgaggtgtcttctagtactctttattgttaaggatctacgttgggtctacaattattggccaggctcagcgtccacataagcttgccatacagtaaatacgggttcaatgggtctacggtaccatctagaactacgcgtggacgccggatatggtgtctcagcgaggtgcgattgcgttttaacgagtgctccactactgctactacatcctctgggggcaaatgcaattaaatggtcggattccatggaactggaacttggtttcccatccgtcagttccctacttgctctggagcagagcttccgagaggcgttcgatggccgtgactggaggcttgcgaccatccttttcgccgctctcaaggattgcggctgcagcagccgcttcggcggcctccgcctcctcgagaactcgggcctcctcctgctcccgctgcttttgaaagtgccggaactcggtgggcgtgagcatacccctcaacaccgtttcatagctcacactgacgcccttggctcccatcttctggtgcaacttccagcactcgcgttccttcagactgcgcacatacgc

SEQ ID NO: 19325 - DNA, 678 bp, DROSOPHILA
atggcctgtaacgacatgcgaatctccggcctgggaattcttattgctggtgccgttgtcctggccgatgtgaatgaattcaatcactttgtcgaaggtcgagtccttgcaccgccaattgtcctcatagtcacgggcctgatcatattcctgatagcttcgctgggctgtttcggagcgatcaaggagtctccaacgcttctaattacttttgctgtccttttggccgtcatcttcattgtggagctggccgtcggtattgcggccagcgttttcaagaaggatttggagggaatggtgaagaactcgctgcaggagtccatcaagcgatcgaacagcgaagacaccatggcatgggacaacatccagcagaagttgatgtgctgcggagtcgactctccggcggactggaggacactcagtgcgaacaaaacgctgccgggcagctgttgtcagccgcagtacatcgactcgaccgtgggtcactgcctggagtcaccggctctcggcaaggataagtacttccaggtcggctgtgttggcaagctgaaggatcgaatcgagaagaacgccatcatcctgatcggtgtgggcatcggcattgcttttatccagattttgggcatcgttctggcctgctatctggccaactccattcgacaggagcgggccaagtaa

SEQ ID NO: 19326 - protein, 225 aa, DROSOPHILA
MACNDMRISGLGILIAGAVVLADVNEFNHFVEGRVLAPPIVLIVTGLIIFLIASLGCFGAIKESPTLLITFAVLLAVIFIVELAVGIAASVFKKDLEGMVKNSLQESIKRSNSEDTMAWDNIQQKLMCCGVDSPADWRTLSANKTLPGSCCQPQYIDSTVGHCLESPALGKDKYFQVGCVGKLKDRIEKNAIILIGVGIGIAFIQILGIVLACYLANSIRQERAK

SEQ ID NO: 19327 - DNA, 2426 bp, DROSOPHILA
tactggtagggtgtgccaaaatatatacaaatataccagaaggaattcaagaaattataaaaaatcgatgatttgattaataatcgattacatttactagccaatttataaacaaaacattttaattcaaattttagattgtgaataacattccttagcaacaaccataatggacatattcgagagcttctgtcgcacgtgcggaaacgaatgcctggaatcgctgtccatttacaatgagtgtgcccaagtgcttgaccagatggtgcccattgcggatatgctagcgtcctgcctgcccgcctccttgccgccactggacccagaggacgactatcccaaacagatctgccgcatctgcgtgaagaagctgtcgatggcctacgagttcagccaccagtggctgggcgcccacggcgagttcaacgtggccctaaagttcgagcagcgccgaaggcgcagccaggccagcaaatcccagtcgcacacgcaaacccaaactcatccggtggaaccgaagaatgagcaactgcccacggtgctggcggaagcagtgtcgaccaaaagaggtgggtgtacaattttcttatctaggctaggtagatttcaaacttctcaatcttccccagcagctgctactcccaccaacgagttcagcagcgactccggaccggccttcaagtgcggcttctgcggcgaatgtttttacacggagaaggcctgcaaatttcacttaaagttctcgcacaaggatctttagagaactgtctgttttttcccttacttgtaatttggttttaagtgtataaatcttttgtgaaattaattttaaattaggaatatatatatatattccttctctttatacaagtgccttctttgagtttttaaacccaaaacgttgcaattgtagggatatagagtgcatttgtgtaagtatgaaacacaaaaaaaacctggaaaactactacccgctatagttgaaccactgaacactggcttttgtacatttggatgtttgttttacttagctttagagtaaacaaaaaaaaatcaaagatgaaagccgacaggatttttccgaagggtccaactcctctagtcatcctcgtcgttgcgcaccttcagggcgcgcggatcgtcgtggcggtagacaacgtagccgagcttgtagcgtcggttatcgccgtccttggcatagtagttggccactccgatggtggccataacgattccggcgagggccaaagcggatccgccgacgatgtccggaatctcgttccaggcgcgcttcagcagcgatgtggagcctcgggcagcggatgcggacatcttggtacactgcgggatggggctattagttcactgggcgcagcaaataaaattataaagcatttaccaaaaattcaacgcgttcagttaagttacacaacgaacaaaccaaacagctgattagagctggcctgctggctatcgatactcgctatcgccgcacagatgcaggcaacgaaatttcgatagactgaatattgaaataaaaaagctttttgaattatcttcgtgacaaatgatttattctagaactgcaactagatgtaatattttcaacgttatgtggaaatttgttcgaattttgtttatttgctgcttaggattctttaaaaaaaagtattttgctaaataaaaattttcgccattgagagtacgatttttatattcgtgacttgtcgagtaaaagtgtagactagattcgtttagaagtaaaagaacaggcaataggaagagtttccgaccatcctaagtatatatattcttgatcaggatcaatagccgagccgatctgaccctatccatctgtctttttttacttttcaacgaatgtagtttacaattttgcttaacgagtaacgggtttaattagaaaaaaaaactgatctgattatgaattaattgctatatttttgcgaatgcagacttcatcacgccttctcctcgtagccctcggtcttcatgtcattgaggcccagatcctcgttgtcctcgtaggagcgatcgtaccgctccacagtgagcttgtcatccggctccgagtcgtcatcgctcagtgattgcacataggtattaccggccggatcctccagcaccagcgtaatgactcgcttcagattcatgacatcctcgaaggtgtcaaggaatcgctgcatctgctgcttggtcgcgtcgtcggcggagtcgtggaaaagcgtgccgtccaactgatcccgcatggcaaccagcagaccctccacggtggtgaatcgcccgcacagggcatgcggacccacctcgaggtccagctctggaatagacatgctgcacgtctccgacttgaggacatcacgcgtcagatcctccctgctggcaatctggacgcggaagcgtacacc

SEQ ID NO: 19328 - DNA, 368 bp, DROSOPHILA
aacttaactgaacgcgttgaatttttgtgtaccaagatgtccgcatccgctgcccgaggctccacatcgctgctgaagcgcgcctggaacgagattccggacatcgtcggcggatccgctttggccctcgccggaatcgttatggccaccatcggagtggccaactactatgccaaggacggcgataaccgacgctacaagctcggctacgttgtctaccgccacgacgatccgcgcgccctgaaggtgcgcaacgacgaggatgactagaggagttggacccttcggaaaaatcctgtcggctttcatctttgatttttttttgtttactctaaagctaagtaaaacaaacatccaaatgtacaaaa

SEQ ID NO: 19329 - protein, 77 aa, DROSOPHILA
MSASAARGSTSLLKRAWNEIPDIVGGSALALAGIVMATIGVANYYAKDGDNRRYKLGYVVYRHDDPRALKVRNDEDD

SEQ ID NO: 19330 - DNA, 2849 bp, DROSOPHILA
gaaatgcagtcggtacgaaattactgtgactggaacggcctggactttatctattgactttaaattaaatagatacttacatacatattttaaatgaagtcagcccaacgtaaatgtattgcaaaaggaatcccctcaaagacgttttagacaaggaactttgggtatttgcctaagtacaaattaagccaccaatttgatcaaagttcactttgatgtttttaatatcagcgcaatagcgatctaaagcagaatcctccaaagtgatggattgcattcggtactcgatcatagctgagcaatttttccttaaaacattacaattttgtataaatataatttaataagaattttagtcttttaatcaaagtaagactacaaaaatttaacctgttggtgaagaattctatttgtcattatatttttatttataaatttaatttaatttattaatatttaactttaatataattgttttttatttaaaattcgatattttcaaattatatatttgaaattgaaatcgctagaaattgaattgatatgggaggaaattaagtctacatatctcaatgcccctataattaggaaagatttattttgacaggactgacatcattagtaataactttattccaaataaaatgaatcccatatttttatattttttatgtatacgcacttatttttaatacttgtatatacaaattttatatgaattttataacatttacgtatacgtactaattgctatcatattcgaacgacaaacattcccggagaaatcttaacatatagatgtcattaggaaactacaaaaaaccgctttctaaaactgtatttttagatataacaagtaaaaaatcggaaaaatttaccacgggctactagctattttgtagctattctcgactgagcgttgccatccctggtcacgaccagtgtgaccatcgaactggtacgacttcggcaattttcgtagctgtcaagtgacgtgacgtatgtatggtgctgtcgtggcgttcgcttccagagagaaagaaagtcgcaggtcgccgagttggatagccgtagagttccgcctattccattgattactaaataaaaaccacctcataacttgatcaagatgtcccgtcaactgttcgccatttgcctgattgccgccgtttgtgcgtccggcgtctacggtagctgcaaggccaccgtgagctctttcagcacccaggatgccacgattctgacccagctggcccatgtgggcgagttcacgctgcagtgcagcggagccgctcccgccagcctgttcgccgagttcccctgcggcaaggtggtgccggtggccaaggtgggcgacaacaagtaccaggtgagccagtagtagccccgtcaagttttgtgcaaaggctaatctctgttctgcactaggtgagctgggtggaggatatcaagcagggcagcagcggcaatgttcaggtgcgtctcttcgacgaggatggctatgccaatgtgcgcaaggcccagcgggatggcgacaaggtttcatcggtgaagtcgctgctcgacatttccgtgcccaccaagggtgcctacaagggtccctggatcaaggctgagcttttggccgccttcttggtcggcggattcgcatacttcgccttcaccaccaagggcaaggtgcagtcctaagtagaggatgccttcgtcatcgagattttgaatgaaattcattcgcactaaagtcatgtaccatcaaattgccgggtcccggagatttttccacattttgtacacctaagcatcggatcacccgccgctccaaaataaactgattgaaagaccaaccgaaggaacctagttgagattaatttaattttaatttagagataacttgtacgaatacgcttaaacctggcccgtggagggcgctccattcatggtcgcctcctcgtcggaggagatgtctatcatgctctccacacgcgacggcgacatcacatacacaaagtgctccgtggagccctcggggccgactggcggcgggggtatgaccacggagccgtcctgcggcggcggtggcggagtatctatgctgcagtacttgagattcccagctcctcctccgcctgaatcatccggcggtggcgctccaccgttgcaatcaaagttctccagctctagctccaaatcactgacgattcgcatgcaacgcatcttggcgagcgactggaatttcatgggcatagctcgcacctgccgcgccagactcaagaagaaaagagtgtttgcgtcaagttctctgttggcctgtagcacggcagagacgtcccaatcgctcggaaaacgcggatcgcaaatcttacgcgttttggcgggcgacggctgttgttgctgttgaatttgtggcatttgcattgactgctgctgctgcgtttgtacggaattccctccggagcaacttaggttgatggccgtggtttgcggcgaaggttgtacccttcgcaccttggaggctggtggcgctggcggcggcggcggaggagtgggattacccatgggtaagctcgggcagctgccgttcaaacgattggcgttctgcacttggttggccaggttctggaacaatcccaaaggtgctccagctgccgcagccgctgtcagttccttcttgaagttgtccgccgccgcaaagagatgcggctcgatgatcagacaaccgacattgctgttggttgcgctgccggtgctgcaaccaggcggcgtgatcgtaggtggcaggggaagaccagcagccactgccgccgccttgagcgtggctagcgggaacatctgctgggccagtccgctca

SEQ ID NO: 19331 - DNA, 790 bp, DROSOPHILA
tatgtatggtgctgtcgtggcgttcgcttccagagagaaagaaagtcgcaggtcgccgagttggatagccgtagagttccgcctattccattgattactaaataaaaaccacctcataacttgatcaagatgtcccgtcaactgttcgccatttgcctgattgccgccgtttgtgcgtccggcgtctacggtagctgcaaggccaccgtgagctctttcagcacccaggatgccacgattctgacccagctggcccatgtgggcgagttcacgctgcagtgcagcggagccgctcccgccagcctgttcgccgagttcccctgcggcaaggtggtgccggtggccaaggtgggcgacaacaagtaccaggtgagctgggtggaggatatcaagcagggcagcagcggcaatgttcaggtgcgtctcttcgacgaggatggctatgccaatgtgcgcaaggcccagcgggatggcgacaaggtttcatcggtgaagtcgctgctcgacatttccgtgcccaccaagggtgcctacaagggtccctggatcaaggctgagcttttggccgccttcttggtcggcggattcgcatacttcgccttcaccaccaagggcaaggtgcagtcctaagtagaggatgccttcgtcatcgagattttgaatgaaattcattcgcactaaagtcatgtaccatcaaattgccgggtcccggagatttttccacattttgtacacctaagcatcggatcacccgccgctccaaaataaactgattgaaagaccaaccgaa

SEQ ID NO: 19332 - protein, 166 aa, DROSOPHILA
MSRQLFAICLIAAVCASGVYGSCKATVSSFSTQDATILTQLAHVGEFTLQCSGAAPASLFAEFPCGKVVPVAKVGDNKYQVSWVEDIKQGSSGNVQVRLFDEDGYANVRKAQRDGDKVSSVKSLLDISVPTKGAYKGPWIKAELLAAFLVGGFAYFAFTTKGKVQS

SEQ ID NO: 19333 - DNA, 3290 bp, DROSOPHILA
acacactgttagtaacatttgttatcgatatccaaactcaaacttttcaatatttaaaaatctaatttacttatttttcttcctttgggaaaaaccctaataaatatggatatgccaaactgttttattcgaaagaacgaagcttgttacttattcatgcctacacaaataattaagcagacattgtttaacgtgccttgcataaagcatttcaagaaaaattgttacattaaaccatcaacttaaaaaaaatattccccaattttccttgaaatttgtttttagttctaggctaattaatcaaataaccaccaatgcacccaaaataggataagctaaggatatattagattatttatttatcattgactttaagttagactttacagataatattttaaaacttaacagaagaaaacacttaagttctaattaaatgtgtatatatacagaacaaaaatttctttaatattctttaacgcattaaagaatcgatctgacaagtaattgctgattttatttagtttttcggtagacgcacacttaaaagcagaacgcaatgggaaaattacttattcttgcacataattagttttcaatattttcgacatatttgaaataagtgttgtaattacccattctctaattaggttaacaagtccggtttctaaaagcaattagcattgtattcgtatattacatgttataaatatgcagtctagcaactttaatacagagtatacgcattttgcacatgctcatgaattcctgtgtggtatatatataaaatatatattgtatgtacattaatagttgaaacaaagcgccttgttgatccagacatacattattatagtttaataaatatacttctgactgcacaaaaatgtaatttatacattcatatttgtttttatttcggttgtgggtgtttttttttttttcttttttcttttaatgcaaattagtttaaatattacgctattatataataatttagttacaaaatagagcaatttgtcgaacagcatcgtccagaaccgcctttactattttgtctttgatctaaaagaggaggaaaattcagtaagatgtttttcgtatgcattgcgaatttaaatttgagcagctctttataattgaaaccatatttcttttttttttttttttttgaaaacctaccttgtgaattgggctctggcaaattatcacgtggcactaaatgcataacagtcgttttgcctaatggaagtcccagtgctcctaaggttacattgcaatgaagaaaacgaccttgataaattaagcgcaagatttcggctttcgacacagtttcgtgggtccaatctgcaagatatatgcacaataatgtattacatgggttttcgcatcaaaagtctaactctaaaagcaaaacaactaagaaagaattgattttagaggccaacaagctgacaatatttaaacaaacttcaaaagtcgcatttatttgaaatatccaatagatgccataaatattaaatatttcgtgggttgtatccttgtatccttgtgactatgattaaagcgttctcaaaataaatgcagttcacgcgaaagggtcaatagcatgccatttagaagaaatatgtatatttcactctatttgtattacgtagcttacatacttaatcgttagtgattaaaaatcattcgccgacaaacttaacactaaattcactcaccttctggccaattatcaaatactgtttgtgcaatatcacctgcggaatctgaagggctaaaaataaactcttttgttttaccactaacaagaatgaggcgtaggttaatctgaaaagcaaacggatattattgcaattaaattcttttatatgatatagtttatagtatatcgtttttttatgagagctcaatgaaattaaatgtaagtcctgccaaaaagatttaaagctactcaactaaattgatataaatctgatagctgatttatatatatataaaaaaaaaacatctttgtaaataaatgattcaaagtgcaatatgcactcagctaagagttgcgtaaaaggaatcgaaggttgcttctatctcatgttacgttttacatatatgcatttttgctcaggtatttatgctacaaattgtcgaagtaactgacggcaactattcaatagccagccacccagtgtgctcaataaatgcctaaaataacacttactttatcagatggtattgttcggtgcattttctgtgtggtggtggccaatggggtggtgatattggccttgacattggcgcaacaatgggtggcgacctccgatgggctaaggattccggatccgcaaccatcggcggccaatggggatgagggttccgaggaggtcatcgtgggcgagaagttgctcagctgatgatggggctttccctggtagcgcaacgatgggggcttctggaccagcgcgtacgactgtcgttgatgatgtactgctgctatggtatcggtgcaatatgagtacggcaaaaaggattgctgctgctgctgcgactgctgctgctgatgatgatgttggtgttgatgaagctgatgatgttgatggtggctattgctggccgaggaggagctcttctccttatctttctccctctcggcggtggtgaccagtggcgatgtcgcagaccttatcgccccaaaggaaccagaactggaggcgctcgacgaggatagcgaatacgagcgcttggaactcagggatttgcgcttttgttgctgtcctgctgctgctgcgattgcgatggtgctgcttttatcctgctgttgctgctgttgtggcttctgttgctgttgctgctgctgatgctgatactgttgctgaattgcacttgctgtggttgttggcttctcaatcgaagatgttaccgacatggcgagagggttgcagttcgtatttgtattttgtgtcttcaagtgattcagtaattcactgacttaactgcccatccgaattcgaaatgggcaagtttccaggtcgcatgtaatcagcacaatcaattgccaatgccattttgctatttccatggaacattgagcatttttcgttggcgatacccaccaggatttgatgtaactcgattcgattattcgctggctgcactacaatcgtacataatagaatacgactacatagctcggttgaaatacacttgaattttaattggattgcgttcaaatggcttttccaatgaatccgattgttttgcttctttttttctcaatgttttcttcatat

SEQ ID NO: 19334 - DNA, 1044 bp, DROSOPHILA
atgtcggtaacatcttcgattgagaagccaacaaccacagcaagtgcaattcagcaacagtatcagcatcagcagcagcaacagcaacagaagccacaacagcagcaacagcaggataaaagcagcaccatcgcaatcgcagcagcagcaggacagcaacaaaagcgcaaatccctgagttccaagcgctcgtattcgctatcctcgtcgagcgcctccagttctggttcctttggggcgataaggtctgcgacatcgccactggtcaccaccgccgagagggagaaagataaggagaagagctcctcctcggccagcaatagccaccatcaacatcatcagcttcatcaacaccaacatcatcatcagcagcagcagtcgcagcagcagcagcaatcctttttgccgtactcatattgcaccgataccatagcagcagtacatcatcaacgacagtcgtacgcgctggtccagaagcccccatcgttgcgctaccagggaaagccccatcatcagctgagcaacttctcgcccacgatgacctcctcggaaccctcatccccattggccgccgatggttgcggatccggaatccttagcccatcggaggtcgccacccattgttgcgccaatgtcaaggccaatatcaccaccccattggccaccaccacacagaaaatgcaccgaacaataccatctgataaaattaacctacgcctcattcttgttagtggtaaaacaaaagagtttatttttagcccttcagattccgcaggtgatattgcacaaacagtatttgataattggccagaagattggacccacgaaactgtgtcgaaagccgaaatcttgcgcttaatttatcaaggtcgttttcttcattgcaatgtaaccttaggagcactgggacttccattaggcaaaacgactgttatgcatttagtgccacgtgataatttgccagagcccaattcacaagatcaaagacaaaatagtaaaggcggttctggacgatgctgttcgacaaattgctctattttgtaa

SEQ ID NO: 19335 - protein, 347 aa, DROSOPHILA
MSVTSSIEKPTTTASAIQQQYQHQQQQQQQKPQQQQQQDKSSTIAIAAAAGQQQKRKSLSSKRSYSLSSSSASSSGSFGAIRSATSPLVTTAEREKDKEKSSSSASNSHHQHHQLHQHQHHHQQQQSQQQQQSFLPYSYCTDTIAAVHHQRQSYALVQKPPSLRYQGKPHHQLSNFSPTMTSSEPSSPLAADGCGSGILSPSEVATHCCANVKANITTPLATTTQKMHRTIPSDKINLRLILVSGKTKEFIFSPSDSAGDIAQTVFDNWPEDWTHETVSKAEILRLIYQGRFLHCNVTLGALGLPLGKTTVMHLVPRDNLPEPNSQDQRQNSKGGSGRCCSTNCSIL

SEQ ID NO: 19336 - DNA, 10659 bp, DROSOPHILA
taacttccacggtctgaacaacgatcaatataatcaataccctaatgaaattaattttactatcaagtaaagtataaaatatatatattcggtcattactaatatgtactatgcatatattctatattatgtagacaatacaaaaaaaaagtgttgtttagctggatgaaatgccagaatatgtcagatttttagaaaatggaaataatcgtgttgtttttctatactatacactgcgcgtcatcagattagcgccccccaagttttaaatattttccataatttaaaaggtaaggacaacaaacttttgtatgctgtttaacaccaaaactgaacgcgaaagattataattgtgtattaaaaactgcaattccctactttaaaaacgtttttagaaatctggaatggcattttcagcacgaaaatgccacaatccacactgcaagttcggtaaaaatatggattcaaagcgaaaatgtaaaagttctggaatgaatagaaaacttgttgggatggttggctggaaaggtatacgagggtggtaagccgtacgccactcaattggatcgatcaccggaataaaattcggttggtctacaattactttcgattacctacaagaaatatgtacatacatatatgattcactttgcagacaaatgtctgaagtccttgaaaacaacgccaaactggtgacgcgcagtgtatattaagataactattacatatatgtatgtacgataagataactggcatgaatcagtgttcagtgggttgtcctattatgttctcacacgttgctgcatgtgtgtgcctgtctgcatgtgcaccgcccgctgttcagttacgtgcccttcgaccctttccagccaacccccgccccacgtccattcgccctacgtgccgcacttcttccgcctgcgaaccgcaggtcagacgggcggtccaactttgatgctgtgtgcgtctgattggattggacgggatgggatgggatgggatgggatttgagtggaatggatttaagtgcatcgggattctacctgatcagttcgtgaccctaacgcttgaccccgcgtctaagccgtgaagaaattctgacttgcacatgtctattttatacctctacaacattattacattagttggaatataaatattggttgactcaaagagtatttctaatatttctaaatacacatgcatacataatttgcaataaaaggtattttatttcggttttcatcacatttgagtcactgaaattatgtacatacatatgtacatatgttttatttcgaataatgcaaatatatgtagctagatgacgaattgggatatgatttgtcttgaacttcagagtgatgagatacagtatgtcaagaaactgtttacacatacgatgatgcacatatgtatgtatgatatgtatgtatgatatgtatgtatgatgcataaaagggaaagcaaacaagcattggtgataagatttgatattttaagtatttattactctgttggcttaggcatcttataacaaagcacttgtttttttttttttttagatcgcagtcaaatgagcgacagttcctcaaggacttcattagcggtgcgccaggatcgtcgggcgcccgtttggccgcctggttgcagcctgagtcacgactggatcccaataagtaggtcgcccatttccatattaacaaattaaaaatattgcgttccccactaatactgcgcccttctctttagatgtgagctgaacacaatcacggaaccactgcgctacggttggccttcccaggtgacggtcaccatacgggatcagtatggtgatgcggttttggtgccggaactcaaggttgaaatcaaggcgataccaacgggttcgggtcccaatggcagcgctaccggaacaggaacctcctgcacttctgtggccgaagtttcagcacccggtccgaatctttggatgcgtcgcgcctctagggatacatggggctggggcggaatggcgccaccaccgcgtatcaactacgagcccaccgtgaaggataagatggtattcaaggcgattaccttcatgaagccctatgctaactactcgttcgaggagctgcgctatgcgagtccggtgcaaacgcgagtcacggaactgctcaacgccaaggatatggaggatggcaccttcagtgtccagtggacgcccagttctgtgggcgcctactgcctggcggtgaccatcgatggcataccgctggaggaggtctaccgcgtggacgtcaaggagggcattctcccaccgcccactcagaggaacagcgcccagcgaagaccacaggcaccaagcaaattgcgccgctttcaggtaggcaactcgacattttgataccccttactcgtagagttatggggtatactagattcgttgaaaagtatgtaaagtatgcatataaagtatatatattcttgatcaggatcaatagtcgagtcgatctatctatcgatatgctggatatttcgtatctaatccccaatactgatttcaggctcgtcacagttcaggactgcggatacgatcccatcccacgctgcagtcggaacaggtgggcgtagtgcgggtgggcggtgtaatctcgttcatcgacgagatcgaaaacgatgatggggtctggctgcgcctatccacggagtccatacggcagcactgcaccatgggctggtatccgacggaggcgtggtgtctgcagttcaatcagcacctagccaggatgcttctccagccggtcaccgacaaggaggtgaatccagtgcggaagggcgtaggtgctgaggaagatgtggaggagcagccgcctgtaactccatcggccagtggcgaggcgagtcccgaaccggaaccagatcccagtccagtcctcagtccggccaagaccaagccaggtcgcttcctatccggtcaccagtccaccaatcccttcctctatccagcaaagcacgccgatctcgctgaacgggaggcccaagtgcaggaggaacgcgagaaggaggaagagcaggtggatgatgaagatgccgatgatcgagaaccggaacaggaggcactgcccgccgttgaactactccccgcccacataggatccgccatagctggcgtcgtgggcggtggagccatcaagttgcaggccctgcagaaatggttcaagggcgacgctgtcgatggaccccaacccctaacgccgtcgcactcgcctccgctcgccggagtatcggtccgtgagctggtacgagcgatgggtggtcaggactcgccacgcggcaatggcaatcgcagccagcaggagcaggatccggaatttagtctggccagtatgaggagaccaaactattcggccagtcaaacggcggcgctgctttccactccgaaacatacgcccaaacggagtgctgttgtggcgagtgaaaccagtggcctggaggatgagctgagtctgttgcaaattaccacaacgacgacgggtcagggagagcagcaaagcgaactgcagttggccaccacttccactgcttcctcggcttccaaacggaatcccatgggtcccatcaaacgagcaatgccgccttcattcgcggagagcatccgtgcggtgtttgctgccctcctttggcacgaaggtgttgtccacgatgcgatggcctgtgccagtttcctcaagttccatcccggtttgcccaaggagggggccacagtggtgacgcgacgcggcgagagcggggatcctcggttgcagttatcgagggagcaaaaggcccagcagcggcactccgtggaggtggccaatgcgggtaattacctaaacatccggccgagcacattggaaaccctcaccaagagtggcaactgctcgctgcacaatcgcagcaagtatcgaaagaatcttctgagcggtggtggtggagccatcaattccggcgatgatacagcccagaaattgcaggctctgcccgaaatggtgagcgttttgccaccggctctgcgatgtctggtctatttgtgggaacagatctgctccggctgcgttcagattgtacagtcgaatgccttggagcagagggagcctcggctgctttcacccggaagcagagatctcaacggagatgcagacactgagggcaaggagggcaagaattcggaccaggcttcagccggtgagaaagatctgggcaggaaatgcaagcgcaaaaagaaggacgacggcagctggtgcgaaatctgcgaactattcctgcccatgcccgtgacctatcacatgagaattgcccatcctggctgcgggaaatcggccaagggcaagggctacaattccgtgggcattttctgcgagggatgggctggcaattgtggtgagggtggcaagggtgcctcgtcctggttcctcatgtgcgatccctgccgcgatcgttatctcgcctcatgtcgcagcgccaacaacatcaatagcgccgcccgtcaactggagtccagtgccgccgaaggtgagtcttccgatgcgcactatgtaaattcaaattctaatcctaatacttactgaacttgcaggaaacgaactgaatctgtttggtgtgaaatccaccacattgatagccaatgctgaggtgtacacaacgatgcgagagaacgccacatttctgttggagctctgttccagttccagttcagcatccggggctgcaggcagcctggccgccactagctccagttccaagcggtctccacagcaaatgtccgtggtggccatgcccgtggtgattgagcaccagctgggtaactccgatctgaaaccaagcaccagtcgttgcagccgtatggctcggttaagtggctccaaattctgtccaggtgtcggtagcggagcttttcgtaaaagctttgtgggtggcccaccgacggcaccggagaacgtatggctggcgccggagagcttcgcctgcctggagtgcttgggcacggctgggcacgaggacctgccatacgaaatgtttggtttgggtccgaactcgaatgacaatggctacgatagggtgagtataagaaagctgttgtgttagcttttagtccttttctaaataacaaaatcttacctttcccgctcgcagccgctctcggagatctcctacgagtcctgcgagccaaataactacgatatgctgtccggctctttggcgccaggtacaacggccgccgcctcagtgggtggtggcaatctatctaagttccatcgcagctactcgatggggcagggctgggcatcgctggcccagcataaccacccgccaccgcaccacccccagcaacagcaccaccagcagcaacagatgaacctgcagctgcaacagcaccaagcgccaccggtggacggccaaccgaaggtggtctacagacgaaggaacaactctaccagcgagggtgatggatccctgctgatttgttatccctcggagcatctgcgtcgattggtgccgcaaaaactgctggccagcgtttccgttatgcagacagctagcggcgagggaaccggcaaggatcatgcgactggcacgctgggattagaccagtcggctggccagaatgggggaggcaaccttttgctcacccgtcccgccatggcgtttatcactcaaaaacacgaactggaccgcctgagggcagccatgcgaagaagcttgaggattgctgcctgcaggatttacgccctgcaagcccttaactggctcctgcgcagtgtcacccagggtgtttgcttgcacgatctgatgtggtggtttgtgagctccctaaatcccactggtggtcatcagccagtggaaaggggcgaggaggcctccgagccagcgctggaacatccggtggcctatacccagatcagcggcagattcgcccatctaatcacgcagtccctgcacgtgtttttgcaatcggtggcggatctcacgctccacttaccactcggatcgccattgcaacgggttgctatccagtgctttggcattcgttttcgccaggcggatcatcagttcctacatagctcgcatgtatttggaaacatatcgaagatactatccaagtcagatgagcagaacgatgcaatggccgtttcaacgatactcaagcctgattgcgatgtggagcacaatcaagtacattccgttgcgactggcggatcgtcgggagcaggagcacggctcctttgctatacagatctggctggaatgtttgaggtcacagtgtcatcgcgtccagccatggcggaatccctgacggataactctacggaaacattttgggagagcgacgaagaggatcgcaacaagtgcaagattatcgagttgtccctgaccaagctgaactacgcctgtcgctatcttttggtgcacatcgacaatagtcgagatattcaagtaggtctaatggatctcctatatgggcaatgatttaatccattttgttattccagaacaaagtactcaacgtggtgttttatgccggccagtcgctgggcgacacaaatataatcaagtcagcggatgtggatccaaaggcctgctcctggatttcggcgaagatctgcgatgacagctgcacgcatttccgattggagctccatgggccggagaacacgcttcgtgtgcgccaaatcaagttgcttggcctgcccataggaggagcagtgggctcggatgattcctcggatcacaagcaccagcctcatctgcgattaagccatgcgtctcgcatccaacagcagatttgtgaggcggaaacccttagagttttccgattgattaccggtcaggtgtttggtaaactgatcagtaatgttagttcggatttggtgccaccggactcggcgggcataggacctccaagtggcggggcagccagcacctccctgcttgccgattcgctggatctcagggagcacatggtcggcattctgttctcgcgtagcaaactatcgcacctacagaaacaggtgatcgtccacattgtccatgccattcgcaaggaggcacagcgagccaaggaggattgggagctggccaacctggcgcacgtcctgaagcagtcaccccaacagcaaaccgcgcccgcccttgccgcttccgccagctgtgagagtacgccggagaggagtcgagcgccggatacctattgcttcgagatgcttagcatggtgctggctctatcgggcagcgtagttggtcgttcgtatctgtctcagcaacatggtttgctcagggatctcctgggactcctgcacaccggaagtgatcgtgtccaacgacaggttacggctttgttacgccggatactcccggaaataacacccgagagctttgccgagctactaggagtacaaagattacctccagcggattatagtatcgctcatcagtctgccagtgattttgatatgagccgattgggtctgcttgatatattcctggccgtcatcgccaagtcactgcagttgcaggtgaaggttaaaaccacagtggcctcaacgggtccatctggatctggcggcgtatccggcagttcatcgggcaacggaggagctgttttaaaggcgggacagcaggaaaagactccagcctttgtgcgactctggagttccctagatctttccgtgcagcagcttagatcacgaccacccaccggtgagccgggaacaacagatcccttccagttcgatgccttgccaccgagaaaggaatcgaaacgtaaccttaaccagcgttggttcctcaacggagtcatttccaccaagcaagcggagagcattatcagtctcataagagatttggccagcgtaagtgatacatatccaataagatggttaattatgttcataggctttgaaaaatgtccttatcttagcaaatttatttattttcgttatcttttttacagggtaagctcagcgaaaagtggtcacaaatcaccaaggcggccatagcggaatccgtgttaaatttaactcgcctggaggagatttaccgctcgccagagcactgtaccaagacctccacgttgtggttggcactggccagtctgtgtgtgctggagcgcgaccacgtggagaagctatcctccggtcagtggtccaagctgtgcgacacgcgtccattgtgtagcaaccatgacgacggtgaaacagcggccatcatccagtgcgagacctgcggatcgctctgcggcgattgtgatcgtttcctgcatctgaaccgcaagacccgctcccacaagcgaacggtgagtagccatgctctggaatctcatagatttatgctcacaaaattgtttcattttgcactacaggtgtgcaaggaggaggaggaggccattcgtgtggaactgcatgaatcctgtggccgaacgaagctcttttggctgctagccttggctgattctaagacgctgaaggctatggtggagttccgggatggcagtcacacgataatctcgggtccccaggaggcggtgggcaggtgtcgcttctgcggcctaaccggcaactctggactgctggagatcggcaacgtgtgtgcggatgcccagtgccaggagtacgcggccaattcgtgtcttaagaccaagccgtgtggtcacgcgtgtggaggagtcacgggcgagcgaaagtgcctgccctgcctgcagcatgtgtgccatacgcgcgaaaacgagctggccgaggagctgagggatccgaagctcacccaggatgcggacgacatgtgcatgatatgcttcgttgaggcattgtcctgtgcaccatcaatacatgtaagtggaatgttagcttgtgtctcaggaaatttcatttattctcaaccttttttgcagctggagtgcggtcacgtgttccactatcattgctgcaaggcggttctggagaagcgctggagcggaccacgcatcacatttggcttctccctgtgtcccatctgcaaggcggacatccagcatcccctgctctcagatatcctggagccgatcaatggcctcaaacaggacgtcaaacgcaaagctctcatgcggtaagtgatggcaatggttttaactacaaatttttggtgatttcacacatttttatctttgttccaggatcaaatacgagggcgtagtaaaagacacggacagcaaaaacgtcaacatgacccagctggcaatggatcgatatgcctattatgtgtgctttaaatgccagaaggcgtactacggcggcgaggcgcgctgtgacgcggaaattggcgagaagttcgatccggaggagctggtctgcggcggttgctcggatgtggcccgggcacagatgtgtccgaagcatggcaccgatttcttggagtacaagtgccgctactgctgctcggtggcggtattcttctgctttggaaccacacacttctgtgacacctgccacgacgatttccagcgactgaccaatatacccaaggtcaagttgccccagtgcccagccggaccgaaggccaagcagttgctgggcgacgaatgtccgctgcacgtaatgcatccgcccactggcgaggagttcgccctcggctgcggcgtctgtcgcaatgcccaaacattttagccacacacattgattaaacgcgatgatccggagtcggaggatgatgacgacgacgaggatctggcgccggacatgtggccgagcgtttggtcccagtcagatgactcgcggacatatttgtagagatttaaatccctcaaaaagaaaaatgcccacactcagtacacaacatggatgaatataacattcattcaatttgatattaaatcactcattggaaaggaaatgaacatcggaaacggataggcattttctggaatagctgatatttggatgatggatattggattacagattagcaaatagcaaatagcgtatattatatttttaaccccatgcaatattattttgtaacgctcgaaatcaaaccgaatcgaactcccatttaaagatcaaaaactctctcactaattatttaatgtacaattcggactcgagcgaccgagtgcaagcgagagagagcgagtgcgggagagagcacgagaagtgtgtacataatagtcctgctccccgacctccgtgaccaccttctatcgtccctcaccctccttttccttctccacaaactcactccaacaaaagcacattatgctatatttattaattttgcaaataacttaattattatattttatgaatgcgacgaacggaagaatgcaataaaaatcatttctgaatgtataattctattgttgttatcttatattgtattttttttttaatgaaaaatcgtaactagtaagtatattgaaaaaaaaacttgatagttaggaatcaatagatattttttgtattttaattttatagtggctgatcatacttacgatctggatattctttttcccacccattgagaaaatcataagattgaatggtattttttaaaaacatttatgtatgtatttctcttttctttgtttcttttcatttattgtgtcatagcatctgttctgcgccttttgcggttcggaaacataattctttgcttcgccgcgttctt

SEQ ID NO: 19337 - DNA, 7437 bp, DROSOPHILA
atgggatttgagtggaatggatttaagtgcatcgggattctacctgatcagttcgtgaccctaacgcttgaccccgcgtctaagccatcgcagtcaaatgagcgacagttcctcaaggacttcattagcggtgcgccaggatcgtcgggcgcccgtttggccgcctggttgcagcctgagtcacgactggatcccaataaatgtgagctgaacacaatcacggaaccactgcgctacggttggccttcccaggtgacggtcaccatacgggatcagtatggtgatgcggttttggtgccggaactcaaggttgaaatcaaggcgataccaacgggttcgggtcccaatggcagcgctaccggaacaggaacctcctgcacttctgtggccgaagtttcagcacccggtccgaatctttggatgcgtcgcgcctctagggatacatggggctggggcggaatggcgccaccaccgcgtatcaactacgagcccaccgtgaaggataagatggtattcaaggcgattaccttcatgaagccctatgctaactactcgttcgaggagctgcgctatgcgagtccggtgcaaacgcgagtcacggaactgctcaacgccaaggatatggaggatggcaccttcagtgtccagtggacgcccagttctgtgggcgcctactgcctggcggtgaccatcgatggcataccgctggaggaggtctaccgcgtggacgtcaaggagggcattctcccaccgcccactcagaggaacagcgcccagcgaagaccacaggcaccaagcaaattgcgccgctttcaggctcgtcacagttcaggactgcggatacgatcccatcccacgctgcagtcggaacaggtgggcgtagtgcgggtgggcggtgtaatctcgttcatcgacgagatcgaaaacgatgatggggtctggctgcgcctatccacggagtccatacggcagcactgcaccatgggctggtatccgacggaggcgtggtgtctgcagttcaatcagcacctagccaggatgcttctccagccggtcaccgacaaggaggtgaatccagtgcggaagggcgtaggtgctgaggaagatgtggaggagcagccgcctgtaactccatcggccagtggcgaggcgagtcccgaaccggaaccagatcccagtccagtcctcagtccggccaagaccaagccaggtcgcttcctatccggtcaccagtccaccaatcccttcctctatccagcaaagcacgccgatctcgctgaacgggaggcccaagtgcaggaggaacgcgagaaggaggaagagcaggtggatgatgaagatgccgatgatcgagaaccggaacaggaggcactgcccgccgttgaactactccccgcccacataggatccgccatagctggcgtcgtgggcggtggagccatcaagttgcaggccctgcagaaatggttcaagggcgacgctgtcgatggaccccaacccctaacgccgtcgcactcgcctccgctcgccggagtatcggtccgtgagctggtacgagcgatgggtggtcaggactcgccacgcggcaatggcaatcgcagccagcaggagcaggatccggaatttagtctggccagtatgaggagaccaaactattcggccagtcaaacggcggcgctgctttccactccgaaacatacgcccaaacggagtgctgttgtggcgagtgaaaccagtggcctggaggatgagctgagtctgttgcaaattaccacaacgacgacgggtcagggagagcagcaaagcgaactgcagttggccaccacttccactgcttcctcggcttccaaacggaatcccatgggtcccatcaaacgagcaatgccgccttcattcgcggagagcatccgtgcggtgtttgctgccctcctttggcacgaaggtgttgtccacgatgcgatggcctgtgccagtttcctcaagttccatcccggtttgcccaaggagggggccacagtggtgacgcgacgcggcgagagcggggatcctcggttgcagttatcgagggagcaaaaggcccagcagcggcactccgtggaggtggccaatgcgggtaattacctaaacatccggccgagcacattggaaaccctcaccaagagtggcaactgctcgctgcacaatcgcagcaagtatcgaaagaatcttctgagcggtggtggtggagccatcaattccggcgatgatacagcccagaaattgcaggctctgcccgaaatggtgagcgttttgccaccggctctgcgatgtctggtctatttgtgggaacagatctgctccggctgcgttcagattgtacagtcgaatgccttggagcagagggagcctcggctgctttcacccggaagcagagatctcaacggagatgcagacactgagggcaaggagggcaagaattcggaccaggcttcagccggtgagaaagatctgggcaggaaatgcaagcgcaaaaagaaggacgacggcagctggtgcgaaatctgcgaactattcctgcccatgcccgtgacctatcacatgagaattgcccatcctggctgcgggaaatcggccaagggcaagggctacaattccgtgggcattttctgcgagggatgggctggcaattgtggtgagggtggcaagggtgcctcgtcctggttcctcatgtgcgatccctgccgcgatcgttatctcgcctcatgtcgcagcgccaacaacatcaatagcgccgcccgtcaactggagtccagtgccgccgaaggaaacgaactgaatctgtttggtgtgaaatccaccacattgatagccaatgctgaggtgtacacaacgatgcgagagaacgccacatttctgttggagctctgttccagttccagttcagcatccggggctgcaggcagcctggccgccactagctccagttccaagcggtctccacagcaaatgtccgtggtggccatgcccgtggtgattgagcaccagctgggtaactccgatctgaaaccaagcaccagtcgttgcagccgtatggctcggttaagtggctccaaattctgtccaggtgtcggtagcggagcttttcgtaaaagctttgtgggtggcccaccgacggcaccggagaacgtatggctggcgccggagagcttcgcctgcctggagtgcttgggcacggctgggcacgaggacctgccatacgaaatgtttggtttgggtccgaactcgaatgacaatggctacgataggccgctctcggagatctcctacgagtcctgcgagccaaataactacgatatgctgtccggctctttggcgccaggtacaacggccgccgcctcagtgggtggtggcaatctatctaagttccatcgcagctactcgatggggcagggctgggcatcgctggcccagcataaccacccgccaccgcaccacccccagcaacagcaccaccagcagcaacagatgaacctgcagctgcaacagcaccaagcgccaccggtggacggccaaccgaaggtggtctacagacgaaggaacaactctaccagcgagggtgatggatccctgctgatttgttatccctcggagcatctgcgtcgattggtgccgcaaaaactgctggccagcgtttccgttatgcagacagctagcggcgagggaaccggcaaggatcatgcgactggcacgctgggattagaccagtcggctggccagaatgggggaggcaaccttttgctcacccgtcccgccatggcgtttatcactcaaaaacacgaactggaccgcctgagggcagccatgcgaagaagcttgaggattgctgcctgcaggatttacgccctgcaagcccttaactggctcctgcgcagtgtcacccagggtgtttgcttgcacgatctgatgtggtggtttgtgagctccctaaatcccactggtggtcatcagccagtggaaaggggcgaggaggcctccgagccagcgctggaacatccggtggcctatacccagatcagcggcagattcgcccatctaatcacgcagtccctgcacgtgtttttgcaatcggtggcggatctcacgctccacttaccactcggatcgccattgcaacgggttgctatccagtgctttggcattcgttttcgccaggcggatcatcagttcctacatagctcgcatgtatttggaaacatatcgaagatactatccaagtcagatgagcagaacgatgcaatggccgtttcaacgatactcaagcctgattgcgatgtggagcacaatcaagtacattccgttgcgactggcggatcgtcgggagcaggagcacggctcctttgctatacagatctggctggaatgtttgaggtcacagtgtcatcgcgtccagccatggcggaatccctgacggataactctacggaaacattttgggagagcgacgaagaggatcgcaacaagtgcaagattatcgagttgtccctgaccaagctgaactacgcctgtcgctatcttttggtgcacatcgacaatagtcgagatattcaaaacaaagtactcaacgtggtgttttatgccggccagtcgctgggcgacacaaatataatcaagtcagcggatgtggatccaaaggcctgctcctggatttcggcgaagatctgcgatgacagctgcacgcatttccgattggagctccatgggccggagaacacgcttcgtgtgcgccaaatcaagttgcttggcctgcccataggaggagcagtgggctcggatgattcctcggatcacaagcaccagcctcatctgcgattaagccatgcgtctcgcatccaacagcagatttgtgaggcggaaacccttagagttttccgattgattaccggtcaggtgtttggtaaactgatcagtaatgttagttcggatttggtgccaccggactcggcgggcataggacctccaagtggcggggcagccagcacctccctgcttgccgattcgctggatctcagggagcacatggtcggcattctgttctcgcgtagcaaactatcgcacctacagaaacaggtgatcgtccacattgtccatgccattcgcaaggaggcacagcgagccaaggaggattgggagctggccaacctggcgcacgtcctgaagcagtcaccccaacagcaaaccgcgcccgcccttgccgcttccgccagctgtgagagtacgccggagaggagtcgagcgccggatacctattgcttcgagatgcttagcatggtgctggctctatcgggcagcgtagttggtcgttcgtatctgtctcagcaacatggtttgctcagggatctcctgggactcctgcacaccggaagtgatcgtgtccaacgacaggttacggctttgttacgccggatactcccggaaataacacccgagagctttgccgagctactaggagtacaaagattacctccagcggattatagtatcgctcatcagtctgccagtgattttgatatgagccgattgggtctgcttgatatattcctggccgtcatcgccaagtcactgcagttgcaggtgaaggttaaaaccacagtggcctcaacgggtccatctggatctggcggcgtatccggcagttcatcgggcaacggaggagctgttttaaaggcgggacagcaggaaaagactccagcctttgtgcgactctggagttccctagatctttccgtgcagcagcttagatcacgaccacccaccggtgagccgggaacaacagatcccttccagttcgatgccttgccaccgagaaaggaatcgaaacgtaaccttaaccagcgttggttcctcaacggagtcatttccaccaagcaagcggagagcattatcagtctcataagagatttggccagcggtaagctcagcgaaaagtggtcacaaatcaccaaggcggccatagcggaatccgtgttaaatttaactcgcctggaggagatttaccgctcgccagagcactgtaccaagacctccacgttgtggttggcactggccagtctgtgtgtgctggagcgcgaccacgtggagaagctatcctccggtcagtggtccaagctgtgcgacacgcgtccattgtgtagcaaccatgacgacggtgaaacagcggccatcatccagtgcgagacctgcggatcgctctgcggcgattgtgatcgtttcctgcatctgaaccgcaagacccgctcccacaagcgaacggtgtgcaaggaggaggaggaggccattcgtgtggaactgcatgaatcctgtggccgaacgaagctcttttggctgctagccttggctgattctaagacgctgaaggctatggtggagttccgggatggcagtcacacgataatctcgggtccccaggaggcggtgggcaggtgtcgcttctgcggcctaaccggcaactctggactgctggagatcggcaacgtgtgtgcggatgcccagtgccaggagtacgcggccaattcgtgtcttaagaccaagccgtgtggtcacgcgtgtggaggagtcacgggcgagcgaaagtgcctgccctgcctgcagcatgtgtgccatacgcgcgaaaacgagctggccgaggagctgagggatccgaagctcacccaggatgcggacgacatgtgcatgatatgcttcgttgaggcattgtcctgtgcaccatcaatacatctggagtgcggtcacgtgttccactatcattgctgcaaggcggttctggagaagcgctggagcggaccacgcatcacatttggcttctccctgtgtcccatctgcaaggcggacatccagcatcccctgctctcagatatcctggagccgatcaatggcctcaaacaggacgtcaaacgcaaagctctcatgcggatcaaatacgagggcgtagtaaaagacacggacagcaaaaacgtcaacatgacccagctggcaatggatcgatatgcctattatgtgtgctttaaatgccagaaggcgtactacggcggcgaggcgcgctgtgacgcggaaattggcgagaagttcgatccggaggagctggtctgcggcggttgctcggatgtggcccgggcacagatgtgtccgaagcatggcaccgatttcttggagtacaagtgccgctactgctgctcggtggcggtattcttctgctttggaaccacacacttctgtgacacctgccacgacgatttccagcgactgaccaatatacccaaggtcaagttgccccagtgcccagccggaccgaaggccaagcagttgctgggcgacgaatgtccgctgcacgtaatgcatccgcccactggcgaggagttcgccctcggctgcggcgtctgtcgcaatgcccaaacattttag

SEQ ID NO: 19338 - protein, 2478 aa, DROSOPHILA
MGFEWNGFKCIGILPDQFVTLTLDPASKPSQSNERQFLKDFISGAPGSSGARLAAWLQPESRLDPNKCELNTITEPLRYGWPSQVTVTIRDQYGDAVLVPELKVEIKAIPTGSGPNGSATGTGTSCTSVAEVSAPGPNLWMRRASRDTWGWGGMAPPPRINYEPTVKDKMVFKAITFMKPYANYSFEELRYASPVQTRVTELLNAKDMEDGTFSVQWTPSSVGAYCLAVTIDGIPLEEVYRVDVKEGILPPPTQRNSAQRRPQAPSKLRRFQARHSSGLRIRSHPTLQSEQVGVVRVGGVISFIDEIENDDGVWLRLSTESIRQHCTMGWYPTEAWCLQFNQHLARMLLQPVTDKEVNPVRKGVGAEEDVEEQPPVTPSASGEASPEPEPDPSPVLSPAKTKPGRFLSGHQSTNPFLYPAKHADLAEREAQVQEEREKEEEQVDDEDADDREPEQEALPAVELLPAHIGSAIAGVVGGGAIKLQALQKWFKGDAVDGPQPLTPSHSPPLAGVSVRELVRAMGGQDSPRGNGNRSQQEQDPEFSLASMRRPNYSASQTAALLSTPKHTPKRSAVVASETSGLEDELSLLQITTTTTGQGEQQSELQLATTSTASSASKRNPMGPIKRAMPPSFAESIRAVFAALLWHEGVVHDAMACASFLKFHPGLPKEGATVVTRRGESGDPRLQLSREQKAQQRHSVEVANAGNYLNIRPSTLETLTKSGNCSLHNRSKYRKNLLSGGGGAINSGDDTAQKLQALPEMVSVLPPALRCLVYLWEQICSGCVQIVQSNALEQREPRLLSPGSRDLNGDADTEGKEGKNSDQASAGEKDLGRKCKRKKKDDGSWCEICELFLPMPVTYHMRIAHPGCGKSAKGKGYNSVGIFCEGWAGNCGEGGKGASSWFLMCDPCRDRYLASCRSANNINSAARQLESSAAEGNELNLFGVKSTTLIANAEVYTTMRENATFLLELCSSSSSASGAAGSLAATSSSSKRSPQQMSVVAMPVVIEHQLGNSDLKPSTSRCSRMARLSGSKFCPGVGSGAFRKSFVGGPPTAPENVWLAPESFACLECLGTAGHEDLPYEMFGLGPNSNDNGYDRPLSEISYESCEPNNYDMLSGSLAPGTTAAASVGGGNLSKFHRSYSMGQGWASLAQHNHPPPHHPQQQHHQQQQMNLQLQQHQAPPVDGQPKVVYRRRNNSTSEGDGSLLICYPSEHLRRLVPQKLLASVSVMQTASGEGTGKDHATGTLGLDQSAGQNGGGNLLLTRPAMAFITQKHELDRLRAAMRRSLRIAACRIYALQALNWLLRSVTQGVCLHDLMWWFVSSLNPTGGHQPVERGEEASEPALEHPVAYTQISGRFAHLITQSLHVFLQSVADLTLHLPLGSPLQRVAIQCFGIRFRQADHQFLHSSHVFGNISKILSKSDEQNDAMAVSTILKPDCDVEHNQVHSVATGGSSGAGARLLCYTDLAGMFEVTVSSRPAMAESLTDNSTETFWESDEEDRNKCKIIELSLTKLNYACRYLLVHIDNSRDIQNKVLNVVFYAGQSLGDTNIIKSADVDPKACSWISAKICDDSCTHFRLELHGPENTLRVRQIKLLGLPIGGAVGSDDSSDHKHQPHLRLSHASRIQQQICEAETLRVFRLITGQVFGKLISNVSSDLVPPDSAGIGPPSGGAASTSLLADSLDLREHMVGILFSRSKLSHLQKQVIVHIVHAIRKEAQRAKEDWELANLAHVLKQSPQQQTAPALAASASCESTPERSRAPDTYCFEMLSMVLALSGSVVGRSYLSQQHGLLRDLLGLLHTGSDRVQRQVTALLRRILPEITPESFAELLGVQRLPPADYSIAHQSASDFDMSRLGLLDIFLAVIAKSLQLQVKVKTTVASTGPSGSGGVSGSSSGNGGAVLKAGQQEKTPAFVRLWSSLDLSVQQLRSRPPTGEPGTTDPFQFDALPPRKESKRNLNQRWFLNGVISTKQAESIISLIRDLASGKLSEKWSQITKAAIAESVLNLTRLEEIYRSPEHCTKTSTLWLALASLCVLERDHVEKLSSGQWSKLCDTRPLCSNHDDGETAAIIQCETCGSLCGDCDRFLHLNRKTRSHKRTVCKEEEEAIRVELHESCGRTKLFWLLALADSKTLKAMVEFRDGSHTIISGPQEAVGRCRFCGLTGNSGLLEIGNVCADAQCQEYAANSCLKTKPCGHACGGVTGERKCLPCLQHVCHTRENELAEELRDPKLTQDADDMCMICFVEALSCAPSIHLECGHVFHYHCCKAVLEKRWSGPRITFGFSLCPICKADIQHPLLSDILEPINGLKQDVKRKALMRIKYEGVVKDTDSKNVNMTQLAMDRYAYYVCFKCQKAYYGGEARCDAEIGEKFDPEELVCGGCSDVARAQMCPKHGTDFLEYKCRYCCSVAVFFCFGTTHFCDTCHDDFQRLTNIPKVKLPQCPAGPKAKQLLGDECPLHVMHPPTGEEFALGCGVCRNAQTF

SEQ ID NO: 19339 - DNA, 3254 bp, DROSOPHILA
caaaaagaaaacaattcgcggctgttcaatatttttctcccccaatatccatcgatttcgagtgccaaatgaatcccaacatgaacatgatgcccatgtctgggccacaaatgatgcaggtaatgcaatcctcgccatcgggacccccaggaccagtgcagcatcaacagcagcagcctccacagccactgcagcagcagcagcaggccgaaaaattggacaacatttccagggtgaagagtttgctgggaccactgcgggagtccatgttcctcaccatccggtcgagcgccttcgcgctgcagcaaaacaatctcgcggacaacttaaagagggacacgggtgcccaccatgttccgcggttcgacaagcacttggaagacttttacgcctgttgcgaccagatcgagatccacttgaagacggcgatgcagtgcctccagcagcagaactcctccaatcactatctccccggtccggtgactcccatgcgcatggagacctttatgccggacaacgccggccccatttcgtatcccacttacttgaacacggtccgcgttcacatacagtccgccaaggatatacacgacactctgattagtgccgcgcagaacatttcgcaggctgattgatagttgtagtagcattaggttttattatttcacacgcatgcacttaagttaagtaaataaatattcttagatataagataacaatgatctttgtttgggaaagtcgaaatggtgttaccatactcaacgtttttacaggcggaagagtaaaagggaaaataataaaataaatatagcttgtgggcattagtttgcatacagaaaacatgttacacaaaaacatcgagcaataaaataaattctagttgtatttcgtgtaccactatttgtgaaaatgtttgcagtgagaacgcgttgcagcagtcgatgagtaactgcgcatccagtgagaaaaggctaaaaattcgatagacaacagtcggacgtgtcacaattagaacgcaaaagcaaaacacagcggtgccgcgcatttatttacaactagaaaagcggtaaggtctcattttgttgttaactgtgcacaagccgttaatttattcaacttctccgaccctcagcttactaaaccagaacaaatggcagatgaacaaccaaatcttgtggccggacacccacctgcatgtaagtgcacttgcattggtgtgtgtgtgtcgatgcagacgagttttcgatttttggcagcaattgaatcttataagaacaaactgccttgttggcaatcaataatgcacccaatcaaatcaattgccagaatatctgcgcccttatcagtatcttaacctgtttcggccaaagctgataagtaaacaaataagcgaacacaggcaagcaaacgcatagctttcaagaaatgtatgtttgtatttgtactttatgctgacgtcacgtgcaattcaaacaataacgttaactgaataggaaattattactttttaaagtagctttttacgccttatattttatccttaacgtttataaaatgccattgacttaatcatcttcgtacaatgtaaataataacatgtcaactttggacgactagtatggcttacttactttttaatagccgctttacgtaaacacggcttgaatcggctactgtggccaagcctcatttgttgccaaccctatatgtttttgttatttaattatagtgaaggctggtggcatgcgaattgtgcagcacaaagcgccgacggcagaacgcgcgcccaaggatgcagaggattgtactggactgacagtgagctattgacataagtatgtggttttcaatggaaactaacttatcctctaatcctttaaagcaacccattgccgtgaactccggctctgtgagcggtgcccccgtcaagggcaacacggactttacgcccgcctccgcccaggtggcccactcgcccaagccaccggctgcagtgcagcagaagccccagatccacatccagcagccacggaagtgatgcgtactcgggcggaataactattatcattatctaatctctttgatcttttgttgaaattctatgagtcctctcaatggtattgaaatcgcctttgaatgcgatatttactctttaattttatatatgcatttgccactgcattccataaattaaaaatgctgattttctgagttaatattttgtaataaactttatcccttttatagatttcaagacattcgtttcgaatgcgtatatcttaaatttttacctaaaccaactcgtggtgttcctggtgagcttggatgcgataaaacattgaccaaagaagacatataacactatacatgaaattcgtgatttccgatgttatctatattgccctcagatctactggaatttgctctacacgtactcttaaaattcccaagtgcttattcagcacaacgtgtatataattagggaaactctagcacactaaatgccccactgaacttcggtggtccggggtgcggacttcaaatccgtagtcgatttgcgtcgaagtggttcgattccacctggggggcgaatattaatggagttgcattcttaaacttttttaagcatggtctttattttccaaaatctgttcatatggcattggccgccttgactatccaaggtcgcagaatcgccacatcggcatagacaccggggtagttgtcgtccgcacaccggtaaccccaggatacaatgcccaccagctggctactggccaccaaaggacctccagagtctcccgtacaggcatctgcatcagtgctggcagcgcaaattgtttcctcgcccacaaaatccgcaccgtagccaaacttttgcgaggcacactctccgcgatcgatgatctgcaactgggccttctgcaagctatcggagagggctccattatcagtgtggccccaacccgtgacagtgactgttgttccacccgatggactcgtactggctaaattgatggctctcgttgagaggccaaaggtcagtggtgtggacagacgaagcacggcaatgtcgtagtgcaggaagcgggaatcaaactgctcgtggactttgtacgccgccacaggaaccaatgtgccgccgtagttgtgattctgtgcacccacacgcaccttcatcagcgtcacggatctctcatgtagacagtgtccggctgtgatgatgatctccttgctatagatgactccgccgc

SEQ ID NO: 19340 - DNA, 591 bp, DROSOPHILA
tgtcacaattagaacgcaaaagcaaaacacagcggtgccgcgcatttatttacaactagaaaagcgcttactaaaccagaacaaatggcagatgaacaaccaaatcttgtggccggacacccacctgcattgaaggctggtggcatgcgaattgtgcagcacaaagcgccgacggcagaacgcgcgcccaaggatgcagaggattgtactggactgacacaacccattgccgtgaactccggctctgtgagcggtgcccccgtcaagggcaacacggactttacgcccgcctccgcccaggtggcccactcgcccaagccaccggctgcagtgcagcagaagccccagatccacatccagcagccacggaagtgatgcgtactcgggcggaataactattatcattatctaatctctttgatcttttgttgaaattctatgagtcctctcaatggtattgaaatcgcctttgaatgcgatatttactctttaattttatatatgcatttgccactgcattccataaattaaaaatgctgattttctgagttaatattttgtaataaactttatcccttttatagatttcaa

SEQ ID NO: 19341 - protein, 96 aa, DROSOPHILA
MADEQPNLVAGHPPALKAGGMRIVQHKAPTAERAPKDAEDCTGLTQPIAVNSGSVSGAPVKGNTDFTPASAQVAHSPKPPAAVQQKPQIHIQQPRK

SEQ ID NO: 19342 - DNA, 6335 bp, DROSOPHILA
ccctttttcatttttataacgttacgcacggcatcatcaagactctgtaagcttgccgatccggatttgatcgtagatccagttttggagatagcctcataaagcttctcctttacgacatcggtaatttcatcaacttcggcgtgcccaagagctgtataaaaatagtggtttcttacaaataattataagaaaataacagcaatgttctaaatattactgaccaccgaaaataattaagagttgtagaatagctaaccacttgaggctggccatcttttagttatgaccgaataacaccgattgttgaaatcttcgacgtgtgtaaattagattattcagaaaaataacagtgacaaaaggatgacacagttgattataaaacattagcacttgtttttggttgcaatttgctaatttgttggcattccgaatcaaaacaggcaaaccaatacaatttaatagtaaaagggaaaataaataaataaactttgtaaatgtttatataaaataaggaaataaattcatgaaaaataggggaatgtatggttttcaaatttttcacgaataccgttaacgatagtacaaatgcacaataccaatttgaatttggcgccacaactgctcactttgcagcactgaacaagagcatgcgcaaaggggttatacagtactggtcaatataccagggatgcaacgctccaaagttcggcaattgaaccaatctaaagagtttaactattctagtacaactacagtttatttaaataatttccatggttaaaacaataccaggatgtactgcgcattggaaaagtgagcggatttcccgcttgcgagcttatcgcaccaccaacacaaacatacacatgcacacggactctcttcgctctcttcctctctctctctctcttcgcaatcgcaacgatttgttgttggccgcagtgcttgttttgcttatattagcatgtgtggagtgcaaaccaagaatcagtagtcgccgcggtttcgacgtgtcagtttgcagtacaattacaattgattaatcgcgccaaatcgcggagccaagtagtacttagcaagtagcaagaggaagcacatcagcgagtccatcgacaacaataacaaaatatggcggataaagtaaatgtgtgcattgtgggctccggcaactggtgagtgcacttaattacccatcgccagatgcacttacataatgaccatctaatccacacccgcacccaacaccaccccaccaacattttaatctaaaccttgcgcccttgcaggggttcggccatagcgaaaatcgtgggcgccaatgccgccgctctgccggagttcgaggagcgtgtgacgatgttcgtctacgaggagctcatcgatggcaagaagctgacggagattatcaacgagacgcacgagaacgtcaagtacctgaaaggacacaagctgcccccgaatgtggtgagtgttgttcgctggttgccaatcaatggggtggacttatgtaacgccggagcggattgttaacaaacagccgtgcgcttacataaaggctgcataccttgatcttggccgtgcggacccaaattatctaatcggtcgaatccgcgtctatttttacaccgcgctcgctctctctctctctctgcgctgcgctctggctgcagtcagattgcactcttcttgcacttttcagggccagcatcgcactctcgctctccgcgaaagagcgcgtccggccccagtgcctttgacgtaggtcaaggccggtgggcgtgcaatgggccaccccctcgcagggccgcccagaatgcgtcaacattctattagccgataattggacaggcaggcgataagcaggcgatccacttgaaacgggtgcgttgctacacatgtacatgctccacaggcactcgagctgttctgtttgccgattattgataagtccaactggtccgggtcggttgataaagtccatccataaaggagagtcagaagttcatccgcgacaaagtttgccccatgccttggaaaaaacctagccatgcgttggcagcatggggattgataaacgtgaaaaacagaaaccaaacaaaatgtgggcgacacttttctatgccgcaccgtttgtttgcctatataatttacacacatatataaatttggcagactttcagcgactttcggcttttgtgggagaggggcgaatcaaaacaacagatgagccaaaagaaaatagataaacgaggctgaaattctataagcaatgatcgccaccaatgtcagatatgcaaaaagtatgcaaaaggcaatgaatatgtgtcagcaagctaatgagcttaatgcaacaaagaactaatgaaaatatttggaaattctgtttatttgcccgtatggaattactgtttgtccatatgacgcagtgaggagcgaaatacgtgtcgaatagcttagaagtctgaattacctgaattgctaattggcagctggtttttctagttaaatttacttttaccgatgtcaaatcatagattgttacgttattgcaaaatatataacaattatttaaatgtcattgccctagtaagatcattaaaatgcaagtagcgcaacatcacactatacacactttataacttaaccttttaaaatttccatttgcttgccatttttgtcttttttgtgaacccataatcactatcgtcgcgcgtagaaaaaaacaaatacattagcaatatgaactcatttcaaatgctacaaacaggttggcgagccagcatggcgatatggagaaataatactctgatgtacaaagtcacccatatcaagctcagccgatcgatctgaccagccagtccgcgatttaaattgtctagacagctgaggaacgagcctccaaaggttggagtggaatacacgtgctgggaaaatgatttccgtgatccgtctgcagttcccttcatttaaccttcagcccgcttatcggagttatatatttttttgtttttttccttatcacagtaattagaaaagtttactttgtggcccctattccacaggttgccgtgcccgacctggttgaggccgccaagaacgctgacatcctgatcttcgtggtgccccaccagttcattcccaacttctgcaaacagctactgggcaagattaagccaaatgccatcgctatctccctgatcaagggcttcgacaaggccgagggcggcggcatcgatctgatctcgcatataatcacgcgtcacctgaaggcaagtcagcgtcgcaaaggtgacaccgccagaatatctaatccacttgtgactttccatcgcagatcccatgcgccgtgttgatgggcgcaaacctggccaacgaggtggctgagggcaacttctgcgaaacgacaatcggctgcacggacaagaagtatggcaaggtgctgcgcgatctcttccaggcgaaccacttccgcgtggtggtcgtggacgatgctgatgccgtggaggtttgcggtgccctcaagaacatcgtggcctgcggcgctggctttgttgatggcctcaagctgggcgacaacaccaaggcggctgtcatccggctgggcctcatggagatgattcgcttcgtggacgtcttctatcccggaagcaagctgtccaccttcttcgagagctgcggcgtggccgatctgatcacgacgtgttacggtaagtgcaaaagttcgccagggcatgtgagtttggagctcggttaaattgagaaagttatcgggaacgggcaacaacgagcgtaataagtcaacaaactgctagtcaaatgctattattattttaaggcaaaaacaactctgccagtgactcacattcaatagtaattgcgaattgctttattagcctttactaatagctgtgtaacaaattagttctgtttatgactgtaagcttgttactttaagttgtttgttttatgtaaggtacacttaggtagcaattacaattttagaatgtttgatataataactatgcatctcttccaggtggccgtaaccgccgcgtctctgaggcgtttgtgacttctggaaaaaccattgaggagctggagaaggaaatgctcaacggccagaagctgcagggcccacccactgccgaggaggtcaactacatgctgaagaacaagggtctggaggacaagtacgactgagcttattatccaatccaattcaaatagttaacttaacactgatcttctttgcttgcagattccccctgttcacggctattcacaaaatatgcacaaatcagctcaagcctaatgatttaattgattgcatacgcaatcaccctgagcatatgtaagtgtttcgtttgcattggttatggctcgttttcgcctgtttatcccgctatcctgataccctgccttcccgaaaatcccccgaaatgagctttgtattctcacctttaacgtttgatttattattgtttctttaacttttcttattttaagttaatctttttcctatgctaagttgatgcaccttctgtttctgtttccgtttctttgattgtttccctattattattttattaatacctaaactaagcttaactttaaaattaataaagtgctaaataataaaactcgatgcaaaatttaaaattttttaaattaaaaatattattgggaatgtttaacattccccaaagaaatcattcataatcccgattcacatgcatcagcgtcattcgttttcagagttatattcagccatttatttcgttacatcccgtagtcactactaatccatcgaaataatattattttccatccattacaaattagtttccttctcttctttttatattatttttatagggatacgtccatcatgccgtcgccaaaactttaaactgtgttacacccaaacaagatcagtcaatgtatattgtaaatactatatatacccgcatagatcaaatcaaccagtcatcttcaccaaggcctataaagctggcattatatagatatatgcataaagtcagaaaaatcgttccacgtcaactgcattactttttcctctaattctcgcaagtgtttttcaatgtgtacagtgcttaagtgttagataatcgaaccaaaacaaagagtgtcataattgttgaacctaattggaattgttaaaataaatataaattaaatacaagttctttgtacataccaaccaaaagtgttcccaactcatttaacattcaaaattggcagctgcaaatcggcaaagagcagtacgtacaaaaactccaaaattaataaattttgcaattttcagttaatcaagcacggttgtgttttattttaacggatgtgtattaactaaaactgatcgagaaacttttgattataaatactttcttcttttatttcacaggcaaaatttgtaaatcccctaaagaagctgagacgtttttaacatttttatgcaccacagagaataaatgtattttttcagcacaacgccaactcgatgaatctttggattccattttctaaccagttaactaaaaggatcgtataggttgttgccttagttagcttattgattttaatccaaaaccacgcatatccaacgaaccacggaagaaaactgacaaccaaagtctgctttaattttaaaatttagttgttttcaattccaaactagccaagaaacaaacgcaagtacctaacaaatatattgtaattttgtggccacaagtagccgacggagctggcgagaggatcttagtataattttaatcggactgcgtagacactagaattaaatgattacccaaaggtcgttgcaaaaataaaagctgagtaattaacaaggttgtttgtttattttctatcacctaataaaatgggatcattcttttctaaagataagtttatctgatgaccaatttgaaaataaatttacatacatccttacatagatggcgctaggtaaagtttctacatgcgcgcctttaagtaataattcaactattgcttacaagtttatttttttaattgaaaactttgtggtaaatttgaaggcaataaatataatcatgtatttaaccctttgtcatttttttatccactttcttgcgcgcaggggcaatgggcattatttaaaattagcggtattatgaatgcgatgtctatccgatgattttggagtacatcttgaaagaagaaaattaaacattcgctacgctacattcgcttttgcgtgacatgaaatataaatcaatcttatgaatctatttatttcctgagctttacgaaaaatgtttatggtttatatg

SEQ ID NO: 19343 - DNA, 1637 bp, DROSOPHILA
ccgcggtttcgacgtgtcagtttgcagtacaattacaattgattaatcgcgccaaatcgcggagccaagtagtacttagcaagtagcaagaggaagcacatcagcgagtccatcgacaacaataacaaaatatggcggataaagtaaatgtgtgcattgtgggctccggcaactggggttcggccatagcgaaaatcgtgggcgccaatgccgccgctctgccggagttcgaggagcgtgtgacgatgttcgtctacgaggagctcatcgatggcaagaagctgacggagattatcaacgagacgcacgagaacgtcaagtacctgaaaggacacaagctgcccccgaatgtggttgccgtgcccgacctggttgaggccgccaagaacgctgacatcctgatcttcgtggtgccccaccagttcattcccaacttctgcaaacagctactgggcaagattaagccaaatgccatcgctatctccctgatcaagggcttcgacaaggccgagggcggcggcatcgatctgatctcgcatataatcacgcgtcacctgaagatcccatgcgccgtgttgatgggcgcaaacctggccaacgaggtggctgagggcaacttctgcgaaacgacaatcggctgcacggacaagaagtatggcaaggtgctgcgcgatctcttccaggcgaaccacttccgcgtggtggtcgtggacgatgctgatgccgtggaggtttgcggtgccctcaagaacatcgtggcctgcggcgctggctttgttgatggcctcaagctgggcgacaacaccaaggcggctgtcatccggctgggcctcatggagatgattcgcttcgtggacgtcttctatcccggaagcaagctgtccaccttcttcgagagctgcggcgtggccgatctgatcacgacgtgttacggtggccgtaaccgccgcgtctctgaggcgtttgtgacttctggaaaaaccattgaggagctggagaaggaaatgctcaacggccagaagctgcagggcccacccactgccgaggaggtcaactacatgctgaagaacaagggtctggaggacaaattccccctgttcacggctattcacaaaatatgcacaaatcagctcaagcctaatgatttaattgattgcatacgcaatcaccctgagcatatggatacgtccatcatgccgtcgccaaaactttaaactgtgttacacccaaacaagatcagtcaatgtatattgtaaatactatatatacccgcatagatcaaatcaaccagtcatcttcaccaaggcctataaagctggcattatatagatatatgcataaagtcagaaaaatcgttccacgtcaactgcattactttttcctctaattctcgcaagtgtttttcaatgtgtacagtgcttaagtgttagataatcgaaccaaaacaaagagtgtcataattgttgaacctaattggaattgttaaaataaatataaattaaatacaagttctttgtacataccaaccaaaagtgttcccaactcatttaacattcaaaattggcagctgcaaatcggcaaagagcagtacgtacaaaaactccaaaattaataaattttgcaattttcagttaatc

SEQ ID NO: 19344 - protein, 360 aa, DROSOPHILA
MADKVNVCIVGSGNWGSAIAKIVGANAAALPEFEERVTMFVYEELIDGKKLTEIINETHENVKYLKGHKLPPNVVAVPDLVEAAKNADILIFVVPHQFIPNFCKQLLGKIKPNAIAISLIKGFDKAEGGGIDLISHIITRHLKIPCAVLMGANLANEVAEGNFCETTIGCTDKKYGKVLRDLFQANHFRVVVVDDADAVEVCGALKNIVACGAGFVDGLKLGDNTKAAVIRLGLMEMIRFVDVFYPGSKLSTFFESCGVADLITTCYGGRNRRVSEAFVTSGKTIEELEKEMLNGQKLQGPPTAEEVNYMLKNKGLEDKFPLFTAIHKICTNQLKPNDLIDCIRNHPEHMDTSIMPSPKL

SEQ ID NO: 19345 - DNA, 4048 bp, DROSOPHILA
tgtttgccaatttagttatgtaagtttccaaaatgggcagttcaactgccgacagtccagaatgctgggcccgcattccaaacccgcaatgtgttttgtgagctcgcggtggcctccattgttggcccatctgtatctattagagcctccgtggacgagacgaacaccaactattaagtgatgacattgtttctgccatttttgatcgatgtattgtatttgtattgtattgtattttactgtaatttattgcaaaaagtattactatattatgtgcagctatatacttccgatatttttagcatttatttgataagcaccaacaacagaaatgtacttacttgtctgattgtaagataccatgtcgtatatcgttttttgtaatagcccctaagactacagagttactaactactgattttagtaatacacatctataatagcattgtacgtttcaaataaaatgtttaaattttgcaaaaaaaacccacaagatcttaaccttgatccagagcgatcggatgaatcgattgggctgccaattgctcgtcctccgatcagctggtcgtacgttaatgaaattatttttacacctatacattttataagcaaaccagacgctgctcaatgggctctttttttgctgtggtggccaagaattgccaatttataaataacaatctctattcgggggttgtcaggtggcttttagagcaaaattagctatggatctttggtgtaagtttttacccgatacccaaccatttcataaccgtcattaaccgatgtcataaggctgagatagccaacatattcaatatcttcaaaaagaaagtgtctttatactgattagctgtgcatttgctgtgtaagttcttacccgatacgcaaccgtttcgaaaccgttatcaaccggttggctttgcactcggctggcaaccctgaaccgaagctgctagctctcactataccattgcagccactgcatttggttttctggtctggcgcacgacgaacgttgctttgggtccccacatttcagcccaacaacgactctatacttcaactatatctaatccctatctgcacttcacctccttcgataccccgcactttgaagtgagtgtttaagtttgctcggtgttttgaaaaccgttctgttttcgaacattttcgaaatatacgcaaagtgatacaatacgtactctggggagaacattacgcaatgcataaaaagtgtttggcgaatgagaaaaaacaatagttatgtaaaaaataatgcaagtatacattctcaatttcaatataacttgataaaaaaaagaaagtttataaaaaaagttttttgatgaagtgatttcggattgaatatattattgccaatgcttatcatttactattgctaattaatttttaaattataatgatactagaaaaacagtttttaaataattgtataatctttcaggattaaagaacataacttctatgtgctcaaacgtttttgacaaaagaaagtacgaaatattaatttatagatgtaaaaacaattaaaatagattaaatgtatttagtgtaggcggtaccacttgcaatttagtttgttacatcatgaccttaaccttaaacccattcgaaacccttgatctctgttttcaaaggcacttctctaaggcatcatgtttaagtccctgttcgatgccgcgcagaactcaacgttcaagtcgccattcactagcgtcaactgccagtcagccacgcccacttccgcccccacatccaccgcggtggtgacccccaccctcaaggatgttgctccacgccagctgactcgaaaccacaacatcgctgccgctgccgttgccgagggtggtaagtgggacaagtcctcctggaatcaccaatgagttggatatataagtattgttaatacctctgcagactcctgcgaattcggctcgaaccactacttcctgctgtgcggcctgggcggcatcatctcgtgcggctccacacacaccatggtggtgcccctggatttggtcaagtgccgcctgcaggtggacccggccaagtacaagagcgtgttcaccggcttccgcatcagcttggctgaggagggcgtccgcggattggccaagggatgggcacccaccttcatcggctactcgatgcagggtctgtgcaagttcggcctgtacgaggtcttcaagaaggtgtacggcgatgctatcggcgaggagaacgcattcctctacagaaccggactctatttggctgcatcggcatccgctgagttcttcgccgatatcgccctggcgcccatggaggcggccaaggtcaagatccagaccacgcccggattcgccaagacattgcgcgaggctctgcccaagatgaccgcccaggagggcgtgaccgccttctacaagggcctggtgccattgtggatgcgccagatcccatacaccatgatgaagttcgcctgcttcgagcggacgctggagctgctgtacaagtatgtggtgcccaagccacgtgccgattgcaccaagggtgagcagttggtggtgaccttcgccgccggttacattgccggcgtgttctgcgccatcgtctcgcatccggcggacacagtggtgtccaagctgaaccaggccaagggtgcctccgccctggacgtggccaagcagctgggttggtctggtaagtgctgacatttgatgggatttcctgttcctcatctaaaacattcgcttttttccaattcaggattgtggggcggtttggtgcccaggatcgtgatgatcggcacattgaccgccgcccagtggttcatctacgatgccgtcaaggtgttcctgcgcatgccacgcccaccaccaccagaaatgcccgagtccctgaagaagaagctgggcgtgactggcgagcagtaaaccaaatataagctaactgtttttaaatttagagcgagcagaatgttaatcgaattaaacttgatttgtatagataaaccacacagtaaataaaaaccacacaaaaattaaacgctctttgtatcaaggggtaaaagaaaatttcaatttaaaataaccgccaagctcgagtgcacacctccatattttccaacactaatttagcacttttagttcaataccgaacagctgagcttaacagccccgtccaatgtcaacaaacagagggaagaagaagcagcattcaacacgcggttttttgaactgcatttttatttcacttttattaagttaaaatagataattatggttcagaataaacagaaaacagcgaagccaccaaagctgctaaaaggcgcagccaaggagcctgcactttcgaaggcggaaaactggcagaaggttaaaatcaagggccacgtgatatccgacgatggtggcggcttcgagggattaattggcctggaggtcctcaaggactacgatgcatcgctggtgaagtcctcgcagaagaggaccacatcccggaatccagacagagagcgcaagctgaagaagaaaaagaggaaggtatcgaagggcgacgaggaggaatccagcgagagttccagcgaatccgaaagcgaggatgaagtggcggtcgctgctaggaccagtaaaaaagcccgcctggccgagcgtcatgcgcaaaaaatgcagaaactgcgcgagaagcgtgaaaagcgaaaggagctgcggaaacagaagaaatcgaagggcaaggaaaacgacaacagtgaggagtccagtgatgagcacgcggcagatcgtttcgcattgctcaggccaccaccatcggacgatgaagaagaagtggtcaaggcggaagattcggcagaccaacaggagtcgaccgacgaagaagcacccgaattagtgcccatctccacaggcgaagccgaagatatgtccgcctggaacggcctgggtgttcccgcttccattttgcgtgccctcggcgagcaaggcttcaagacgcccacacaaatccaggcactgacgctgccggctgcaatccacggcaaaaagga

SEQ ID NO: 19346 - DNA, 1371 bp, DROSOPHILA
tctggcgcacgacgaacgttgctttgggtccccacatttcagcccaacaacgactctatacttcaactatatctaatccctatctgcacttcacctccttcgataccccgcactttgaagcacttctctaaggcatcatgtttaagtccctgttcgatgccgcgcagaactcaacgttcaagtcgccattcactagcgtcaactgccagtcagccacgcccacttccgcccccacatccaccgcggtggtgacccccaccctcaaggatgttgctccacgccagctgactcgaaaccacaacatcgctgccgctgccgttgccgagggtgactcctgcgaattcggctcgaaccactacttcctgctgtgcggcctgggcggcatcatctcgtgcggctccacacacaccatggtggtgcccctggatttggtcaagtgccgcctgcaggtggacccggccaagtacaagagcgtgttcaccggcttccgcatcagcttggctgaggagggcgtccgcggattggccaagggatgggcacccaccttcatcggctactcgatgcagggtctgtgcaagttcggcctgtacgaggtcttcaagaaggtgtacggcgatgctatcggcgaggagaacgcattcctctacagaaccggactctatttggctgcatcggcatccgctgagttcttcgccgatatcgccctggcgcccatggaggcggccaaggtcaagatccagaccacgcccggattcgccaagacattgcgcgaggctctgcccaagatgaccgcccaggagggcgtgaccgccttctacaagggcctggtgccattgtggatgcgccagatcccatacaccatgatgaagttcgcctgcttcgagcggacgctggagctgctgtacaagtatgtggtgcccaagccacgtgccgattgcaccaagggtgagcagttggtggtgaccttcgccgccggttacattgccggcgtgttctgcgccatcgtctcgcatccggcggacacagtggtgtccaagctgaaccaggccaagggtgcctccgccctggacgtggccaagcagctgggttggtctggattgtggggcggtttggtgcccaggatcgtgatgatcggcacattgaccgccgcccagtggttcatctacgatgccgtcaaggtgttcctgcgcatgccacgcccaccaccaccagaaatgcccgagtccctgaagaagaagctgggcgtgactggcgagcagtaaaccaaatataagctaactgtttttaaatttagagcgagcagaatgttaatcgaattaaacttgatttgtatagataaaccacacagtaaataaaaaccacacaaaaatt

SEQ ID NO: 19347 - protein, 374 aa, DROSOPHILA
MFKSLFDAAQNSTFKSPFTSVNCQSATPTSAPTSTAVVTPTLKDVAPRQLTRNHNIAAAAVAEGDSCEFGSNHYFLLCGLGGIISCGSTHTMVVPLDLVKCRLQVDPAKYKSVFTGFRISLAEEGVRGLAKGWAPTFIGYSMQGLCKFGLYEVFKKVYGDAIGEENAFLYRTGLYLAASASAEFFADIALAPMEAAKVKIQTTPGFAKTLREALPKMTAQEGVTAFYKGLVPLWMRQIPYTMMKFACFERTLELLYKYVVPKPRADCTKGEQLVVTFAAGYIAGVFCAIVSHPADTVVSKLNQAKGASALDVAKQLGWSGLWGGLVPRIVMIGTLTAAQWFIYDAVKVFLRMPRPPPPEMPESLKKKLGVTGEQ

SEQ ID NO: 19348 - DNA, 4924 bp, DROSOPHILA
tgtcaatacggtttcaatgagatactctcctggtaggtgaccatcctgtatacccaacttgcatccataacccatccattttcagtcttgccgcagacatggtgctcttcaattcccaattcaactgcaactcgtttttggataatgttcagccctttctgaatatgcagccagactttaaaatcaagcatattcgcgagcaaatcgagaagaaatgccaagtgctgtactttcccgtcaatttcgaacggtttcccattcggaaggagtgcgtaaagggggagactgctgaggatctggatgagaagtgcatccatcttatttggccacatcgctgggagcacgataagaatcccaaactactggtggatacgctctgtcagctccatgagcgacaagtggacttcaaggtgactatttgtggcgagagttaccaggagataccggaggaattcgagcatatacaggagaaactgggcagcaagctggtgaactttggccatctggagcgtgaagagtacttgaagaccctgctgactggggacattgtgatatcaactgccgaccatgagttttttggagtagcaatgctggaggccgctttctgcggctgttatcccattgcgcccaacaaattggtctacccggaaatctacccaaaggaaaacctctacaacacctccaatgcgctgacgaagaagctctacaacttttgtagaatgccgagggtctttcgcaagcagcgcgatcaattctttgagaactttaatttcgatcgtttttcggcgaaagaactagtgccaaaatatctggacatattcaataaacatattgcagacgaacaaagttagaaatcgaaggtttggcaaatgtctatcaaaatattctctgtaatataatagatatatttttgaataaatatatctctcttctgtaacctacaaagccaaaaaaaaacgatatatatatgtaagtcctttgtgttaaaacacgcttcattcactttaagcatttatttatttatgaaatatccgaaaaaaatgggatacaatttaaggtggatgtaaccaataatgccataaatgtagcacaataaattctatttcgaaaacacaatttggatgaaaatttggggattcatatctacaatattataaagatgatgcgtatagaattttgtttgtaatacctgaatatagccacatagaatttagagcgaaccaaagcggtcgaacgaattcaccaaacacttttgtttctcgaagttcagggagcgcgaaatacaggacagatttttgaggcacgcataagcctgctcctccataaacatttgatctctggacttgccacaagcgacgcgtgcccacttgggatcaatgacatgatcgtaggtcaagccaccgcggtacttgttaattctgcgattatggaatggtcgattctcctttctgccctcgtcgaacggcaggtcctgttcgctgcacagcgtgtccttcaaaatatcgcccggcgatgtgagaaacttgctgggcgtctcggtttcgaagggttgaatcctcttggcggagccagcgttgtatggatgattggagctccaagttgagagcaatgacttcctggcacgtttcatatgcggcggcgactgagcattgtattcggtgcttagcgttgagttctgatcggcggcgcccatcattttggaattgtttgcggtcagcgagttgctcagatgctcttcatggatgatttcggccagatcctccaccagactggatgggctggagggctcgtatcgacgaccgtccctcttcttgccgatggcagcaagtgcctttttgaagggcgttggtgttcgtggtccaagttgacctacaaataacgatgattgtgtgtattcaagatgcatttgaagccaacagtggcttgtacttactcttgtgtggagtttctatcgacgatgtctccatttcctttttgatctccattccaacgcgattatagaccttggttaccggcgtgctagcccgcagatccatatcttcaaaggtggtcaggcaaggcgacttgaggaagtgactcggtgaaaagggtagcgacttaatgggcgatatgacgggcgaactcggtggtcgcgacctggcgtttccggcggcttcttcctggttgaatgtctcacttgatgaacatcctgcctgatggtgagtttcgggaatgtgtttgcgtgtacgcttcaatatgatcggtgtttggcgcggcatggtcaacttaatgagatgctgcatactgaggtgtgccagattggatcccttttgatgatcgtcttgtgattcctgtgccagatcaccacctttcacggcagtaaccgaagcgccatcggcgttttcggatttattaactgcctcaccaccagattccttgttatgttgcatattattcatacacttgctgatgccaccggacttgatcagcgtgatgagatgggttcgcgaactcttcaaatcgctaccagatgcattaaccgatctgcgttcgacgtcatatttgcgacgcattgttgaattccaatggtttttaatggcgttatcggtgcgtccgggcagacgtttggcaatctttgcccactggttgcccagctccaagtgagcctggtagataatctcgtcctccttttcggtccaggccgttttcttgatattcggattgaggtggttgtgccatctctcgcggcactgtttcccaattcgtccgttcagatatcgtgcaattagtgtccatttcttgggcccgaagttgcgcaccagcttaataaccatgtcgtcctcgtcccgcgtccacgggcccttgattagctccggattgaggactttggcccaacgctgctgcacttgctgttccaggcgatccttgaaatgcggtccgataatctcccagttctcaccgtgcgtctccaccagctgcttgagcaacacatcctcggacttggaccagcgtttgccgaatccatagttcggatgcactgcaccgatgctagttttaccgcttttgttctgtcccttttgccccgtcgtcttggagtcctgtagttcgggcgagtccagtggatagcccgaatcggcattgctgttctgttgtgaatccttgtcgcaaacttgggtatcctcgttctccgagtactcggactcctccgaatccgaattgctgccgtaattcatcagctcctcgccgttttcagtgctcgcacttgccatcttaagatcaactttataggtatatatatatgaataatggcgctctttgtatatatgtgtatgggttctttaacgctgcttgcggggcgaacaaaagtgatagatctccggctctgacttgttcccacgctggaaacgatgaacgtcgcgtttgcagtacaagcacttgggcaaatgatccagaatatgcggatggtagaatatgtagtgcgagcaaatgtcgctgtacgagttacacttgaattgatttccgcacgtcaggcagtcgaccagttcacgttgatgatcgctgcgcaatattgggtgcgtcgcatcgctctcggtccgcccaaaatcgaatagttttgtttgctgctcctcgaggcgattttggtttggattcgtgttctttgttacttgaagattacagatatttgtggacatactcattcaggcagcgaactaaaaagcagatgcaagttttacgatattacgtttatgccaaacattttgatgctctatatttagcactgaggaaaacgggggaaaaaaattaccactcgcacatttgtcttcatctaaagtggtgctaccgttatttcaaattcaaactgctgggctatgggtacacactttggtgtttttgatcagttcattcacgttttcacactggaattttacggcgtcgcatcttattatattaaatgtagtacttagtgtgaccgttacacgagcactagcgttgtaattcaaaacgattaaaatctatcgataaataatcactacggtaatcggcacgtttccactagaagtcaatatcttgtacgatagctgggatagtatcgatatttagctatcaacttcttggaaatattgttaaaaagttgccatcggataaaataattttgtcagaattgccaaatttagttgtcagtagcatttatagggactgaaaaatatatttataaaactattaacttcacctatacatttaagatatttccattgaacgcatcacttcaacgttaattgctatgtttctttagttttcaattgaaatgcagttttttattttgtaaaatactataaaattaaaaatttttccaaggaggggttaaagcttaacatctcctggatttaaaacttgacgtatattaatattaatacgtgaatcgtccatatatctcgaaaaaggctcccaaaattgagggttgccaacatcatgaaataaatctttatcaattgtacgcgttttaatatctgcattatcgacatcttcaattatcagtgataaagtcgcggaagcctgagttttgatgatacgaggaactgcgtgatagcatagacgcgattctccggacattatcataacgtccccggattgaaggtagatagcggttggcttttcttctaaagatcttccaccaattagaaatattgcagtctgaccaaaactgtaagcataaaattaaaaaaaaattagctgcacggatatgtttaatccgtgatatattacctaaaagaaaacaaaggggccgatttgtttggttcagagtgatctgtgtgacccgataacgtactaccaactggatagtaatttacaattgcggcttctggcttaaaatccgcgtatcccaacgcttgcgcaaacaatccgcatagactgctcaaatcttcgggaaacggcgactgcatct

SEQ ID NO: 19349 - DNA, 2860 bp, DROSOPHILA
aataagatgcgacgccgtaaaattccagtgtgaaaacgtgaatgaactgatcaaaaacaccaaagtgtgtacccatagcccagcagtttgaatttgaaataacggtagcaccactttagatgaagacaaatgtgcgagtggtaatttttttcccccgttttcctcagtgctaaatatagagcatcaaaatgtttggcataaacgtaatatcgtaaaacttgcatctgctttttagttcgctgcctgaatgagtatgtccacaaatatctgtaatcttcaagtaacaaagaacacgaatccaaaccaaaatcgcctcgaggagcagcaaacaaaactattcgattttgggcggaccgagagcgatgcgacgcacccaatattgcgcagcgatcatcaacgtgaactggtcgactgcctgacgtgcggaaatcaattcaagtgtaactcgtacagcgacatttgctcgcactacatattctaccatccgcatattctggatcatttgcccaagtgcttgtactgcaaacgcgacgttcatcgtttccagcgtgggaacaagtcagagccggagatctatcacttttgttcgccccgcaagcagcgttaaagaacccatacacatatatacaaagagcgccattattcatatatatatacctataaagttgatcttaagatggcaagtgcgagcactgaaaacggcgaggagctgatgaattacggcagcaattcggattcggaggagtccgagtactcggagaacgaggatacccaagtttgcgacaaggattcacaacagaacagcaatgccgattcgggctatccactggactcgcccgaactacaggactccaagacgacggggcaaaagggacagaacaaaagcggtaaaactagcatcggtgcagtgcatccgaactatggattcggcaaacgctggtccaagtccgaggatgtgttgctcaagcagctggtggagacgcacggtgagaactgggagattatcggaccgcatttcaaggatcgcctggaacagcaagtgcagcagcgttgggccaaagtcctcaatccggagctaatcaagggcccgtggacgcgggacgaggacgacatggttattaagctggtgcgcaacttcgggcccaagaaatggacactaattgcacgatatctgaacggacgaattgggaaacagtgccgcgagagatggcacaaccacctcaatccgaatatcaagaaaacggcctggaccgaaaaggaggacgagattatctaccaggctcacttggagctgggcaaccagtgggcaaagattgccaaacgtctgcccggacgcaccgataacgccattaaaaaccattggaattcaacaatgcgtcgcaaatatgacgtcgaacgcagatcggttaatgcatctggtagcgatttgaagagttcgcgaacccatctcatcacgctgatcaagtccggtggcatcagcaagtgtatgaataatatgcaacataacaaggaatctggtggtgaggcagttaataaatccgaaaacgccgatggcgcttcggttactgccgtgaaaggtggtgatctggcacaggaatcacaagacgatcatcaaaagggatccaatctggcacacctcagtatgcagcatctcattaagttgaccatgccgcgccaaacaccgatcatattgaagcgtacacgcaaacacattcccgaaactcaccatcaggcaggatgttcatcaagtgagacattcaaccaggaagaagccgccggaaacgccaggtcgcgaccaccgagttcgcccgtcatatcgcccattaagtcgctacccttttcaccgagtcacttcctcaagtcgccttgcctgaccacctttgaagatatggatctgcgggctagcacgccggtaaccaaggtctataatcgcgttggaatggagatcaaaaaggaaatggagacatcgtcgatagaaactccacacaagagtcaacttggaccacgaacaccaacgcccttcaaaaaggcacttgctgccatcggcaagaagagggacggtcgtcgatacgagccctccagcccatccagtctggtggaggatctggccgaaatcatccatgaagagcatctgagcaactcgctgaccgcaaacaattccaaaatgatgggcgccgccgatcagaactcaacgctaagcaccgaatacaatgctcagtcgccgccgcatatgaaacgtgccaggaagtcattgctctcaacttggagctccaatcatccatacaacgctggctccgccaagaggattcaacccttcgaaaccgagacgcccagcaagtttctcacatcgccgggcgatattttgaaggacacgctgtgcagcgaacaggacctgccgttcgacgagggcagaaaggagaatcgaccattccataatcgcagaattaacaagtaccgcggtggcttgacctacgatcatgtcattgatcccaagtgggcacgcgtcgcttgtggcaagtccagagatcaaatgtttatggaggagcaggcttatgcgtgcctcaaaaatctgtcctgtatttcgcgctccctgaacttcgagaaacaaaagtgtttggtgaattcgttcgaccgctttggttcgctctaaattctatgtggctatattcaggtattacaaacaaaattctatacgcatcatctttataatattgtagatatgaatccccaaattttcatccaaattgtgttttcgaaatagaatttattgtgctacatttatggcattattggttacatccaccttaaattgtatcccatttttttcggatatttcataaataaataaatgcttaaagtg

SEQ ID NO: 19350 - protein, 657 aa, DROSOPHILA
MASASTENGEELMNYGSNSDSEESEYSENEDTQVCDKDSQQNSNADSGYPLDSPELQDSKTTGQKGQNKSGKTSIGAVHPNYGFGKRWSKSEDVLLKQLVETHGENWEIIGPHFKDRLEQQVQQRWAKVLNPELIKGPWTRDEDDMVIKLVRNFGPKKWTLIARYLNGRIGKQCRERWHNHLNPNIKKTAWTEKEDEIIYQAHLELGNQWAKIAKRLPGRTDNAIKNHWNSTMRRKYDVERRSVNASGSDLKSSRTHLITLIKSGGISKCMNNMQHNKESGGEAVNKSENADGASVTAVKGGDLAQESQDDHQKGSNLAHLSMQHLIKLTMPRQTPIILKRTRKHIPETHHQAGCSSSETFNQEEAAGNARSRPPSSPVISPIKSLPFSPSHFLKSPCLTTFEDMDLRASTPVTKVYNRVGMEIKKEMETSSIETPHKSQLGPRTPTPFKKALAAIGKKRDGRRYEPSSPSSLVEDLAEIIHEEHLSNSLTANNSKMMGAADQNSTLSTEYNAQSPPHMKRARKSLLSTWSSNHPYNAGSAKRIQPFETETPSKFLTSPGDILKDTLCSEQDLPFDEGRKENRPFHNRRINKYRGGLTYDHVIDPKWARVACGKSRDQMFMEEQAYACLKNLSCISRSLNFEKQKCLVNSFDRFGSL

SEQ ID NO: 19351 - DNA, 7495 bp, DROSOPHILA
atctttggattccattttctaaccagttaactaaaaggatcgtataggttgttgccttagttagcttattgattttaatccaaaaccacgcatatccaacgaaccacggaagaaaactgacaaccaaagtctgctttaattttaaaatttagttgttttcaattccaaactagccaagaaacaaacgcaagtacctaacaaatatattgtaattttgtggccacaagtagccgacggagctggcgagaggatcttagtataattttaatcggactgcgtagacactagaattaaatgattacccaaaggtcgttgcaaaaataaaagctgagtaattaacaaggttgtttgtttattttctatcacctaataaaatgggatcattcttttctaaagataagtttatctgatgaccaatttgaaaataaatttacatacatccttacatagatggcgctaggtaaagtttctacatgcgcgcctttaagtaataattcaactattgcttacaagtttatttttttaattgaaaactttgtggtaaatttgaaggcaataaatataatcatgtatttaaccctttgtcatttttttatccactttcttgcgcgcaggggcaatgggcattatttaaaattagcggtattatgaatgcgatgtctatccgatgattttggagtacatcttgaaagaagaaaattaaacattcgctacgctacattcgcttttgcgtgacatgaaatataaatcaatcttatgaatctatttatttcctgagctttacgaaaaatgtttatggtttatatgagaattacttctcaattttgtatgtataaaattattaaggaagcgcagcacaacaaataccgtagtcaaaataaataaccgatatcgtagagaagtaaacacatcggctcatcgctagatccaagtgtctggcgttcgctgttactgtcaaattgacaagaagaagaggcataacaaaagtatttttgcattttgcaagtggaatattcctacgccctaattgattgaacaaatctaaagacgacggataatgcagacgaccaactggatacatgattgaatccagccgaaccacaatgtaaatattaaatggaagctgacgcaggcagttttgcagcacagtggcgtcatacatatttctctttgttgtttttcaatggtctgcaaatacgtatagtatagtattagtgaaaaatgagacttgtgcctgacgcattagctaatctgtcctggacacattaccccaaggtggggcatctaaatcttgatagtaacagccatttcactctttcagcaccaaggagtcatccagagcaccgaataaatcgcatgggataaaaacacgaccttagcagaaggatcgaccatggatccgcagaagatcaccgagctggctaacctgctacggcagaacggcgacaaaatattgagctccgaatttaccttgacgttatcaggtgaggccgctggagctacgccagaaactagcacgcaaaatgctaaatgcatgcgggtgttggatgatgactggaccttactacgccccaatacaagttcgatcacttatcgctgaacacattctccggcacaggttccctgctgcgtgcgctaaacgactccttcaccctgatcgcggacactgaaatcggaactggcgcgggttacctccagccgcagtcttttcaggtggtcaagcccatcaacgccaagtccagcgtcttccccgacctccagcttgtccatgactttgtgcagaaaacgacgcttttgaagctgacctactttcccagcgaacactattttgagggcgccatcgacatagcgaagtttcgagcactgcgccgcctcgaggtaaacaaaatcaacatcggccaagttgtgggcatccaaccgctgcgcggccagctgcaacatttgatctgcgtaaaaagccttaccagcgtggacgacattatcacgcgctgcggcggcgacaactcgaatggctttgtgtggaacgagctaaagacggccgatttcagctacaacagcctgcgcagtgtagataccgccctggagttcgcacagcacctgcaacacctaaaccttcggcacaataagctcaccagcgtggccgccatcaaatggcttccgcatcttaagaccctggacctgagctacaactgccttacacaccttccacagtttcacatggaggcctgcaagcgactacagctattgaacatcagcaacaactacgtagaggagcttctggacgtggcaaagctggacgctctgtacaacctggatctgtccgacaactgcctgttggagcactcgcagttgctgccactgagtgccctgatgagcctgattgtactaaatctgcaaggaaatccccttgcttgcaatcccaaacatcgccaggcgactgcacagtacttgcacaagaactccgcaactgtgaagtttgtcttggactttgagccgctgactaaggcggagaaggcgctgacgggcagccaaaagtggcgctacataagcgggcttagccaccgctcgcccaggagtacctccatgtccatcaacagctctagtgcttccataaacaccagcgacggctcccagttttccagtttcggctcgcagcgttcggtatctataagaggaaagaactacactttggaagacaaccaatcgatggacacctcgcaatctagcaaacgcataagttcgtgtaaaatcaggacagtggacatagaagagagcagtgagatcaatacagacgcagcatccgtttccacgccaaatcctcgatccgaatatgaagaggaaccagataattcgcacctggagaccaagaaaaaaatcgagacactacgtctcacttatggcaatgaatggttgaagtccggcaatgctgagctgatgctgggaatcgaaacgccgcagccaactgaacgggagcgcaatgagtctcgccagcttttcaatgagtatctgggcgaactatctggattcacagaagcaaaaaatgactctgagcaccacaacataagctccacacccacgaacaacgttttgttagcttccacctttgacgccaccattactcctattaaatctgaagcgaacgatacaagtggtcaaactctgtacgaaacctgcactgagggtgaagagacaaactacgagagttttggcaacaacactacggagctgtcgacagaagaacgtccgcctgacaggcacgaggaattgttgagactttatgcaagtagctctaatgctcaggatgaggatccgggtaagacaagttgatcagtgtagtaactcgttactaaagttcaatcaaacattgcagtatccgatgctgagtctgatgaggagacctacatagtctaccatgaacagaaaccgagcgaggttctgtttcttaccatatcatcgaattttatacgcgaaaaagacacgttaactgaaaggtacgttttaaacacactgaatggacacaatgttcatgtcaatcattttatcatataggacgaaagccaaatggagtctaaaaatcctcgagtcatgcgagcgtgttaggtccaacaccttgcgcatcaatttcgacacaatgcgcaaggataaacaggaacgtatctactgcgtggagaatacgctgtgccaggttagtcaactggttagttctaataacaggcaacgaaaatctcattttgtccttttgaaggaactggagaagaaactacgagacattctatcgcagcgtgatctaaccgaaatgaacatatccatctatcgctgtgtgaattgcctaacgcagtttactattgagcaaaaaagcaagcgatataaagcaaagggtgagtacagcagtacagcagaaataaaagaaactatagcttgaactacattcattttagaattgcgatgtccggattgtcgcagtgtctatgtggctgaagtaaccgaattgtcctcatctttgtccaaaccttctggtgaagtggcggcagagcccaaactttcacccgccatgattgtggaggaatccccagtggaggaactcgctgcggcgataaataaggaagaaagcaacagcattggcaagtccttggccagttttcttttttactttgatgaagttctagaaaatttctaaagaatattgcttttgtagttcagtttatggtttcagaagcatttcattttaaagagccattttttgagattcgctttagtttttgttgtgtttggtgtataattttaagtttgtgttggatatatttactgtacattaatttaatttttatttctttttattttatttgcatgcgaacacaaatcgaaaatggcaaaaccaatctaacttttgtatatttacattgttcttttggactttttctctcacccaactaccgacaacaataacattgttgtgatgtaaaaacttaattaatactttagtggccaactgcaggctaacaactgcaaaaatcacacccaagcttaggagtttgacgcaagccaccaaaagttaatatgccaatttgtatactttttatttcacttaacaatttgcgtttcgcttttgttccataatgtgaagcagcatttggacgtgaagcaaagataagctaacctactaatagttcttggacgacgacgtcgtttacaagtcttataaaattttattgcacgtcttgagccttggtacccaaaattatgtattatctgaaacaaaatttagctgtttataagacctgtagataccgacaaatatatcaaaatttaagcaatagctaaagctttattaatcttagagagcaatgctgcttccattaataaacaattaagttaattagagcaccagactaatatttcaacattataggttccgccaattcgctaaatggaagcagctcttgctcaaaaattaccaactcacagagctctttcgactccaatcaatccgtagtgggcagctcgaacacggatcgggatatggagtttcgagccaacgaaagtgatgtggacatcatctccaatccgagccagtccagcatagaggtactagatccgaactacgtgcagagcgccagtcgcaagacctcagaagagcgccgcatatcccagctacctcatctggagacgatacacgatgaagtagcgaaatcgaagagcttcatcgaacgcgagtttggtcagcttctggcggagcaggctcagcctacgacaccttcgactgcagctcccttggctcctgcaaaatcggctgtcccatcccatgtaccgctgacagagagcagctcgtcgggatccgtaacggacagcatatgtactacctacgagcagcaggccactgatgcgccacaaaatctacaaaattccctgctcaccgagtcgtcaaacagccaagttagtggttcggatgcggaatctaatagccgtttgaaaagcgccgaggatgccagcctgctgcctttcgcatctgtatttcaatcaaccaatctgctcatgtccagctcaaagaagttgatcgagtcggaggcaactgtttttggtacccagccgtacaagtttaactacagcgactttaatgatatcgatcaccgtctgaagctctacttctaccaacgaaagttcaaagaggatggcgagcatttcaagtggttggccaaaggtcgcatctacaatgagcagacccaatccttgggagaagggcttgtggtaatgtccaactgcaagtgctatctaatggaggcctttgcagaaccccatgacgatgtggccaaatggctgaggcaggtcgtcagcgtggcagtcaatcgtttggtggccattgatctgttgccctggaaacttggcttgtccttcaccttaaaggattggggaggatttgtcctgctgttgcatgacatgctgaggacggaaagtttactgaattatttacaacgtgagttaactttttgcatgttgcttttttcctaatacttattatattttttaacagaaattcctctgcctgagcagtgcaagctgaatcatcaaccatctgtcacactcagccatcagtgggaaactattgcgtccgaaccagtcaagatgtgctccctgattcccagctgccaatggatctgtgaccaggagaagagctcctttgaaccctccctgctcctaatcacggagacacatttgtacatctcaggaaatggcaaattctcgtggctgtcagataaagttcaggaaaagcccattcaaccagaacttagccttaatcaaccactgagcaatttggtcgacgtggagcgcattacagaccaaaagtatgcgatcaactttattgatgagacgcaaaacaggtgcgagatatggaagttgcagttcgaaacgcatgccaatgccgcatgttgcctgaatgtcatcggaaagggatgggagcagctatttggagtgccattcagtctctctggaacgtgaggagcgaattacactagaaaattgaatatagcctgtaccaattattgtgcaaagtttaaaattgttgatcttaattgactatgttatttaatgtcagattagttttattaacttaggctagagctttcaatcaataagaaatggtgctgtaccacgatttaaatgtaaatatttataaatatagaggttattattttttgaagtccttgcaatatattcatatattacagaattaaatcgtctaaattgttttatttgttgttagatgaattatagttggtatcagtaagttgatattacatatttgcttctatttacacatgaataatattattggaaacaaaagaactacaatattgtcaaggaattttgtttgctaattaaataatattcacacgtgagttataaatgttatatgcatttaaactcggtcggatttattttcgacttatctgttagtgctatctacttgataatttcggcatagaggtttttcatttctgttttaaatcggatgtctttataaactattatctatttctattaattatctatatacagtacacttcttatgctgactcactcatcgaagagtccacttaaccaggtgtcttacttatcgcccagctgatctgcgatccagtcaagatgctcctccttgaagcgaggatctgccatggtcagagccgtcgacttggagctgtagtaatagaaaaccgacactgcgggaaagaggaagatattaggataagtgtggaatgaatatttccggaactcactgatgcgctgtgccactgatagggcaatcagacccagtggccaatgatgaccgtcctcttctggcggctgacggtattggtagatgatccaaaagtgctgggaggcggacagaaggaagtagatggtaatgctggccatgaagagcttgcaattccgcaggattatgtgcgaggcgccgacctggtacacacacgtcgagtgcagggcgagggtgaacagc

SEQ ID NO: 19352 - DNA, 4047 bp, DROSOPHILA
tgcaagtggaatattcctacgccctaattgattgaacaaatctaaagacgacggataatgcagacgaccaactggatacatgattgaatccagccgaaccacaatcaccaaggagtcatccagagcaccgaataaatcgcatgggataaaaacacgaccttagcagaaggatcgaccatggatccgcagaagatcaccgagctggctaacctgctacggcagaacggcgacaaaatattgagctccgaatttaccttgacgttatcaggttccctgctgcgtgcgctaaacgactccttcaccctgatcgcggacactgaaatcggaactggcgcgggttacctccagccgcagtcttttcaggtggtcaagcccatcaacgccaagtccagcgtcttccccgacctccagcttgtccatgactttgtgcagaaaacgacgcttttgaagctgacctactttcccagcgaacactattttgagggcgccatcgacatagcgaagtttcgagcactgcgccgcctcgaggtaaacaaaatcaacatcggccaagttgtgggcatccaaccgctgcgcggccagctgcaacatttgatctgcgtaaaaagccttaccagcgtggacgacattatcacgcgctgcggcggcgacaactcgaatggctttgtgtggaacgagctaaagacggccgatttcagctacaacagcctgcgcagtgtagataccgccctggagttcgcacagcacctgcaacacctaaaccttcggcacaataagctcaccagcgtggccgccatcaaatggcttccgcatcttaagaccctggacctgagctacaactgccttacacaccttccacagtttcacatggaggcctgcaagcgactacagctattgaacatcagcaacaactacgtagaggagcttctggacgtggcaaagctggacgctctgtacaacctggatctgtccgacaactgcctgttggagcactcgcagttgctgccactgagtgccctgatgagcctgattgtactaaatctgcaaggaaatccccttgcttgcaatcccaaacatcgccaggcgactgcacagtacttgcacaagaactccgcaactgtgaagtttgtcttggactttgagccgctgactaaggcggagaaggcgctgacgggcagccaaaagtggcgctacataagcgggcttagccaccgctcgcccaggagtacctccatgtccatcaacagctctagtgcttccataaacaccagcgacggctcccagttttccagtttcggctcgcagcgttcggtatctataagaggaaagaactacactttggaagacaaccaatcgatggacacctcgcaatctagcaaacgcataagttcgtgtaaaatcaggacagtggacatagaagagagcagtgagatcaatacagacgcagcatccgtttccacgccaaatcctcgatccgaatatgaagaggaaccagataattcgcacctggagaccaagaaaaaaatcgagacactacgtctcacttatggcaatgaatggttgaagtccggcaatgctgagctgatgctgggaatcgaaacgccgcagccaactgaacgggagcgcaatgagtctcgccagcttttcaatgagtatctgggcgaactatctggattcacagaagcaaaaaatgactctgagcaccacaacataagctccacacccacgaacaacgttttgttagcttccacctttgacgccaccattactcctattaaatctgaagcgaacgatacaagtggtcaaactctgtacgaaacctgcactgagggtgaagagacaaactacgagagttttggcaacaacactacggagctgtcgacagaagaacgtccgcctgacaggcacgaggaattgttgagactttatgcaagtagctctaatgctcaggatgaggatccggtatccgatgctgagtctgatgaggagacctacatagtctaccatgaacagaaaccgagcgaggttctgtttcttaccatatcatcgaattttatacgcgaaaaagacacgttaactgaaaggacgaaagccaaatggagtctaaaaatcctcgagtcatgcgagcgtgttaggtccaacaccttgcgcatcaatttcgacacaatgcgcaaggataaacaggaacgtatctactgcgtggagaatacgctgtgccaggaactggagaagaaactacgagacattctatcgcagcgtgatctaaccgaaatgaacatatccatctatcgctgtgtgaattgcctaacgcagtttactattgagcaaaaaagcaagcgatataaagcaaaggaattgcgatgtccggattgtcgcagtgtctatgtggctgaagtaaccgaattgtcctcatctttgtccaaaccttctggtgaagtggcggcagagcccaaactttcacccgccatgattgtggaggaatccccagtggaggaactcgctgcggcgataaataaggaagaaagcaacagcattggcaagtccttggccagttttcttttttactttgatgaaagctctttcgactccaatcaatccgtagtgggcagctcgaacacggatcgggatatggagtttcgagccaacgaaagtgatgtggacatcatctccaatccgagccagtccagcatagaggtactagatccgaactacgtgcagagcgccagtcgcaagacctcagaagagcgccgcatatcccagctacctcatctggagacgatacacgatgaagtagcgaaatcgaagagcttcatcgaacgcgagtttggtcagcttctggcggagcaggctcagcctacgacaccttcgactgcagctcccttggctcctgcaaaatcggctgtcccatcccatgtaccgctgacagagagcagctcgtcgggatccgtaacggacagcatatgtactacctacgagcagcaggccactgatgcgccacaaaatctacaaaattccctgctcaccgagtcgtcaaacagccaagttagtggttcggatgcggaatctaatagccgtttgaaaagcgccgaggatgccagcctgctgcctttcgcatctgtatttcaatcaaccaatctgctcatgtccagctcaaagaagttgatcgagtcggaggcaactgtttttggtacccagccgtacaagtttaactacagcgactttaatgatatcgatcaccgtctgaagctctacttctaccaacgaaagttcaaagaggatggcgagcatttcaagtggttggccaaaggtcgcatctacaatgagcagacccaatccttgggagaagggcttgtggtaatgtccaactgcaagtgctatctaatggaggcctttgcagaaccccatgacgatgtggccaaatggctgaggcaggtcgtcagcgtggcagtcaatcgtttggtggccattgatctgttgccctggaaacttggcttgtccttcaccttaaaggattggggaggatttgtcctgctgttgcatgacatgctgaggacggaaagtttactgaattatttacaacaaattcctctgcctgagcagtgcaagctgaatcatcaaccatctgtcacactcagccatcagtgggaaactattgcgtccgaaccagtcaagatgtgctccctgattcccagctgccaatggatctgtgaccaggagaagagctcctttgaaccctccctgctcctaatcacggagacacatttgtacatctcaggaaatggcaaattctcgtggctgtcagataaagttcaggaaaagcccattcaaccagaacttagccttaatcaaccactgagcaatttggtcgacgtggagcgcattacagaccaaaagtatgcgatcaactttattgatgagacgcaaaacaggtgcgagatatggaagttgcagttcgaaacgcatgccaatgccgcatgttgcctgaatgtcatcggaaagggatgggagcagctatttggagtgccattcagtctctctggaacgtga

SEQ ID NO: 19353 - protein, 1289 aa, DROSOPHILA
MDPQKITELANLLRQNGDKILSSEFTLTLSGSLLRALNDSFTLIADTEIGTGAGYLQPQSFQVVKPINAKSSVFPDLQLVHDFVQKTTLLKLTYFPSEHYFEGAIDIAKFRALRRLEVNKINIGQVVGIQPLRGQLQHLICVKSLTSVDDIITRCGGDNSNGFVWNELKTADFSYNSLRSVDTALEFAQHLQHLNLRHNKLTSVAAIKWLPHLKTLDLSYNCLTHLPQFHMEACKRLQLLNISNNYVEELLDVAKLDALYNLDLSDNCLLEHSQLLPLSALMSLIVLNLQGNPLACNPKHRQATAQYLHKNSATVKFVLDFEPLTKAEKALTGSQKWRYISGLSHRSPRSTSMSINSSSASINTSDGSQFSSFGSQRSVSIRGKNYTLEDNQSMDTSQSSKRISSCKIRTVDIEESSEINTDAASVSTPNPRSEYEEEPDNSHLETKKKIETLRLTYGNEWLKSGNAELMLGIETPQPTERERNESRQLFNEYLGELSGFTEAKNDSEHHNISSTPTNNVLLASTFDATITPIKSEANDTSGQTLYETCTEGEETNYESFGNNTTELSTEERPPDRHEELLRLYASSSNAQDEDPVSDAESDEETYIVYHEQKPSEVLFLTISSNFIREKDTLTERTKAKWSLKILESCERVRSNTLRINFDTMRKDKQERIYCVENTLCQELEKKLRDILSQRDLTEMNISIYRCVNCLTQFTIEQKSKRYKAKELRCPDCRSVYVAEVTELSSSLSKPSGEVAAEPKLSPAMIVEESPVEELAAAINKEESNSIGKSLASFLFYFDESSFDSNQSVVGSSNTDRDMEFRANESDVDIISNPSQSSIEVLDPNYVQSASRKTSEERRISQLPHLETIHDEVAKSKSFIEREFGQLLAEQAQPTTPSTAAPLAPAKSAVPSHVPLTESSSSGSVTDSICTTYEQQATDAPQNLQNSLLTESSNSQVSGSDAESNSRLKSAEDASLLPFASVFQSTNLLMSSSKKLIESEATVFGTQPYKFNYSDFNDIDHRLKLYFYQRKFKEDGEHFKWLAKGRIYNEQTQSLGEGLVVMSNCKCYLMEAFAEPHDDVAKWLRQVVSVAVNRLVAIDLLPWKLGLSFTLKDWGGFVLLLHDMLRTESLLNYLQQIPLPEQCKLNHQPSVTLSHQWETIASEPVKMCSLIPSCQWICDQEKSSFEPSLLLITETHLYISGNGKFSWLSDKVQEKPIQPELSLNQPLSNLVDVERITDQKYAINFIDETQNRCEIWKLQFETHANAACCLNVIGKGWEQLFGVPFSLSGT

SEQ ID NO: 19354 - DNA, 13239 bp, DROSOPHILA
aatccagccgtatatcccacttcgatccctgatcacggatgagtgccgcgagcgcagctacatggcctttattatctcgggtagtgttcttctgggactactgctgctcctcctgatccttttgctgtggtggcgagtagtccaaaagcgacgacgtcgtaagctggacgtagtgcagccggaaccgcgcacttacaaggaaacccagatcgtataccaaatcgagaacgctggcctgctaaagactgatttgtagacggcaaggaaagacacatagatcacagatgcctgttttggactgtttttcagtaccatagcagatcatctacccacaagagacacacagctgaatgaagctaaaaggagcggtgggcggtggaatggttggagcaccattgccaccattaccaccaccgatcatacagaaccaccaatgcgtgacctttcgctgtaccaaaaccatagcctacagttagtcgtaatatatcttaatctaattattcataactcgcaatgttcgtcagttgtaagtggcccatgtatatagtcgcatgtaggctgggatcttgcccaaaaatatccaggtggattagccatatcccaccaaatacgtatgtatatggaataaatcaatttaaagccaaaatgtggtgctcttaaatgtatatgctacatatgtacatatatgttaatactatttggaagcgtaatttaaaataacaaaatttggaggacaaagtcagctaataaaatattgtatacaaattgcggatgacagacgagatgtacgtgtaaacaaaagttttattgatccctatagctttcgaaaatatttttagaaacttgacacatgtttacaagataatcataaactttcaaagggaaatagtgttggaaggaagcccatttttgtttacgatatttaaatatttataaataatattatatttcccatttcccaaatacattacgatttaaataatgatagtacttaaagaactcacccgatgggtaaatatgattccaaagcctggtgaacggtcaactgcggttcagatagggcaaatcctttagagagcagggtatgatgagtgttgatggtctcctcaatgccgctcatgtcctccacgtctttgtcatctgatgtgatacatatttggttttaatataatccaaagtaaaagtaatactcgcataaattacctggcagattgagctccttcttcatcagattggcactgcacatgccacccaaataggccaactcctgttcaagtcgtatcagacacgagttgctggcattaatctgagcgagatggaagaacacggtttagaaagagatagtattacacacggaatccactcaccgatgtgggattgtcatagccaaccactagacacttgaagccatagcgattgttgtgcggatcctgggcgtaaagtgaggctgtttccaaggagaactccacacagttgccgggcagaatgaggacattgtggagccaggtggaagcactataataataagagccatctaggatcatgactcctcattggaatatgttgctacttacgtattaaacttcttgaccacaatccactccctgtcattgggatcctggctgcgcagaggcattgaactgggtgcggcagcagatcccggagcatttccacaacctggactccggcagcaactggccatggtcaactggacactggcggagcgttgatgggtgttcggtgctgcgccactaccggcgatgccaccgcccgtgttgcgcctcctgtcccccgctccattcacattgttatccgcctgctccaaatagtcatccacatgcggcactggcggcgcctgcgatgctggacgcatgggaatcgacaggagcaggtaatcttccagttgagcagtgccacactgcgggtcaaactcgatggtgagccactgtacgcaaggtggaaactccacgcgatagctactaatgctagcactcttatacggatggtcactctccactacacaataatggttactggtggtgctgctcgaattggaattgccagaaccagaggtctgtgtagcaaaaatagccggctccggctgtcgctgatccttggacacgtgcaactgatttagggccgcgatatgcggcagaatctccttgattaagcccagaatctggacggaactctttggatcactgcaagccaaattggcaatatgtgcatagaccagtggcagtaacgtgtggaacatattggaggcggccagattaaagacctcgagcagctgcactgcagctgcttgactgcccactcctgccactccaccagatccatctgccacacttactccgccaccggcagccatgccggcaacctccagcggagcctcctccgaatcggagtgcagatgctggggcattgactgttgagccgattgctctgcgaactcaaagtcagcggttcgttcattgccatttatcggaacactttgactttgactctgactttggcttacactttggctttggccatttctcaagtctgccgattcctcgacttcggtggctccgatttcaatttccatctcgaagggattcgtggatcgcttgtcgaactttagggtctccatgagacccttgctaaacgactcaatacgtttgcccaaatccctggctgtggacagctgcggatctatggctgttggcagggcagctgttctggaattgtttgcccaattgatgtccatgtgctcctcgatgggtgtgatattgtgctcggaatcgatggtctgtgtgtgattggaactattatctgacggcgaacaagatgcagccatcgcattgcgtgccaaaatcagcagttcagtacactttttggttatatcagcggcgatctgcagggctgtatcgcgggtggagacctcgtggggaccaagaagcataatgcgatcctccaaatgagttgctacattggatccatcgcccgttcgtccactcgccgagtgtccatcctgtttcataggcgtgctgtagtacaggatgcaaggcaattgacctctagctggagtggttccattgaagctaagatcgcatgcatagaagtggaactgggcgccacaaggccctcgaaccgccggcattcccgcgtcgccagaacaagtccttgctccttgggagcatagacgaagggcgtagcgggcattctccttgatatgcaccggatggtcaaatttgatctccgccagatcgttgtgaactgcatcctgatcgtaactgccggataccgattccagggtctcccacttgtgctgcggctgcagatccgccgtattatcgtacagcaactccaattggtagtcatagctcccggatcccgagtaaaccattgcgccagctatggccacaccaggtcgatccacggcgaaggcaatagcatcgggtccaaagtttccggtattccaggtcctactcacatcgcagcgggcaaagcgagctcccgtcgaatgaagggttctgggtggcatgaacagcttgtcatattcacccatcgccgtttgatagacaatctcggccagaactctggccagcagatgacaacagttgtcaatcaagccttgattaacacaatctttacctccgggatagccaagacttcctaagctccggctgtatatcgcctcgatgcgagaacgtatgggactggcaataatgtctagcaaacgcacgagtacatccttaaatgtccaggaattgctcagaaaatcactcttctcctgctgtgtgcgatatatcatttgctccaccagcacgggatacggatgggcatccgtggaggagagcatgggcaagccggaattgtcgctgggactgataattgactggcgttcgtttccagccgcactaaggagtgagaaagtggctctgagtttaaccgatggcgagcataatccagcaaggatcgcgcttagcaggcgggaatgcaaggctccacgatccatctgagcaagcagatcgcacaagcagttccacttcaacgaggacgtcggatagaatgcatcgaaacaggccacaaagctcagatgacactcgtcgagaatctccagcgatagttcatagcctacaaagtaagagatatcatagaatagaataggtaaactataatttccagacttaaactaaccctcatccgtggctatatccttgaatatgtcatcgcaaaagatgccaatgagcagagctctaacattgccaatgcactccgccagctggatgttttccatgttggtcttccgggtgacgggagttccgctcccaggtgccacagctgccgaggccgatgtagatggagctcctccgctgctggcactgctaatcatggctggggccaccgatgtggagggatcaccaaaatacttagccattactcctgcgttgcccaccacacgaggggtattcttgtctataaatgaatattattgaatattacattaaaatgaaagcaaaggtgttcacctttgtttggcttagactgaacagacttggcagtggttactacgccactaccatgggctgcattggagccaccgcccgtggccaccgatgtggaagagttcctctgcgggtaaatctcgattgtgtacttgcgcaacaggcggagacatgacttaatgacatagccgaggtactgcagcgactgttgcagctgcaatggacgggagcgatcgcgctcctcgcgcagctgcaacttaaagcaatcccacgaccagcttagcaggaccaccagactctcgaagcactcacgactcacactgttggcaaaagcccgggaaatacgctgcacaggatcggcgtccatttgggccggcgtctgtttgcaatcctgggtgaccaatcggtacaaaatcgccggtatctggccagagttgacatcggtgccgttgtttgcctttttgctggatttgaaggagaaaaccacctgatcctcggtggtcacggacgcctgaccgcaggatccgcaatcggaggagggacctgcaatccgggcccacaccaaataccatctgccagctaccgcactgaccggtttgggcagaaggatatgatgtttactcctggcgccgcactcgtagggcacctctttggtctcgctgatcaggatgccttccttctcgtagccaccaccgtcgccgcccaaatcgaagagcttcagtttgcaactgtactccccgcggccaccgaacatcccgaagccacagatcacaatatcggtgtccgccgagaagcgtatggcctccacactgtggccggagtagccccatccgccgccaaagttatcgaaccgattgactacctggaattcaccggcctgcgtttctgccgtctgttgggtttgcttcaatagaggctgctcaaagcacccgggtatgttgtcctgcgccgaagtgaggatgtcgagacaggcgagtaagttcagggaggcctgcgagcgggccacacgcgaatccacccgatccggcaaagataactccggcgagagcaacgatcgataagtggccgcgttctggaagatagtttaagataagaggaacaaggaaaactgatttcatctattagcttaccgcatcgctgtcgttgatgtcactggccaccacattgtggcagcgtagtttccgtgcagctccatcgaaaacccagagaacattgtatgtgggatccatggtgaaggctagttgtggtggcgatggaatgggttccggtgaactcgtaccctgtttgccaccacgacgactccttggcacagaccccgccgataccggtgtcccaggtgctgctactgctgctgctgcagcagatgatcccacctccggtagctgttcctcaaagatctgattcctggcctcgtgcatgcttcgggacatctgctcgttgatgggcactccagccgtagctgtgcccgtcagagccgcaagaagggacgaagtggaggcatgtgccggcgaatccgcaaccggagtaacggccacatccaaattggagttgatctccggttgctgttgctccggctgtgcttgcatcagtttcacaaagttggtttgtccacgataatgggcagtacaactaccatcccgtcgatttatagagagcgtatggaaggacagcggaatgctgggaatgagcactatatcggggatgagtcaaatattagtatttgatttttttttaaatcttgtgagaaacttacatatcgtctttttattggccaccacatgcatcttgggcagcatttgtgccgtgatcagggattcgtctatcttgataaaggtctgatctccattggctccaatccaggttaccttcttgccataacagggacccaaaccactgcaaaggataatagataatcattagcaatccttattctactaatgtggttttttccatacaagacggctccaggtgaacaattccacagaaacttctgacgctgggtgagcaccggcaacagtggaggcatctccttggagccactgggctgcacattggccggcgattgggatcgttccgggcccggcattcccaccggcgcaaccgttggcgatcctcctgctcctccatcagatccagctcccaccggagagtcatcatcctggggcggaggcttcagtccataatcactgggcagtcggcccagttgacccttctggtaattgccaaacgtgtagaccattcctttcgatgtcagcagtacggtgtgattgctcccagcggccacttggctgatggcacccggtacctgaacacgaactggtccgctcactggctgcagatctccactgcccaattgaccatactgattgcttccgaaagtgtagacttcaccggccaaggtgagcaccaccgtatggtgcaatccacaagccacctgcactacaggcgatgagctggtgagctgtagcagctgcggcgccagtggagccactcgaggcggatccttgtccagatcagtgggcgttgcagctcctcctccggcggctcctgtttccagttcgcccttgcgctccttgcggcgcatgataagggttttggaacgctgctggcgctgttgtacatcactgggtggaggttttagttccgttttggcctctgcaagtggagatcggcattaagcatgcaactaggaatttttcgatcagtagatatactcaccatcgctatcctggagggcaatgcaggcggcgcacaggccacacttggcacagcccgcatctccgtgaccacagggacatatactgcccgccaaacgctgatccagtggtacatttagagcggagacacagctaacattgtatcccgtgcattcgcgacaaatgacgcacacgcggcactgaccctgcaccagattatggtcatcgtagtcgcacagcgtggagaagtccaatttgaggcgcttgtccagtggcagcagggatgcaaaacaggcggcggccgttgaggatgaggcaaatggcggcacatccttcaccggctgcaacttgttgaatatcctgccgcactgacccttattgttcagtccgaacgagaagagctgccccttggcattgagagccacacaatgggccttgcccagcgccaccttggtcacatgctgttccagcagctcactgacgaagcccatggcatcacagtgggccgtatccttgccatacatgatcagctttccagttttggttacaaatgcagaggtgccattgttgcaggcggcatgcaccaccacatggccatcgattttggtcatcttcttcggtttaaccgccttcggttgcctccggttcttgctgctatcaccatcttcaccgcgacgagctgtgcccgcaaagaaaacggtaccatcatcattgaccaacagtgcatgaatgccatcgtgtcccacggccacatggactatattggccgccttcgagatgaccaattcggtgagcttgagtgtcggggtccgacccacacacttcaatccgagcgcagcggatttcccataatagtagacgcgaccattactggcacgcaccaagccaaactccttgccgcaggccatgcccataacatcaacatccgcatctctgcagggagcgggtagctttggttcgaagctattgtgggccgactggatgcgttgaatctgatactgattgagcagctcatcctcgaaggccgcataccccaaggtccggaacttcttgcgggccaactggagcggcagttcaaagggcggcggatcaatgttgtagctattgtggtacagatttagtttcttaaccaccagtgtatcctattaaaaaaaaaacaatactcattacaaaataatcttatatagttatacatcaatttctaaatgttaagggtatcctgtcatattttatatgaaatataaaatatacaaaaatcgttattttctatgattatactgagattttaaataaaatgcagttacttacatcgcgattgctgcagatggcgtgcagtgagtcgtcgtccgtaaagagcacgtagttgagtccttcgcgcatatgcagcatactcaggggactcattgccttaatggctagcgtgtccaggcccaccatttgcagttgatcaccagcactgcggcgacaggtgcgccgaaagtagagctgcccgccactgtagcccagccaggcgctcctctcgtggctgaagtcctcattctgggcatagatgtgacccttgtaggatcccccaaagccagtgccaatttttagcagcgttcctccatagagtaaatagacaaacactccatcgcaggccattgctggcgaggtgatgggagcacctgtgctcaagggcggcaacttcacgggaaactattaaaaaaaagggggaacatttttgtttaaccacgcatacaataacaataataaaaaaaaacaccgatcactacacagctcacgcacgcaatctactacaaaaatagtaaatatattatacaaatattgtataaaacattagctctttataaaataaacaaaaaaaaaacactaaccaagtccataactcacctcatcgatcagggaattgtgcggcaccccgtggctgtgaaaatccggtctggtcggcttattcaacgccgcactgatcaccgtgtgctgcaaggtggccagcaccaccggcagctggacaatctgggcggagagctgacgcggcgtcatcagcatggcggcaatagccttgagcatcttgcccgtatcaccgcgtgcgatgcacagtcccaggagggcggcacaggccatggccgaccaattggcctccgcaccggtggccgaattgagtgcggccggcatggtggccaaatcgagaagaagatcgtacagcggattgatcagctcctccggttctagcttaaaactttccggctgctggccctggatgacatccagcagggccttcagcgccttggtgcacagcagcggatgtacatgccgggcatcagcgatcagctcgaagagactgcgcaagccggcgcccacaattagcggcacagtggcgtagacgggctccctttcggtgggctcctctgtgtccgaatccgcatcgctgttggcgctatcccgacgtggtcgcttctctgctggcaaaccgggtccgccgacgaccaccggcactggtgccggtatccggccatcgacaaggactccaactggtccgccaggacctgcattcccaggtccaacggcgccgtgcatagccatatgcgcgtggcaagagcaatcgagtagattgcttatcatacagctgtgggcacacatcatgcagcaggctgagttcacgttattgctccacttcttctggtttgatccgctttggccactgggtgctccgccctcctggaacagggagtagcgcgtctctgcctccagaaccgtggatctaattgccgagaagaccgcaaacttggacgcattcggatccagttcaatgtgcgccaccggaaacgagggcaagatcatcagttgctccttgaccagcggtggatctagcggattcaccagtcccccggcacccgcattcccttccagaacagcggcagcagctgccgctgccattgctgcggccgatttgtcctttcgacttttgcgtttcgttaacaccttgcgatcgtgttgcatttttctgtaatagaaaagaataaataggtttaaaaatattatacaaaatgtatgatgaacttgaataaaaaatcaataagtgcccaccatgaaaataacattaagctagaaaaaatacaagagcttgaggaaaagaaaattctaaaatccattaaacaagaaatcataaaataatagtttgcgaaaaaaaaaaattttagactaaaatccttttataatgtaagtagcaatttatatccttgcacaaatgataatcttttcatttttttaaattgtgtatctattcgacaggtggaacatatgtatattttgtattttgaactatgataaacttgaaaactttgatttcgtgtgatatttgttattggtttatacactatgtaatagttgctaattaaaacgcacgaattttctttaaacggactcacttaaaagaaaaacttttgaaaatatttagggacactaatcaacatctaagtcataaatcaaaaacgcattccaactaactgaaaaaggggaacaagcttaatttgcgaggtcctggcgaaggactggcatttgtttttgtttgcctacaggaagcttttagctcttattggctcttatcagcctgcaagcttttatcctggatggcggtcgttatttttggacgacagatgcacatgcatatgtacacatatcggacaccaaggtgcaagctttgggatgcacatatatatgcatatacccacatgaccatctttgctactgagtgcatccggaactttcgatcctgcagctgacaggtggttttcaatactgtttaacacatcgcaaagtgagctcaaagtccgcgaaagaagcaattactgcctccaaagtgtgtaaatttcgtcacaatttatttgcatcaattgaatgtcatgctttaaaagaaatttttaaaaggggtttataatataaatggttgaaaagtggcggtataaaatttgttatgatttaaaaaaagtatatattcaatgtgaaataatgtgtttgcgaaaatcaagttcttattgacaaactgaagtttagtgtactaaatccatgaaatccgaaaacccaaaaccttggcgcaaacgtttaattattctaaagcaatttgcaggcaatcaataaaagcaagacaataagaaactttttacacgccttctgacaaatcgattttcttgagctgattcgacattttgccaactaactgttgtctaggtattcaattaaataatcttaagcccaaggtcccgaaacggtaaccagcatatatacataccctgttagagtatttaagactcaactcattaaagctacttaagcaatgtttccttttcgtaaatttaaaactcaattgatctttgaacacttctagttttgttttaaactacaaatctgtcgtagcatatataatcctgctttaaacctatttaaagacattaaagttaacatttttcttcggcagatattgggatttcgattatataaataatatatattgaaatatatatgatccccaatcgtgtgatgtgaataatatatattgaaatatatataatccccaatcgtttgatgtggtctcccaaagatagtgttttttggcggtcttaacggggagcgacattctaaacgccgcaccatcgcctcgtgggccatcagtggattaatgcaggtcgctaggctcatggcagtcagctgattgagagcagcgctcagctgttcggcgcaggactgtccacttccgcccgttgcaacccccaaaaatcggggggtgctgcgacagcgcggagagcgaatgtgaattgtgtaggggttgaagacccagattggaagccgaaagccgagtgcagcagatcgatttttcaaccccaagtcggatgggctgtacgggacgcaggggatgtaggggttagggggtggcaactgaatgggactccgggacatctacttatccagatgctggcggggattacctgcgcgtgctgttcgtgtacagctcgtagaagtggtcgccatacttgagcggattgagcaggccaaccattttggcccgattttccgttagatccagtgctccaatcgatattttctatatattctaatgctccgttaccgtagccgttactgttgccgtctaccgttacaacgttatgctcgctctctcccgtgaatctcctctcttctttggctaatgatttatattgcacagcggttattaaacaaaatatgaattaacaactagaatttaactaatttgccgagcatcgtctggcaatttgagtgccctttgttttcgccatttgccttttgtcactttcacccaaaaaaaaggaaacacacaccgagcgacaacgcaacggtacaatgggaacgagggaactaaactttcgtcccgcttgctcttgtgcgcttcctgcgagagaggacgctcagctgtgtgggagacagtgacagtgttggtaacagagcggcatgtcctattctgtgcttaaaatcttaaatttttcggagctttccgatttaatttctgcctaaattaaaggtactttaaatcgcacgagtattttcttcaattttttattttatatatcttaaatcaacaattttggtttccacctttcatccatagctaaggcttttcagttttattttatggcacaacgcaaaagtatcgatcacgaaatatcacatttattgttcaacttttaatatctgtgtgccttttccctaaaagttccgttataaaagttaacatttaaaaatatttcacatacattgcaatacaccagctgttcgagcagtgctgaaaaacgccgacgcatcgcgaactggcaacgctgtcagcagctgtcacttgcaacaaaaacaacaggggcaggaagaagaagaactttgacagctgcggcgcaaccgaaatctaagaaaaacaatttacgtaatttaattgagcgaatttcaatggtttgcgagtgtactaaaacgttttttccccacccgcaggatgggcaacgcgctgacgcactacatgaaaccggacgtgatgc

SEQ ID NO: 19355 - DNA, 8574 bp, DROSOPHILA
atggttggcctgctcaatccgctcaagtatggcgaccacttctacgagctgtacacgaacagcacgcgcagcccatccgacttggggttgaaaaatcgatctgctgcactcggctttcggcttccaatctgggtcttcaacccctacacaattcacattcgctctccgcgctgtcgcagcaccccccgatttttgggggttgcaacgggcggaagtggacagtcctgcgccgaacagctgagcgctgctctcaatcagctgactgccatgagcctagcgacctgcattaatccactgatggcccacgaggcgatggtgcggcgtttagaatgtcgctccccaaaaatgcaacacgatcgcaaggtgttaacgaaacgcaaaagtcgaaaggacaaatcggccgcagcaatggcagcggcagctgctgccgctgttctggaagggaatgcgggtgccgggggactggtgaatccgctagatccaccgctggtcaaggagcaactgatgatcttgccctcgtttccggtggcgcacattgaactggatccgaatgcgtccaagtttgcggtcttctcggcaattagatccacggttctggaggcagagacgcgctactccctgttccaggagggcggagcacccagtggccaaagcggatcaaaccagaagaagtggagcaataacgtgaactcagcctgctgcatgatgtgtgcccacagctgtatgataagcaatctactcgattgctcttgccacgcgcatatggctatgcacggcgccgttggacctgggaatgcaggtcctggcggaccagttggagtccttgtcgatggccggataccggcaccagtgccggtggtcgtcggcggacccggtttgccagcagagaagcgaccacgtcgggatagcgccaacagcgatgcggattcggacacagaggagcccaccgaaagggagcccgtctacgccactgtgccgctaattgtgggcgccggcttgcgcagtctcttcgagctgatcgctgatgcccggcatgtacatccgctgctgtgcaccaaggcgctgaaggccctgctggatgtcatccagggccagcagccggaaagttttaagctagaaccggaggagctgatcaatccgctgtacgatcttcttctcgatttggccaccatgccggccgcactcaattcggccaccggtgcggaggccaattggtcggccatggcctgtgccgccctcctgggactgtgcatcgcacgcggtgatacgggcaagatgctcaaggctattgccgccatgctgatgacgccgcgtcagctctccgcccagattgtccagctgccggtggtgctggccaccttgcagcacacggtgatcagtgcggcgttgaataagccgaccagaccggattttcacagccacggggtgccgcacaattccctgatcgatgagtttcccgtgaagttgccgcccttgagcacaggtgctcccatcacctcgccagcaatggcctgcgatggagtgtttgtctatttactctatggaggaacgctgctaaaaattggcactggctttgggggatcctacaagggtcacatctatgcccagaatgaggacttcagccacgagaggagcgcctggctgggctacagtggcgggcagctctactttcggcgcacctgtcgccgcagtgctggtgatcaactgcaaatggtgggcctggacacgctagccattaaggcaatgagtcccctgagtatgctgcatatgcgcgaaggactcaactacgtgctctttacggacgacgactcactgcacgccatctgcagcaatcgcgatgatacactggtggttaagaaactaaatctgtaccacaatagctacaacattgatccgccgccctttgaactgccgctccagttggcccgcaagaagttccggaccttggggtatgcggccttcgaggatgagctgctcaatcagtatcagattcaacgcatccagtcggcccacaatagcttcgaaccaaagctacccgctccctgcagagatgcggatgttgatgttatgggcatggcctgcggcaaggagtttggcttggtgcgtgccagtaatggtcgcgtctactattatgggaaatccgctgcgctcggattgaagtgtgtgggtcggaccccgacactcaagctcaccgaattggtcatctcgaaggcggccaatatagtccatgtggccgtgggacacgatggcattcatgcactgttggtcaatgatgatggtaccgttttctttgcgggcacagctcgtcgcggtgaagatggtgatagcagcaagaaccggaggcaaccgaaggcggttaaaccgaagaagatgaccaaaatcgatggccatgtggtggtgcatgccgcctgcaacaatggcacctctgcatttgtaaccaaaactggaaagctgatcatgtatggcaaggatacggcccactgtgatgccatgggcttcgtcagtgagctgctggaacagcatgtgaccaaggtggcgctgggcaaggcccattgtgtggctctcaatgccaaggggcagctcttctcgttcggactgaacaataagggtcagtgcggcaggatattcaacaagttgcagccggtgaaggatgtgccgccatttgcctcatcctcaacggccgccgcctgttttgcatccctgctgccactggacaagcgcctcaaattggacttctccacgctgtgcgactacgatgaccataatctggtgcagggtcagtgccgcgtgtgcgtcatttgtcgcgaatgcacgggatacaatgttagctgtgtctccgctctaaatgtaccactggatcagcgtttggcgggcagtatatgtccctgtggtcacggagatgcgggctgtgccaagtgtggcctgtgcgccgcctgcattgccctccaggatagcgatgaggccaaaacggaactaaaacctccacccagtgatgtacaacagcgccagcagcgttccaaaacccttatcatgcgccgcaaggagcgcaagggcgaactggaaacaggagccgccggaggaggagctgcaacgcccactgatctggacaaggatccgcctcgagtggctccactggcgccgcagctgctacagctcaccagctcatcgcctgtagtgcaggtggcttgtggattgcaccatacggtggtgctcaccttggccggtgaagtctacactttcggaagcaatcagtatggtcaattgggcagtggagatctgcagccagtgagcggaccagttcgtgttcaggtaccgggtgccatcagccaagtggccgctgggagcaatcacaccgtactgctgacatcgaaaggaatggtctacacgtttggcaattaccagaagggtcaactgggccgactgcccagtgattatggactgaagcctccgccccaggatgatgactctccggtgggagctggatctgatggaggagcaggaggatcgccaacggttgcgccggtgggaatgccgggcccggaacgatcccaatcgccggccaatgtgcagcccagtggctccaaggagatgcctccactgttgccggtgctcacccagcgtcagaagtttctgtggaattgttcacctggagccgtctttggtttgggtccctgttatggcaagaaggtaacctggattggagccaatggagatcagacctttatcaagatagacgaatccctgatcacggcacaaatgctgcccaagatgcatgtggtggccaataaaaagacgatattgctcattcccagcattccgctgtccttccatacgctctctataaatcgacgggatggtagttgtactgcccattatcgtggacaaaccaactttgtgaaactgatgcaagcacagccggagcaacagcaaccggagatcaactccaatttggatgtggccgttactccggttgcggattcgccggcacatgcctccacttcgtcccttcttgcggctctgacgggcacagctacggctggagtgcccatcaacgagcagatgtcccgaagcatgcacgaggccaggaatcagatctttgaggaacagctaccggaggtgggatcatctgctgcagcagcagcagtagcagcacctgggacaccggtatcggcggggtctgtgccaaggagtcgtcgtggtggcaaacagggtacgagttcaccggaacccattccatcgccaccacaactagccttcaccatggatcccacatacaatgttctctgggttttcgatggagctgcacggaaactacgctgccacaatgtggtggccagtgacatcaacgacagcgatgcgaacgcggccacttatcgatcgttgctctcgccggagttatctttgccggatcgggtggattcgcgtgtggcccgctcgcaggcctccctgaacttactcgcctgtctcgacatcctcacttcggcgcaggacaacatacccgggtgctttgagcagcctctattgaagcaaacccaacagacggcagaaacgcaggccggtgaattccaggtagtcaatcggttcgataactttggcggcggatggggctactccggccacagtgtggaggccatacgcttctcggcggacaccgatattgtgatctgtggcttcgggatgttcggtggccgcggggagtacagttgcaaactgaagctcttcgatttgggcggcgacggtggtggctacgagaaggaaggcatcctgatcagcgagaccaaagaggtgccctacgagtgcggcgccaggagtaaacatcatatccttctgcccaaaccggtcagtgcggtagctggcagatggtatttggtgtgggcccggattgcaggtccctcctccgattgcggatcctgcggtcaggcgtccgtgaccaccgaggatcaggtggttttctccttcaaatccagcaaaaaggcaaacaacggcaccgatgtcaactctggccagataccggcgattttgtaccgattggtcacccaggattgcaaacagacgccggcccaaatggacgccgatcctgtgcagcgtatttcccgggcttttgccaacagtgtgagtcgtgagtgcttcgagagtctggtggtcctgctaagctggtcgtgggattgctttaagttgcagctgcgcgaggagcgcgatcgctcccgtccattgcagctgcaacagtcgctgcagtacctcggctatgtcattaagtcatgtctccgcctgttgcgcaagtacacaatcgagatttacccgcagaggaactcttccacatcggtggccacgggcggtggctccaatgcagcccatgacaagaatacccctcgtgtggtgggcaacgcaggagtaatggctaagtattttggtgatccctccacatcggtggccccagccatgattagcagtgccagcagcggaggagctccatctacatcggcctcggcagctgtggcacctgggagcggaactcccgtcacccggaagaccaacatggaaaacatccagctggcggagtgcattggcaatgttagagctctgctcattggcatcttttgcgatgacatattcaaggatatagccacggatgagggctatgaactatcgctggagattctcgacgagtgtcatctgagctttgtggcctgtttcgatgcattctatccgacgtcctcgttgaagtggaactgcttgtgcgatctgcttgctcagatggatcgtggagccttgcattcccgcctgctaagcgcgatccttgctggattatgctcgccatcggttaaactcagagccactttctcactccttagtgcggctggaaacgaacgccagtcaattatcagtcccagcgacaattccggcttgcccatgctctcctccacggatgcccatccgtatcccgtgctggtggagcaaatgatatatcgcacacagcaggagaagagtgattttctgagcaattcctggacatttaaggatgtactcgtgcgtttgctagacattattgccagtcccatacgttctcgcatcgaggcgatatacagccggagcttaggaagtcttggctatcccggaggtaaagattgtgttaatcaaggcttgattgacaactgttgtcatctgctggccagagttctggccgagattgtctatcaaacggcgatgggtgaatatgacaagctgttcatgccacccagaacccttcattcgacgggagctcgctttgcccgctgcgatgtgagtaggacctggaataccggaaactttggacccgatgctattgccttcgccgtggatcgacctggtgtggccatagctggcgcaatggtttactcgggatccgggagctatgactaccaattggagttgctgtacgataatacggcggatctgcagccgcagcacaagtgggagaccctggaatcggtatccggcagttacgatcaggatgcagttcacaacgatctggcggagatcaaatttgaccatccggtgcatatcaaggagaatgcccgctacgcccttcgtctatgctcccaaggagcaaggacttgttctggcgacgcgggaatgccggcggttcgagggccttgtggcgcccagttccacttctatgcatgcgatcttagcttcaatggaaccactccagctagaggtcaattgccttgcatcctgtactacagcacgcctatgaaacaggatggacactcggcgagtggacgaacgggcgatggatccaatgtagcaactcatttggaggatcgcattatgcttcttggtccccacgaggtctccacccgcgatacagccctgcagatcgccgctgatataaccaaaaagtgtactgaactgctgattttggcacgcaatgcgatggctgcatcttgttcgccgtcagataatagttccaatcacacacagaccatcgattccgagcacaatatcacacccatcgaggagcacatggacatcaattgggcaaacaattccagaacagctgccctgccaacagccatagatccgcagctgtccacagccagggatttgggcaaacgtattgagtcgtttagcaagggtctcatggagaccctaaagttcgacaagcgatccacgaatcccttcgagatggaaattgaaatcggagccaccgaagtcgaggaatcggcagacttgagaaatggccaaagccaaagtgtaagccaaagtcagagtcaaagtcaaagtgttccgataaatggcaatgaacgaaccgctgactttgagttcgcagagcaatcggctcaacagtcaatgccccagcatctgcactccgattcggaggaggctccgctggaggttgccggcatggctgccggtggcggagtaagtgtggcagatggatctggtggagtggcaggagtgggcagtcaagcagctgcagtgcagctgctcgaggtctttaatctggccgcctccaatatgttccacacgttactgccactggtctatgcacatattgccaatttggcttgcagtgatccaaagagttccgtccagattctgggcttaatcaaggagattctgccgcatatcgcggccctaaatcagttgcacgtgtccaaggatcagcgacagccggagccggctatttttgctacacagacctctggttctggcaattccaattcgagcagcaccaccagtaaccattattgtgtagtggagagtgaccatccgtataagagtgctagcattagtagctatcgcgtggagtttccaccttgcgtacagtggctcaccatcgagtttgacccgcagtgtggcactgctcaactggaagattacctgctcctgtcgattcccatgcgtccagcatcgcaggcgccgccagtgccgcatgtggatgactatttggagcaggcggataacaatgtgaatggagcgggggacaggaggcgcaacacgggcggtggcatcgccggtagtggcgcagcaccgaacacccatcaacgctccgccagtgtccagttgaccatggccagttgctgccggagtccaggttgtggaaatgctccgggatctgctgccgcacccagttcaatgcctctgcgcagccaggatcccaatgacagggagtggattgtggtcaagaagtttaatactgcttccacctggctccacaatgtcctcattctgcccggcaactgtgtggagttctccttggaaacagcctcactttacgcccaggatccgcacaacaatcgctatggcttcaagtgtctagtggttggctatgacaatcccacatcgattaatgccagcaactcgtgtctgatacgacttgaacaggagttggcctatttgggtggcatgtgcagtgccaatctgatgaagaaggagctcaatctgccagatgacaaagacgtggaggacatgagcggcattgaggagaccatcaacactcatcataccctgctctctaaaggatttgccctatctgaaccgcagttgaccgttcaccaggctttggaatcatatttacccatcgggtga

SEQ ID NO: 19356 - protein, 2857 aa, DROSOPHILA
MVGLLNPLKYGDHFYELYTNSTRSPSDLGLKNRSAALGFRLPIWVFNPYTIHIRSPRCRSTPRFLGVATGGSGQSCAEQLSAALNQLTAMSLATCINPLMAHEAMVRRLECRSPKMQHDRKVLTKRKSRKDKSAAAMAAAAAAAVLEGNAGAGGLVNPLDPPLVKEQLMILPSFPVAHIELDPNASKFAVFSAIRSTVLEAETRYSLFQEGGAPSGQSGSNQKKWSNNVNSACCMMCAHSCMISNLLDCSCHAHMAMHGAVGPGNAGPGGPVGVLVDGRIPAPVPVVVGGPGLPAEKRPRRDSANSDADSDTEEPTEREPVYATVPLIVGAGLRSLFELIADARHVHPLLCTKALKALLDVIQGQQPESFKLEPEELINPLYDLLLDLATMPAALNSATGAEANWSAMACAALLGLCIARGDTGKMLKAIAAMLMTPRQLSAQIVQLPVVLATLQHTVISAALNKPTRPDFHSHGVPHNSLIDEFPVKLPPLSTGAPITSPAMACDGVFVYLLYGGTLLKIGTGFGGSYKGHIYAQNEDFSHERSAWLGYSGGQLYFRRTCRRSAGDQLQMVGLDTLAIKAMSPLSMLHMREGLNYVLFTDDDSLHAICSNRDDTLVVKKLNLYHNSYNIDPPPFELPLQLARKKFRTLGYAAFEDELLNQYQIQRIQSAHNSFEPKLPAPCRDADVDVMGMACGKEFGLVRASNGRVYYYGKSAALGLKCVGRTPTLKLTELVISKAANIVHVAVGHDGIHALLVNDDGTVFFAGTARRGEDGDSSKNRRQPKAVKPKKMTKIDGHVVVHAACNNGTSAFVTKTGKLIMYGKDTAHCDAMGFVSELLEQHVTKVALGKAHCVALNAKGQLFSFGLNNKGQCGRIFNKLQPVKDVPPFASSSTAAACFASLLPLDKRLKLDFSTLCDYDDHNLVQGQCRVCVICRECTGYNVSCVSALNVPLDQRLAGSICPCGHGDAGCAKCGLCAACIALQDSDEAKTELKPPPSDVQQRQQRSKTLIMRRKERKGELETGAAGGGAATPTDLDKDPPRVAPLAPQLLQLTSSSPVVQVACGLHHTVVLTLAGEVYTFGSNQYGQLGSGDLQPVSGPVRVQVPGAISQVAAGSNHTVLLTSKGMVYTFGNYQKGQLGRLPSDYGLKPPPQDDDSPVGAGSDGGAGGSPTVAPVGMPGPERSQSPANVQPSGSKEMPPLLPVLTQRQKFLWNCSPGAVFGLGPCYGKKVTWIGANGDQTFIKIDESLITAQMLPKMHVVANKKTILLIPSIPLSFHTLSINRRDGSCTAHYRGQTNFVKLMQAQPEQQQPEINSNLDVAVTPVADSPAHASTSSLLAALTGTATAGVPINEQMSRSMHEARNQIFEEQLPEVGSSAAAAAVAAPGTPVSAGSVPRSRRGGKQGTSSPEPIPSPPQLAFTMDPTYNVLWVFDGAARKLRCHNVVASDINDSDANAATYRSLLSPELSLPDRVDSRVARSQASLNLLACLDILTSAQDNIPGCFEQPLLKQTQQTAETQAGEFQVVNRFDNFGGGWGYSGHSVEAIRFSADTDIVICGFGMFGGRGEYSCKLKLFDLGGDGGGYEKEGILISETKEVPYECGARSKHHILLPKPVSAVAGRWYLVWARIAGPSSDCGSCGQASVTTEDQVVFSFKSSKKANNGTDVNSGQIPAILYRLVTQDCKQTPAQMDADPVQRISRAFANSVSRECFESLVVLLSWSWDCFKLQLREERDRSRPLQLQQSLQYLGYVIKSCLRLLRKYTIEIYPQRNSSTSVATGGGSNAAHDKNTPRVVGNAGVMAKYFGDPSTSVAPAMISSASSGGAPSTSASAAVAPGSGTPVTRKTNMENIQLAECIGNVRALLIGIFCDDIFKDIATDEGYELSLEILDECHLSFVACFDAFYPTSSLKWNCLCDLLAQMDRGALHSRLLSAILAGLCSPSVKLRATFSLLSAAGNERQSIISPSDNSGLPMLSSTDAHPYPVLVEQMIYRTQQEKSDFLSNSWTFKDVLVRLLDIIASPIRSRIEAIYSRSLGSLGYPGGKDCVNQGLIDNCCHLLARVLAEIVYQTAMGEYDKLFMPPRTLHSTGARFARCDVSRTWNTGNFGPDAIAFAVDRPGVAIAGAMVYSGSGSYDYQLELLYDNTADLQPQHKWETLESVSGSYDQDAVHNDLAEIKFDHPVHIKENARYALRLCSQGARTCSGDAGMPAVRGPCGAQFHFYACDLSFNGTTPARGQLPCILYYSTPMKQDGHSASGRTGDGSNVATHLEDRIMLLGPHEVSTRDTALQIAADITKKCTELLILARNAMAASCSPSDNSSNHTQTIDSEHNITPIEEHMDINWANNSRTAALPTAIDPQLSTARDLGKRIESFSKGLMETLKFDKRSTNPFEMEIEIGATEVEESADLRNGQSQSVSQSQSQSQSVPINGNERTADFEFAEQSAQQSMPQHLHSDSEEAPLEVAGMAAGGGVSVADGSGGVAGVGSQAAAVQLLEVFNLAASNMFHTLLPLVYAHIANLACSDPKSSVQILGLIKEILPHIAALNQLHVSKDQRQPEPAIFATQTSGSGNSNSSSTTSNHYCVVESDHPYKSASISSYRVEFPPCVQWLTIEFDPQCGTAQLEDYLLLSIPMRPASQAPPVPHVDDYLEQADNNVNGAGDRRRNTGGGIAGSGAAPNTHQRSASVQLTMASCCRSPGCGNAPGSAAAPSSMPLRSQDPNDREWIVVKKFNTASTWLHNVLILPGNCVEFSLETASLYAQDPHNNRYGFKCLVVGYDNPTSINASNSCLIRLEQELAYLGGMCSANLMKKELNLPDDKDVEDMSGIEETINTHHTLLSKGFALSEPQLTVHQALESYLPIG

SEQ ID NO: 19357 - DNA, 2660 bp, DROSOPHILA
acacacgtcgagtgcagggcgagggtgaacagcaggtactccgcgataatcagggcatcctgagtgctgtggtaacgtgctgtgttcagaaaggatatcttctccattccctaagatactcacacaaagagaattatggctgtctgcaatcggtttctggccagcgaaggaccaaaggcgttgcaaaagaggtccactcccaaaagggcgaactggaacaggagcacccaggagtagcgtcgcagtgttagcttcatggcggtgtccaaatgtcaagcgcttgttttcggtcaatttgttgcgtgctgactgtgcgggggtttgttgtgtccttcgtcctggtgacgtcaaagctaccactgcggtcatgcgctgtggatttgtactatccccttatcgatagacagatttccatggagaactggtgaaactttgaaaacgtgtggaaggcattggcgggaacagaaatgggtacgtatttttaaagaccaggttacaaattggagtcagaaaactatatattattctgggttgcttttattatcagacatatcgagcatattcaaaagggtactgctgccgttttcccgatcggaaggtgtccattctgccagcctgtcgccggaatctcctgtagtactgctggttcatctcggagtagaagtttgtgggcagtaggtgagaccaactgtggtcgccttcaccattgtggcggtccagaaactggaacatcgatgcggaagtgacttcggcagcccctgtgcgccagaatggccaggttggatttaaggtcaccagagccaagaccagaaaccagaacgtcatcgtcttagccatttgtgaagagagctgtttggccaaaacccggcacccaataccctcctccaaagtcgactgccggttgcaggtggtcagcagatttcgagccggggtgcttccatttgcatttttttcggaacgctgtcgttctactccgtcagtgcgatcagcgttttccgagtgggctataaagtggattggctgggaggctacaatcaacagtcagccttcgttcgtcacttcagcagcaagtagagacagctcaagaaccatccgcaatggcattcaactttggtcacctcctcatcgccggcctcgtggccttgtccgccgtgtcctcggagaccatccagctgcagcccactcagggcatcctcatccccgccccgctggccgagaacatccgtgtgtcgcgtgccgcctacggaggatacggcgctgccccagccgccccatcgtactccgccccagccgctcccgctgcccaggcctactctgctcccgctgccccagcctactccgcacccgctgctcccgcctactccgcacccgctgctcctgcctactctgctcccgctgccccagcttactctgccccagccgcaccagcttactccgcacccgcctccattccgtcgccgccgtgccccaagaactacctgttcagctgccagccctccctgcagcccgtgccctgctccgccccagctcagtcctacggatccgccggtgcctactcccagtacgtgccccagtacgccgtgcccttcgtccgcgaactttaaggatcgaaacgaatctgacttgacatctgaacctaagaataaagtaatgctttcataaaaaacatttaagatattttattgaaggggtatcaagggttttattgcttttctacaagctattaaaaaagtttcagctctctgaaataaatataattattaccgatatgatgcaacaaatttaaggttttgtgttttactagtacacctttttttaaaaagaacaaattcgtatatgcaaaacgagtaatgggctgtaagcaattttgaaattctagaacactttagatatatcttgttatttatcgtcttagcaatgattaaagcggcacaaaaagttgctcccaattttggtctaaaactaatcctgtttatatatttaatagtgccaaacagaagtcttaaataaataataaatattaaaaagattaaaatattgtttaaaattttcactttattaaaaatcagctagttcatcaatatgagctgtacccacatggaaccggcttgataaccgcttcgcaggagaacacatagttctttgggcaagctggagaaggaacttcactgagtgtggtttgttgttggtatgttccctgaaccggtacctgggcctcatcctggtcgtagctgcgagcgaagccaaatttgccacgtccaaaaccaggacctccgaagccgggacctccgaaaccgggacctccaaagccgggacgtccaaagccagggcctccgaagcccggacctccgaagccaggacctccaaaaccaggtcctccaaaaccaggtccaccaaacccgggaccaccaaagttgttctccacgattacctcctgtacgatttgctgttgcctcctcctacggttcagatacgcatccgagggctcgacagctgatgatctcgatggcaggctccttaagcaccctgtacttcctccacaggtcgaggcttccaaaccagcctgctgacccagagaactcgctccggccaaaagggcaaagaatccgagatacttccacatgctgacttgatatggtggcgttgcaagctgagaaagc

SEQ ID NO: 19358 - DNA, 660 bp, DROSOPHILA
tgggctataaagtggattggctgggaggctacaatcaacagtcagccttcgttcgtcacttcagcagcaagtagagacagctcaagaaccatccgcaatggcattcaactttggtcacctcctcatcgccggcctcgtggccttgtccgccgtgtcctcggagaccatccagctgcagcccactcagggcatcctcatccccgccccgctggccgagaacatccgtgtgtcgcgtgccgcctacggaggatacggcgctgccccagccgccccatcgtactccgccccagccgctcccgctgcccaggcctactctgctcccgctgccccagcctactccgcacccgctgctcccgcctactccgcacccgctgctcctgcctactctgctcccgctgccccagcttactctgccccagccgcaccagcttactccgcacccgcctccattccgtcgccgccgtgccccaagaactacctgttcagctgccagccctccctgcagcccgtgccctgctccgccccagctcagtcctacggatccgccggtgcctactcccagtacgtgccccagtacgccgtgcccttcgtccgcgaactttaaggatcgaaacgaatctgacttgacatctgaacctaagaataaagtaatgctttcat

SEQ ID NO: 19359 - protein, 168 aa, DROSOPHILA
MAFNFGHLLIAGLVALSAVSSETIQLQPTQGILIPAPLAENIRVSRAAYGGYGAAPAAPSYSAPAAPAAQAYSAPAAPAYSAPAAPAYSAPAAPAYSAPAAPAYSAPAAPAYSAPASIPSPPCPKNYLFSCQPSLQPVPCSAPAQSYGSAGAYSQYVPQYAVPFVREL

SEQ ID NO: 19360 - DNA, 2426 bp, DROSOPHILA
ggcccaagtcactacttggctgggctcggaaaccctacgagcacctgaaacccgaaggtcagcacattgtagccactgctgctttccggcttgtaggctgaccgaccagtcaagcgattgatgatgggatccgatatcgcattacccaatcgcttgcacttttcacttttcaattttccgctttgtcgctgattcggatgtgtcgcaagcatttcttctagctaaaatatacatttatgtacaatttaataactattttgtttggtaccagcatttcctgcagttcagtgacccacaacgagctgcttggcacaaaggttaaaaactgaaagtttgcttagttacaatcacctgtatctggcggatgtagatttaatcggattgggaaaagctggaggcagtagccgaaactacatttcctttttcaggaatttaatagctaacgattttaaaatggttttatggtggttataaaatggttataaaataaattattttagtacaagttatataagttaacttggagaataaaaacattgggtttacttcaatgataaacgttgattaggttactaaaataaattttgtcgtcaattatctagtaagatgataaaaagacagtgcagcaaatatacttaaatgcttcattttgggaatgtttaaagaaaatgttatacttgggacttttaatatatataaagttatatcagaatatatatcttttatcaaacaacagcctggtagaataataatatgattttgttattaccaacattatcttggaatgataatctaggcttggtcttcttctattggttgctagaaactacaatagttatacccttagtaagaacaattcatgatttagcttttttttagtgatttaattgcagtacatatttttgggtatattttttgtcaaatccatcaaagcttatgtttctcggcagtcggttcgtggtccttgggcgatgatcgcagtcgcagtcggagcaggtgcttagtactggtagccataggtctggggcacgtaggcgctgtacagctgctgctggtgctggggcacgccgtagttgggggcgacgtaggtggccaccggggaggagtaggcgccggcggatccgtagctgggagctggagcgctgcatggcacgggggcaaggttgggctggcagctgaacaggtagttcttggggcagggaggagctgggatgctggagccgccatagccgccggagctgccgccgtaggcagacttacggagacgggtcaggtcaccgaatccctgtccggtcactccctccagctctccgtcctgggtggtcaccgaggagccagtggagccggtggccgaagccacgttggtgggcgaagccagagcggcggcggcgaaggcgaccagagcgatgcacacgaaggatttcatcttggttgttggtggttgaagattgagctggaggcggatgggagctggttgggctgctggtagttaccaaaggtgactgatgccaataccattcaattggccatcttttatagctgtccaatctgcctagttagcactacgttcagaacataatggctaggtctactcttcgtttttgccttgattacttttctgctccatcagcccaatggacaattgtataccgctgactttagtagcttcacatcgacagctttttggggtcatcagcgggcagaggaacgtttaggttggcgatttgtggttgatatctagtgcgttgcactttaaaagtggtgggagtgataaaagagcacgaccccctttcgaagaaaaaatgttaacaaattaaatttcagacttgtaacttctgtaattaatgatatgacccggggcacaagatactatttgttcaatagaaccaacaaatcttcttaatatattctttatataataaatgtttcttatattttaactattttataatgcatgtcaaagacaacatttcaataactaaataaaactatgttatatatatgacactgaaaattttttggtactctaagtttaatattcattgctgacattatgatatgtaaagaatagttttgtccaaactaaacaaagtagatatttaagctgttcaagaatcacatctagacttatttcctttaaatgcattgatttcaaatgatagggataaaaaaccaataaaaaagattttttagatttataatcgcaagtcggatccagctagttcgcttttataaacaaaatccttagctgactcataaatatttattaataatatcctgataaaaaaattaccatttgactgcaatccaaatgataccaccataaaatctgcaaacacaaagtattggataataattccaagaactcgagtttccgccataaactcatattgctgggccctaaaatgattacaatagtacgtagt

SEQ ID NO: 19361 - DNA, 426 bp, DROSOPHILA
atgaaatccttcgtgtgcatcgctctggtcgccttcgccgccgccgctctggcttcgcccaccaacgtggcttcggccaccggctccactggctcctcggtgaccacccaggacggagagctggagggagtgaccggacagggattcggtgacctgacccgtctccgtaagtctgcctacggcggcagctccggcggctatggcggctccagcatcccagctcctccctgccccaagaactacctgttcagctgccagcccaaccttgcccccgtgccatgcagcgctccagctcccagctacggatccgccggcgcctactcctccccggtggccacctacgtcgcccccaactacggcgtgccccagcaccagcagcagctgtacagcgcctacgtgccccagacctatggctaccagtactaa

SEQ ID NO: 19362 - protein, 141 aa, DROSOPHILA
MKSFVCIALVAFAAAALASPTNVASATGSTGSSVTTQDGELEGVTGQGFGDLTRLRKSAYGGSSGGYGGSSIPAPPCPKNYLFSCQPNLAPVPCSAPAPSYGSAGAYSSPVATYVAPNYGVPQHQQQLYSAYVPQTYGYQY

SEQ ID NO: 19363 - DNA, 2792 bp, DROSOPHILA
tatttgtgatagccttttttgaaacttttgaaatatcgaaatcaatgttatatagatatttcttatattatagacgacatacaaaagagttagttaaattttagttaaactctataagaattatgcgaactttgataaatatgtcactgtgttataggcagagtatgcaaatttcgacgtaacgaagttaactttcttttaagaccgaattttagtgcacataaatgacccaatattttagcgcgcttgcattcttgctaaaaaaatatatgcgtcaatttgggctacactgaacaataagtattagttcgtttatgttgttatcatttatcaacattgaatttctccaaaaagtatgcatcgcattggtaaagaaaatagtttaaaatatttgtatgaacatgggcaagtcgggtgataaatatttattggttttatattttattttaaaaacatataactatcatttatcatttaaattaaactctaaagactataacactacattttgacgttaaagtgcaaatgaaacatacaaacataagcataacatacaatatttagatattattgttagtttatttccaaaaatcctatcattaagaaatattcttctaattttttagcctaatggtaggttatattcatgcataaaaaacaagccaacagatatagaattgaatacaatgaagaattgctgtacaagcagaggaaaaatatcgctgatgctaataaaataataaaaaattcatttgtgttgcaaacttaaaatcaatatatattttaccctgatgttcagctacatcattttacttacctcagatctttttatgcttattacttggtaagctgtatttatctagaactatattaccaaactgtatcagtttataggtttttaaattttaaacaatcttccacccaatgcaacagtacaaagtcagaaattattagaagacttttatttacagattggtcaagcatcatggcgtttagagaactacaaaatattctgggaggcaagggccaggcggtagttgtattcctcgaacagttccggagccactcgatatggctgatctatgagcgaaaggcggatgggcgtttggcacgagggcgtggcatagttgggagcaggaggagccgccggttggtagcaattctgcgatggcgcctcgtaaacgggggcaggtggtggcggtggtggtggggctgttggagtgacatatttctgatcatcatactccacctgggaggtggacgacttcgatgccagtggagtggagagatagatgatgggctggtaaacgatctgtgccggtggtgcaccaacgtagcttggctgtgcgggctggctgtacccctgggtgtagctggatgctggtggctcataggcgggagctggtggagcgggagcactgtaatcagttgtaggtgcttcgtaggcaggagcagctggtgccggagcttcataggcaggagcagctggtgccggagcttcgtaggcaggagctggtggagcaggagcttcgtaagcaggagctggtggtgccggagcttcgtaggcaggagctgccggtgctacatagcctgcatcgccatcgccgggtccattgtactcggtatcgggtttgatgtacccaccgttgggcaggactccgtaaccatcaccgccgtaggaaggactctgtggcgccggtgccacatagttgttctgaccacatccaccgccacactgtccacacggactggctgtgggaaatagttcgggaagtttcttgaagagtttcatctgcttgaagggatccagatcctgcagctgcaggccgttgcagttgttgggcacagcgggcgcgggtagcagtggagctgtcggatacagcaggttgttattgttgttgttgcagcagttgttgttgttgcggggaaagagatcatcccaccacttgagcagagagcggttcgtgcgcttcaaagcctcattgggggtcaccacaggacctgcatccgccatcaggtagtagagtggctcccccggtaccgcaatccgattggaccgcggcaaatcctcggctgaagtggccaggaccacgcccagcgccagcagggtcagagtccacgatctgtttctggagtgcatcatcatgtggtaattgcgttggcagcattaacctcgcggttcgaactctcaattgcaactaccagaaccagtggctcccaatcgcagcggactgctggagttgcacaccacaacggattaatgccaggtcagcaggtgtggacaccttttgatggggtataatagttggcaaaataaacattaaagattggatagtgttgcattttttatagcaccttataatatattttaaaatgttgaattaaaattagttacaagtaaacaggtaaccaaatgttcacactagaactgatcgccttttcttagtatcttatctgtaaatcttaaaattatctgaacaaaagaaagggtatttaaaattaattataaagattgtctgttatgaggaaattaagactaaacttttagctcagcaagtcccatgtctaacccaatttttattttagccccaatagaggtggtgttaccaattcatcgaagattcccaataagagtcccaataaccccactggcaggccgatgactccacactacttgtattttctttattgttgtcttgctttccttattgtttattcaaattgttcccttacgtgctcgaaattattaaacagtagcgaaacaccagtcgaggttcctgtttgctccgtgg

SEQ ID NO: 19364 - DNA, 792 bp, DROSOPHILA
atgaaactcttcaagaaacttcccgaactatttcccacagccagtccgtgtggacagtgtggcggtggatgtggtcagaacaactatgtggcaccggcgccacagagtccttcctacggcggtgatggttacggagtcctgcccaacggtgggtacatcaaacccgataccgagtacaatggacccggcgatggcgatgcaggctatgtagcaccggcagctcctgcctacgaagctccggcaccaccagctcctgcttacgaagctcctgctccaccagctcctgcctacgaagctccggcaccagctgctcctgcctatgaagctccggcaccagctgctcctgcctacgaagcacctacaactgattacagtgctcccgctccaccagctcccgcctatgagccaccagcatccagctacacccaggggtacagccagcccgcacagccaagctacgttggtgcaccaccggcacagatcgtttaccagcccatcatctatctctccactccactggcatcgaagtcgtccacctcccaggtggagtatgatgatcagaaatatgtcactccaacagccccaccaccaccgccaccacctgcccccgtttacgaggcgccatcgcagaattgctaccaaccggcggctcctcctgctcccaactatgccacgccctcgtgccaaacgcccatccgcctttcgctcatagatcagccatatcgagtggctccggaactgttcgaggaatacaactaccgcctggcccttgcctcccagaatattttgtag

SEQ ID NO: 19365 - protein, 263 aa, DROSOPHILA
MKLFKKLPELFPTASPCGQCGGGCGQNNYVAPAPQSPSYGGDGYGVLPNGGYIKPDTEYNGPGDGDAGYVAPAAPAYEAPAPPAPAYEAPAPPAPAYEAPAPAAPAYEAPAPAAPAYEAPTTDYSAPAPPAPAYEPPASSYTQGYSQPAQPSYVGAPPAQIVYQPIIYLSTPLASKSSTSQVEYDDQKYVTPTAPPPPPPPAPVYEAPSQNCYQPAAPPAPNYATPSCQTPIRLSLIDQPYRVAPELFEEYNYRLALASQNIL

SEQ ID NO: 19366 - DNA, 2740 bp, DROSOPHILA
tatccattaaacgattgaaaaactgttcgaaaaaaccgacgagtgtcttggagatgtggatcgtggatggattatccatttataaatggatttagttggatgagcagtgggatgaaggtatggatgttataggaaatacaaactgcagttgatttgagcggaaatatcaattaacaaatcgtccaaagtatctaccaactatttatttatttattcaacaacgcagttgctcgaaaaatgccaccagtgacaagtacttcaataagttctaaaatatttaaaaaatacaactgatgttcgcgccagactttacaatataatccaattaaatagattgcatagattccaattgtcagtgtagttcgaaatgtaatttttgtgttcacctcaccataggtaatgggaatacaatggcgtttggttatcaacaagtattcattatctaaacaattggcaattttaaaaacattttacaactatgagatagctggatatgtcgtttttgccttttgggtgagatattcatacaggaagtctttcaaccaattagttttattagcttagagtaaaccctttaaaatcgcttccattccagcagaattattaaagaactaagaaccttttattcacaaaatttctgcacttttaatcttaaaatcaaacttatctgcattaatcgtacaattgctttcgtttaacaatgcaacgaacatgcgcgcacacacaacacaccccgtatatcacaagcacacacccgcatatctataaatatgcggaatactatatctctcctgactacataatgtatgatatataatcgtatatgcattgatactaacgaactactgatgatggcaagtggttttttttttataaattacattctaactagttggggaggatccagctgccggatgccgatgcaaatgcatcctcgttgctctgggacacacatctttggtagaggcttctcctcgtcaccgcacacaggaccgacccatcaaatgcccaatttgcgccacaaattgtgcatccgtccgccggtggcaaagatgctgcgcagcatgaacacctggatgagacccacaccgatcatggcgcttatctgcaccatagaccagtggttgaccttctggaaattggactcggccagattgcgatcgcgtgcctcgtgcgaacggagcacatcctgcaactggcgggccttggtcagctgcagacgaatgcgtccaatgaagtccataatgtcctgcaccttcatatcgtaatactcgtcccgcgagagaccagttagctcgtccgcctcgttccactgcgtgtcaccctgtagctcctcgccctcgcgttccacaatcagctcgaagaacactgtcttgcgattgaacatgctgaaactattgtcgaagcaaaaccgatagtcgccctccttggccacctcgtggcgatggacgttctccggtttcttaaagtcactgactatcaccaggccaatggggtccagcagggtgaagctgatgtccaggtcaccgtgaccgccatcgattacctggtactcaaagtcaatggtctcgccctggcgcaccgagtggtataggcactctgttttgccggcgtccacgtagaccgtcatctccttgtcgtaggcctccgcatcctggacgcccagcagaagtgctgcgatggaaaggagcaggactaacccaggcattcccagccagatctggatgcagtgacgcaaaggtaatgagtaatggtggctaaatttagccggctctttatcttaccgcttgcattgtaagctgtttaacctaatattaaaaaatacaaaatgctcgctgtgccagtgtgcccgcagagttcggaagtttaataagtggtttcgcttttcgcggttttttagcgatgccatatcatctattttgtagccagatatgacaattttcagattttgtataaatatctcagccaagtaatattcctaatatgaaatgagaatatatagaattacgttcacattttgaataacataaatgaaaaatgtttattataaatgtaacctgtactaaagcaattacttcggcgaatttcataattttccatagtatttgatcaacatttagctagatttcagagcgaagatctggcaacgaaggcgataacggtttttgaattggcggcaaatttaaataagaaaaaatttatatgattaaaacaaacaactaaacaaattagaaatcctttttaataggtactttaacacttaggcctgtgtcggaaagggatggaataaggatccataataacaccaacatgataagcaatctcaaagatattattacagtaaaaatgtaaaatataaacaacatgtcgtattgcttatgttgtttcaaaacccttttaattagtattttacagtattgaaaactactttgcaaggtcacactgaccaggccaagaataagctcgaaagaaaacttggaaaaatagaagaaaaaacgtcaacaaaaaatcagaaaacccaggcgaaaaagagacaggcataccggattatatgtcagttttagctgatcacgtgaagagcttatttgccacgactaggttaaattcgcaaagatgaagatccgaaccaggaggagtctttccttttccggctgtggcttcttgggcatctatcacgtgggcgtggccgtctgcctacgccaacacgccccccaacttttgctggagaggattgccggtg

SEQ ID NO: 19367 - DNA, 740 bp, DROSOPHILA
ctttgcgtcactgcatccagatctggctgggaatgcctgggttagtcctgctcctttccatcgcagcacttctgctgggcgtccaggatgcggaggcctacgacaaggagatgacggtctacgtggacgccggcaaaacagagtgcctataccactcggtgcgccagggcgagaccattgactttgagtaccaggtaatcgatggcggtcacggtgacctggacatcagcttcaccctgctggaccccattggcctggtgatagtcagtgactttaagaaaccggagaacgtccatcgccacgaggtggccaaggagggcgactatcggttttgcttcgacaatagtttcagcatgttcaatcgcaagacagtgttcttcgagctgattgtggaacgcgagggcgaggagctacagggtgacacgcagtggaacgaggcggacgagctaactggtctctcgcgggacgagtattacgatatgaaggtgcaggacattatggacttcattggacgcattcgtctgcagctgaccaaggcccgccagttgcaggatgtgctccgttcgcacgaggcacgcgatcgcaatctggccgagtccaatttccagaaggtcaaccactggtctatggtgcagataagcgccatgatcggtgtgggtctcatccaggtgttcatgctgcgcagcatctttgccaccggcggacggatgcacaatttgtggcgcaaattgggcatttga

SEQ ID NO: 19368 - protein, 235 aa, DROSOPHILA
MPGLVLLLSIAALLLGVQDAEAYDKEMTVYVDAGKTECLYHSVRQGETIDFEYQVIDGGHGDLDISFTLLDPIGLVIVSDFKKPENVHRHEVAKEGDYRFCFDNSFSMFNRKTVFFELIVEREGEELQGDTQWNEADELTGLSRDEYYDMKVQDIMDFIGRIRLQLTKARQLQDVLRSHEARDRNLAESNFQKVNHWSMVQISAMIGVGLIQVFMLRSIFATGGRMHNLWRKLGI

SEQ ID NO: 19369 - DNA, 2789 bp, DROSOPHILA
tgtgaatagatggtaggaatggattgtcttctgttctttttcttatatttgtgaattaaacgcaacaacaattgcaaagaataaacaatttgccatattttttaaccgataatgctgtttataaaaagttccattatcaattccataataaagttgaaatttgccatttttaagtagaaattttgattggcagagggtcgttcatatagccaccccttattttaacgggtatttccaactcgacgtagcattggtgacgtttgtgctaatttgtgcttttaatgggccattaaaattgtctcttctatgacttaacctactttttgggaattacgtgtcgtagaaatcacctttgccatttcgtaaatgtggtaaaagttatatctttgcatgtgaaattttcagtaaacctcaattgggtgaaggagtgtcttgcctaagactcacatatccacgaaccccaaagtcaagtgagaaaatatgtcggaacatttggtatgaaatcaaatatatcctagtaaatatcttttttacacaaaatttatttttgcacatagttcttgaataataatcgttatagaaaagccataaatgttttatttgggtcatcgcttattttttaaacggggaatactataaaggtgtgtcttgtgaaaagctcctctaatcacctagaatgacaaggtcattctagcttgagggcaagctatctatatctaataacacccgttgaagtgccgacttccgagtttagactggtgctgcacatacacatacatacgtaccgctttctttgattgatagcaagtctgattgataagaaacaagcctacggccttctagtgcatggtatgctaattccatggatcaaaagatcgaccgatactgtcagctggccactcaatggttaacattccacccacttcatcagcgtattcgcgcctgatggaaagttataaatgtctgccatggttaactgattggtcagtgtttttccagaatgcacagattagtggttcttttagtttgcctggctgtgggttccgcctgtgctggcacagtcggggtctccaatggtgatcccttcgagcgcgaaggtcgcattgtcggcggcgaggatacaacaatcggagcgcatccctaccaggtttccctgcagaccaagagtggctcccacttctgtggtggtagtttgatcaacgaagatactgttgtcacggcggcccactgtctggtgggaaggaaggtctccaaggtgttcgtgcgtctcggttccacgctctacaatgagggtggaattgtggttgctgtccgggagttggcatacaatgaggactataactcgaagaccatggagtacgacgtgggcatactgaagctggacgagaaggtaaaggaaaccgaaaatattcgatatatcgaactggccacggaaacgccgcccactggcaccaccgctgtggtcaccggctggggttccaagtgctacttctggtgcatgacactgcccaagacgctccaggaggtctatgtcaacattgtggactggaagacgtgcgcttcggatgagtacaagtacggagagatcatctacgatagcatggtgtgtgcctatgaaaagaagaaggacgcttgccaaggagattccggtggtcctctggcggtcggtaacactctggtgggaatcgtgtcctggggatatgcctgtgcctcgaacctactgcccggtgtttactccgatgtgcccgctttgcgaaagtggatcctgaatgcaagcgaaactttgtagatataaataataataatatactagaccggcatactagactggcatactttcggggattatatagcgattcgaaatcaaaaagcttcccatctgcccatctaattgttaataagtttcatatggatgatacaattatgatttatggcaaatttcgatgttgctttctcaagtcttttagccaatctatggtgtctcagaaaaattagtattgactaaattgtaaatatatattaaacagccaaaaagaggaaaggtgtttggtatacattttatttaaccaatcgaagctttttattgcttcaagtagcaattaaatatttgatcaccctgatacgcctgaactaaggctaattgattggcattattcttagtcagctatggttcaagagaacagctaccgctccgggatggtcatcttatcggtgttaaaataaaagcagtttattgaccaatttgcgatatgagccaaagcttttcgttgatttcgagcaaagtaaaagattcgatttagtcactctccgaacaacaaaatgaacaaagtcatattacgcattcttgcggtgctgtttcttctcggaatttatgcagtatcggcgcaatcagatggtcgcatagttggcggtgcagatacatccagttactataccaaatatgtggtgcagctgcgcaggcgcagttcatcgagtagctcctacgcccaaacctgcggtggatgcatcctggacgcggtgaccatagcaacggcagcacattgtgtctacaaccgcgaggcggagaatttcctggtggtggctggcgacgatagccgtgggggtatgaatggcgtagtggtgcgagtttcaaaattgattccccacgagttgtacaactcttccactatggataacgacattgccctggtggttgtggatcctcccctgcccttggatagctttagcactatggaagccattgaaatcgcctcggagcaaccagccgttggagtccaggccacaatcag

SEQ ID NO: 19370 - DNA, 789 bp, DROSOPHILA
atgcacagattagtggttcttttagtttgcctggctgtgggttccgcctgtgctggcacagtcggggtctccaatggtgatcccttcgagcgcgaaggtcgcattgtcggcggcgaggatacaacaatcggagcgcatccctaccaggtttccctgcagaccaagagtggctcccacttctgtggtggtagtttgatcaacgaagatactgttgtcacggcggcccactgtctggtgggaaggaaggtctccaaggtgttcgtgcgtctcggttccacgctctacaatgagggtggaattgtggttgctgtccgggagttggcatacaatgaggactataactcgaagaccatggagtacgacgtgggcatactgaagctggacgagaaggtaaaggaaaccgaaaatattcgatatatcgaactggccacggaaacgccgcccactggcaccaccgctgtggtcaccggctggggttccaagtgctacttctggtgcatgacactgcccaagacgctccaggaggtctatgtcaacattgtggactggaagacgtgcgcttcggatgagtacaagtacggagagatcatctacgatagcatggtgtgtgcctatgaaaagaagaaggacgcttgccaaggagattccggtggtcctctggcggtcggtaacactctggtgggaatcgtgtcctggggatatgcctgtgcctcgaacctactgcccggtgtttactccgatgtgcccgctttgcgaaagtggatcctgaatgcaagcgaaactttgtag

SEQ ID NO: 19371 - protein, 262 aa, DROSOPHILA
MHRLVVLLVCLAVGSACAGTVGVSNGDPFEREGRIVGGEDTTIGAHPYQVSLQTKSGSHFCGGSLINEDTVVTAAHCLVGRKVSKVFVRLGSTLYNEGGIVVAVRELAYNEDYNSKTMEYDVGILKLDEKVKETENIRYIELATETPPTGTTAVVTGWGSKCYFWCMTLPKTLQEVYVNIVDWKTCASDEYKYGEIIYDSMVCAYEKKKDACQGDSGGPLAVGNTLVGIVSWGYACASNLLPGVYSDVPALRKWILNASETL

SEQ ID NO: 19372 - DNA, 2789 bp, DROSOPHILA
tggcatacaatgaggactataactcgaagaccatggagtacgacgtgggcatactgaagctggacgagaaggtaaaggaaaccgaaaatattcgatatatcgaactggccacggaaacgccgcccactggcaccaccgctgtggtcaccggctggggttccaagtgctacttctggtgcatgacactgcccaagacgctccaggaggtctatgtcaacattgtggactggaagacgtgcgcttcggatgagtacaagtacggagagatcatctacgatagcatggtgtgtgcctatgaaaagaagaaggacgcttgccaaggagattccggtggtcctctggcggtcggtaacactctggtgggaatcgtgtcctggggatatgcctgtgcctcgaacctactgcccggtgtttactccgatgtgcccgctttgcgaaagtggatcctgaatgcaagcgaaactttgtagatataaataataataatatactagaccggcatactagactggcatactttcggggattatatagcgattcgaaatcaaaaagcttcccatctgcccatctaattgttaataagtttcatatggatgatacaattatgatttatggcaaatttcgatgttgctttctcaagtcttttagccaatctatggtgtctcagaaaaattagtattgactaaattgtaaatatatattaaacagccaaaaagaggaaaggtgtttggtatacattttatttaaccaatcgaagctttttattgcttcaagtagcaattaaatatttgatcaccctgatacgcctgaactaaggctaattgattggcattattcttagtcagctatggttcaagagaacagctaccgctccgggatggtcatcttatcggtgttaaaataaaagcagtttattgaccaatttgcgatatgagccaaagcttttcgttgatttcgagcaaagtaaaagattcgatttagtcactctccgaacaacaaaatgaacaaagtcatattacgcattcttgcggtgctgtttcttctcggaatttatgcagtatcggcgcaatcagatggtcgcatagttggcggtgcagatacatccagttactataccaaatatgtggtgcagctgcgcaggcgcagttcatcgagtagctcctacgcccaaacctgcggtggatgcatcctggacgcggtgaccatagcaacggcagcacattgtgtctacaaccgcgaggcggagaatttcctggtggtggctggcgacgatagccgtgggggtatgaatggcgtagtggtgcgagtttcaaaattgattccccacgagttgtacaactcttccactatggataacgacattgccctggtggttgtggatcctcccctgcccttggatagctttagcactatggaagccattgaaatcgcctcggagcaaccagccgttggagtccaggccacaatcagtggttggggttataccaaagagaacggcttgtcatccgatcaactgcagcaggttaaggtaccaattgtcgattccgaaaaatgccaggaagcctactactggcgaccgatcagcgagggcatgctctgcgctggactatcggagggcggaaaggatgcctgccagggagattccggaggacctctggttgttgctaacaagctggccggcattgtctcctggggagaaggatgcgcacgtccaaattatcccggcgtttacgcaaatgtcgcttactataaggactggatagccaaacagcgaacatcttatgtataaccgaggggatatacctagtcgattatataaaatgtcaaataaaatagcgtactacaagcgaaaaacgtctttatagttcagacaacttatatagccgattaaaaaactgcaattatcgaagcaaaaatgagtttggtaataaactcttttattgggaatactgactattaagtccacagttcagttttcaaacgaatcattatttacgtttagatttaaaaaccgaaattaaacagtcaaagaaattccaaaaaataattgtagccatattcttgcaaaaaaaataaatagcttacaaatattgtcaattgcataaaataaatttaaaatgttaaacgtttcaaaatcaatctcaattatgttacccagtgttatagtagcctataaatcctaatcgctcgtagtaacgaatgaccatgcatatccattataaaatttatgattcctatattcgaatcggccgttagataagccatggaatggccggccaaaaaatttgggccttcagttccctattctccttgcctttgtaagcatgtcgagctcttggatagttggcctcttggcctttctcgtcagcttggtggccttgacccaaggtcttccccttctggaggatctggatgagaagagcgttccggatggccgcattgtgggtggctatgcgacggacatagcgcaggtcccgtaccagatttccctgcgctacaagggtatcaccacgccggagaatccctttcgccatcgttgcggaggatccattttcaatgagactacaatagtgacagcggcgcactgcgtcatcggcacggtggcaagtcaatataaagtggtggccgggacaaatttccaaaccggctccgatggcgttatcaccaatgtcaaggagatcgttatgcacgaagggtattactcgggagctgcctacaacaacgatattgccattctatttgtggatcccccattgccgctcaacaacttcaccatcaaggccattaag

SEQ ID NO: 19373 - DNA, 789 bp, DROSOPHILA
atgaacaaagtcatattacgcattcttgcggtgctgtttcttctcggaatttatgcagtatcggcgcaatcagatggtcgcatagttggcggtgcagatacatccagttactataccaaatatgtggtgcagctgcgcaggcgcagttcatcgagtagctcctacgcccaaacctgcggtggatgcatcctggacgcggtgaccatagcaacggcagcacattgtgtctacaaccgcgaggcggagaatttcctggtggtggctggcgacgatagccgtgggggtatgaatggcgtagtggtgcgagtttcaaaattgattccccacgagttgtacaactcttccactatggataacgacattgccctggtggttgtggatcctcccctgcccttggatagctttagcactatggaagccattgaaatcgcctcggagcaaccagccgttggagtccaggccacaatcagtggttggggttataccaaagagaacggcttgtcatccgatcaactgcagcaggttaaggtaccaattgtcgattccgaaaaatgccaggaagcctactactggcgaccgatcagcgagggcatgctctgcgctggactatcggagggcggaaaggatgcctgccagggagattccggaggacctctggttgttgctaacaagctggccggcattgtctcctggggagaaggatgcgcacgtccaaattatcccggcgtttacgcaaatgtcgcttactataaggactggatagccaaacagcgaacatcttatgtataa

SEQ ID NO: 19374 - protein, 262 aa, DROSOPHILA
MNKVILRILAVLFLLGIYAVSAQSDGRIVGGADTSSYYTKYVVQLRRRSSSSSSYAQTCGGCILDAVTIATAAHCVYNREAENFLVVAGDDSRGGMNGVVVRVSKLIPHELYNSSTMDNDIALVVVDPPLPLDSFSTMEAIEIASEQPAVGVQATISGWGYTKENGLSSDQLQQVKVPIVDSEKCQEAYYWRPISEGMLCAGLSEGGKDACQGDSGGPLVVANKLAGIVSWGEGCARPNYPGVYANVAYYKDWIAKQRTSYV

SEQ ID NO: 19375 - DNA, 2851 bp, DROSOPHILA
ccccacgagttgtacaactcttccactatggataacgacattgccctggtggttgtggatcctcccctgcccttggatagctttagcactatggaagccattgaaatcgcctcggagcaaccagccgttggagtccaggccacaatcagtggttggggttataccaaagagaacggcttgtcatccgatcaactgcagcaggttaaggtaccaattgtcgattccgaaaaatgccaggaagcctactactggcgaccgatcagcgagggcatgctctgcgctggactatcggagggcggaaaggatgcctgccagggagattccggaggacctctggttgttgctaacaagctggccggcattgtctcctggggagaaggatgcgcacgtccaaattatcccggcgtttacgcaaatgtcgcttactataaggactggatagccaaacagcgaacatcttatgtataaccgaggggatatacctagtcgattatataaaatgtcaaataaaatagcgtactacaagcgaaaaacgtctttatagttcagacaacttatatagccgattaaaaaactgcaattatcgaagcaaaaatgagtttggtaataaactcttttattgggaatactgactattaagtccacagttcagttttcaaacgaatcattatttacgtttagatttaaaaaccgaaattaaacagtcaaagaaattccaaaaaataattgtagccatattcttgcaaaaaaaataaatagcttacaaatattgtcaattgcataaaataaatttaaaatgttaaacgtttcaaaatcaatctcaattatgttacccagtgttatagtagcctataaatcctaatcgctcgtagtaacgaatgaccatgcatatccattataaaatttatgattcctatattcgaatcggccgttagataagccatggaatggccggccaaaaaatttgggccttcagttccctattctccttgcctttgtaagcatgtcgagctcttggatagttggcctcttggcctttctcgtcagcttggtggccttgacccaaggtcttccccttctggaggatctggatgagaagagcgttccggatggccgcattgtgggtggctatgcgacggacatagcgcaggtcccgtaccagatttccctgcgctacaagggtatcaccacgccggagaatccctttcgccatcgttgcggaggatccattttcaatgagactacaatagtgacagcggcgcactgcgtcatcggcacggtggcaagtcaatataaagtggtggccgggacaaatttccaaaccggctccgatggcgttatcaccaatgtcaaggagatcgttatgcacgaagggtattactcgggagctgcctacaacaacgatattgccattctatttgtggatcccccattgccgctcaacaacttcaccatcaaggccattaagctggccttggaacaaccaattgagggaacggtcagcaaggtcagcggatggggaaccacttctcccggcggctactcctcgaaccaactgctcgcggtcgatgtcccgattgtgagcaacgagctttgtgatcaggactacgaggattttggcgacgagacctaccgcattacatcggccatgttgtgtgccggcaaacggggtgtcggtggtgcggatgcctgccagggagattccggaggaccgttggcggtgcgcgatgaactctatggagtcgtgtcctggggcaacagttgtgcactgcccaattatcccggcgtctatgccaatgtggcgtacctgaggccttggatcgatgccgttttggcagggctctaaattaattatatcacccattccacgttttgtaaataaattggcttctgaagccacgtgccttagggttttccgaactgaaggtttttattaatctttttctaataaaatcaacttaatcaatgattagatgaaccttgagcgtgtggattatggatcaaaaccggttcaaaacacttttaccaaatccccaaaaatatgcaacattaaatttacgcttagagtggaccaaagttcccagtgttgggaattctacactcttaaacattaatattggcacctagttatttatatgcccaataaaggcattcttagttatacaatttggcctaagtataagctttctccgaagagaaaccgtaaggattaacgtattatttacaccaataatgtgtcacttggattgacattatcttggtcggaccctgtgctcacaccgctatcagaagctatcttaagcaccgaccattaactcaatcggcatgttcattgaacgcaacctagctaagtctaaactgaaatccgtaatcagttcgattggaacctcacacccgtgcgaatcgatggaaggtgcgatgtgcatcccgctactgttgttggccattgggttctcctccgttatttcaatttccggtcaaccggagggcagaataattaatggcactacggtagatattgcccgtcatccatatctagtctcccttcgctatcgccgggataatgagtccagctatatgcacgaatgtgccggtgtcatcatctcggaacaggcattgatcaccagtgctcagtgcctctatggcttgcccgaggaaactaaacttgtggctgtggccggagcaaacacccgcaatggaaccgatggatttatttacccagtagccaattggacccatcatccgaactacgatcccgtgacagttgacaatgatataggtgtcctccttctggacacaaccctcgacctcacgctcctcggaataagctcaattggtatccgcccggagc

SEQ ID NO: 19376 - DNA, 851 bp, DROSOPHILA
agcatgtcgagctcttggatagttggcctcttggcctttctcgtcagcttggtggccttgacccaaggtcttccccttctggaggatctggatgagaagagcgttccggatggccgcattgtgggtggctatgcgacggacatagcgcaggtcccgtaccagatttccctgcgctacaagggtatcaccacgccggagaatccctttcgccatcgttgcggaggatccattttcaatgagactacaatagtgacagcggcgcactgcgtcatcggcacggtggcaagtcaatataaagtggtggccgggacaaatttccaaaccggctccgatggcgttatcaccaatgtcaaggagatcgttatgcacgaagggtattactcgggagctgcctacaacaacgatattgccattctatttgtggatcccccattgccgctcaacaacttcaccatcaaggccattaagctggccttggaacaaccaattgagggaacggtcagcaaggtcagcggatggggaaccacttctcccggcggctactcctcgaaccaactgctcgcggtcgatgtcccgattgtgagcaacgagctttgtgatcaggactacgaggattttggcgacgagacctaccgcattacatcggccatgttgtgtgccggcaaacggggtgtcggtggtgcggatgcctgccagggagattccggaggaccgttggcggtgcgcgatgaactctatggagtcgtgtcctggggcaacagttgtgcactgcccaattatcccggcgtctatgccaatgtggcgtacctgaggccttggatcgatgccgttttggcagggctctaaattaa

SEQ ID NO: 19377 - protein, 280 aa, DROSOPHILA
MSSSWIVGLLAFLVSLVALTQGLPLLEDLDEKSVPDGRIVGGYATDIAQVPYQISLRYKGITTPENPFRHRCGGSIFNETTIVTAAHCVIGTVASQYKVVAGTNFQTGSDGVITNVKEIVMHEGYYSGAAYNNDIAILFVDPPLPLNNFTIKAIKLALEQPIEGTVSKVSGWGTTSPGGYSSNQLLAVDVPIVSNELCDQDYEDFGDETYRITSAMLCAGKRGVGGADACQGDSGGPLAVRDELYGVVSWGNSCALPNYPGVYANVAYLRPWIDAVLAGL

SEQ ID NO: 19378 - DNA, 2792 bp, DROSOPHILA
ttgtggatcccccattgccgctcaacaacttcaccatcaaggccattaagctggccttggaacaaccaattgagggaacggtcagcaaggtcagcggatggggaaccacttctcccggcggctactcctcgaaccaactgctcgcggtcgatgtcccgattgtgagcaacgagctttgtgatcaggactacgaggattttggcgacgagacctaccgcattacatcggccatgttgtgtgccggcaaacggggtgtcggtggtgcggatgcctgccagggagattccggaggaccgttggcggtgcgcgatgaactctatggagtcgtgtcctggggcaacagttgtgcactgcccaattatcccggcgtctatgccaatgtggcgtacctgaggccttggatcgatgccgttttggcagggctctaaattaattatatcacccattccacgttttgtaaataaattggcttctgaagccacgtgccttagggttttccgaactgaaggtttttattaatctttttctaataaaatcaacttaatcaatgattagatgaaccttgagcgtgtggattatggatcaaaaccggttcaaaacacttttaccaaatccccaaaaatatgcaacattaaatttacgcttagagtggaccaaagttcccagtgttgggaattctacactcttaaacattaatattggcacctagttatttatatgcccaataaaggcattcttagttatacaatttggcctaagtataagctttctccgaagagaaaccgtaaggattaacgtattatttacaccaataatgtgtcacttggattgacattatcttggtcggaccctgtgctcacaccgctatcagaagctatcttaagcaccgaccattaactcaatcggcatgttcattgaacgcaacctagctaagtctaaactgaaatccgtaatcagttcgattggaacctcacacccgtgcgaatcgatggaaggtgcgatgtgcatcccgctactgttgttggccattgggttctcctccgttatttcaatttccggtcaaccggagggcagaataattaatggcactacggtagatattgcccgtcatccatatctagtctcccttcgctatcgccgggataatgagtccagctatatgcacgaatgtgccggtgtcatcatctcggaacaggcattgatcaccagtgctcagtgcctctatggcttgcccgaggaaactaaacttgtggctgtggccggagcaaacacccgcaatggaaccgatggatttatttacccagtagccaattggacccatcatccgaactacgatcccgtgacagttgacaatgatataggtgtcctccttctggacacaaccctcgacctcacgctcctcggaataagctcaattggtatccgcccggagcgtcctgcagtgggtagacttgccactgtagccggatggggctaccgggaggagtggggcccctccagctacaaactggagcagaccgaagttccagtggttagctctgagcagtgcacacaaatctacggagctggcgaggttaccgagcggatgatttgcgcgggattcgtagttcaaggaggcagtgatgcctgccaaggcgacaccggtggccccctggtcatcgatggtcagctggtgggtctggtgtcctggggacgcggatgtgcccgacccaactaccccaccgtctactgctacgtggccagctttgtggattggatcgaggaaaccatagcagctgctggagtgcaataaacataggcattttcgcggcaatcgatacgctatctttaagtggttaccgtcggatagagctacctaatttaataataaaaccgtaatcaaacaaacaatatactacgttatcgtctgtattggtcatttcttacgtaattcgaagatataaaaggttttgagttgattgaggctagttacaagacgtttgaatagtatttttgccttaatattattacagaaagtcgattttgcccacactctctttatccgcaacggtctccaccagccaatcgagaacatccggtacggagcaatagactccgggatatttctcacgggcacagcccgttccccaggacacaatgcccaggagtgtgttgttgtagaccagcggaccaccggaatctccctggcatgcatcctttccacctccgttgactccggcgcaaagcatacgactggtcagcataatggaataggcgttcttgcagttcgagttgtccaccacattaacgctgacctcctgcaggacgtcggagatggttccgccttcgctggtggttccccagcccgtcacggtaacgggtgtatcatgatcgggccgctccttggccaactcaatcggctgcacggcgtcgttgaactcgaaatccccatccaggatcagaattgccgcatcgtagtcgttgttcagagtgcgatacttgggatgaatgatgatctcacggacttccaactcctgctgcggacccgtggggaaccagatgttcgaggaaccagccacaatggtaaggttttccgggccggacaaggtgtttacacaatgggcagcactgatgatctggtttgatctgtaaattgtgcctccgcatcggtgatttcctctatacctcatcgagatctgatgcggatattgggtgatgttcgtgtcctgtccaccgacaatgcgtccatcgagcttcggtatatgaacctcttcgttccggtatataggatctgccagggagcagcccactcc

SEQ ID NO: 19379 - DNA, 792 bp, DROSOPHILA
atgtgcatcccgctactgttgttggccattgggttctcctccgttatttcaatttccggtcaaccggagggcagaataattaatggcactacggtagatattgcccgtcatccatatctagtctcccttcgctatcgccgggataatgagtccagctatatgcacgaatgtgccggtgtcatcatctcggaacaggcattgatcaccagtgctcagtgcctctatggcttgcccgaggaaactaaacttgtggctgtggccggagcaaacacccgcaatggaaccgatggatttatttacccagtagccaattggacccatcatccgaactacgatcccgtgacagttgacaatgatataggtgtcctccttctggacacaaccctcgacctcacgctcctcggaataagctcaattggtatccgcccggagcgtcctgcagtgggtagacttgccactgtagccggatggggctaccgggaggagtggggcccctccagctacaaactggagcagaccgaagttccagtggttagctctgagcagtgcacacaaatctacggagctggcgaggttaccgagcggatgatttgcgcgggattcgtagttcaaggaggcagtgatgcctgccaaggcgacaccggtggccccctggtcatcgatggtcagctggtgggtctggtgtcctggggacgcggatgtgcccgacccaactaccccaccgtctactgctacgtggccagctttgtggattggatcgaggaaaccatagcagctgctggagtgcaataa

SEQ ID NO: 19380 - protein, 263 aa, DROSOPHILA
MCIPLLLLAIGFSSVISISGQPEGRIINGTTVDIARHPYLVSLRYRRDNESSYMHECAGVIISEQALITSAQCLYGLPEETKLVAVAGANTRNGTDGFIYPVANWTHHPNYDPVTVDNDIGVLLLDTTLDLTLLGISSIGIRPERPAVGRLATVAGWGYREEWGPSSYKLEQTEVPVVSSEQCTQIYGAGEVTERMICAGFVVQGGSDACQGDTGGPLVIDGQLVGLVSWGRGCARPNYPTVYCYVASFVDWIEETIAAAGVQ

SEQ ID NO: 19381 - DNA, 3514 bp, DROSOPHILA
gttgaaccactgaacactggcttttgtacatttggatgtttgttttacttagctttagagtaaacaaaaaaaaatcaaagatgaaagccgacaggatttttccgaagggtccaactcctctagtcatcctcgtcgttgcgcaccttcagggcgcgcggatcgtcgtggcggtagacaacgtagccgagcttgtagcgtcggttatcgccgtccttggcatagtagttggccactccgatggtggccataacgattccggcgagggccaaagcggatccgccgacgatgtccggaatctcgttccaggcgcgcttcagcagcgatgtggagcctcgggcagcggatgcggacatcttggtacactgcgggatggggctattagttcactgggcgcagcaaataaaattataaagcatttaccaaaaattcaacgcgttcagttaagttacacaacgaacaaaccaaacagctgattagagctggcctgctggctatcgatactcgctatcgccgcacagatgcaggcaacgaaatttcgatagactgaatattgaaataaaaaagctttttgaattatcttcgtgacaaatgatttattctagaactgcaactagatgtaatattttcaacgttatgtggaaatttgttcgaattttgtttatttgctgcttaggattctttaaaaaaaagtattttgctaaataaaaattttcgccattgagagtacgatttttatattcgtgacttgtcgagtaaaagtgtagactagattcgtttagaagtaaaagaacaggcaataggaagagtttccgaccatcctaagtatatatattcttgatcaggatcaatagccgagccgatctgaccctatccatctgtctttttttacttttcaacgaatgtagtttacaattttgcttaacgagtaacgggtttaattagaaaaaaaaactgatctgattatgaattaattgctatatttttgcgaatgcagacttcatcacgccttctcctcgtagccctcggtcttcatgtcattgaggcccagatcctcgttgtcctcgtaggagcgatcgtaccgctccacagtgagcttgtcatccggctccgagtcgtcatcgctcagtgattgcacataggtattaccggccggatcctccagcaccagcgtaatgactcgcttcagattcatgacatcctcgaaggtgtcaaggaatcgctgcatctgctgcttggtcgcgtcgtcggcggagtcgtggaaaagcgtgccgtccaactgatcccgcatggcaaccagcagaccctccacggtggtgaatcgcccgcacagggcatgcggacccacctcgaggtccagctctggaatagacatgctgcacgtctccgacttgaggacatcacgcgtcagatcctccctgctggcaatctggacgcggaagcgtacaccctgcgcctccactccgccgccggacttcacttcgttcgtcttgtggccacaggcaccgcaaacggtggccatgatcaccacctccttgaagtgcggtatgtttgtcagcttcatgttcgtctcgcagggcgcctggcagctgggacaattggtggggaactgaagcacttcgccgtgcagattctcaatgggccacgagtcctcggcaatcggcttcaacaagtgctgctcctcgtgattctgctcgtacaggcctgtaaaggaatacaggtgtgtggttataaggggaacaatacgaattatgtgactcaatggttcttttggctatctccactggttaagtttctaattttacaaagaggcctcacccaattgctcgttctgctgctggctgcgtgtgaagtacgaagtctttagctgcggatcggcggcaggtgccaggggattctcgatgaaactattgccggatatgtcctcgagaagcacttgaaagggtgttgtcacctcctttaggcggtgcaatcgctcgatgtacttttcaattgaagcagctgtctccggatgatcgatgcgccgcttctcctgatcctgcgacaagccggctatcgtccgctcgatgatgccttcgacggtggtcacctcgcccttctgcgactgcaccggaatctctagctcgatctccggtatgctgatgctggagttatccgagcgcaccacgcgccgattgagatcagccacggattgcactcgcagttcgatgcgaatgccggacttttggatctccgatgccgactgcatctcgttgttgatgtggccgcagtggtcgcacttgaaggacatgagcaccacctcgcgaaaaaagggtatcttggtgggcagcagccgagtgactcccgtttcgaagcagttcatgcaggcggattcgacctccactatctcgtcggtctgctccgcattgatttcccggaaaatgggctccggccgaatgttccccgcactctccggcggattgctactgttggggtcgctcacggtggacatgatttgattgctatccacacgaaagttcctgtttaagtgtgcttttttaaatgaaatgtatatgtttggggcgaaacgtgcaagtttaatcgatagacgctgacgataagtgtcgatagtcgtcgtgtgaccggcttgcatatgcttaaaactccttaaatacccagaagtgtgctcggcgcgttgatcttaaacgctcgagaatttactcgtgttcgatagaaaattccccgaaataaaaaggtgcacaaataaatttaagagcttacctgtagcggtacacggtaaggccataaaacaaaaactgattggccatctgcatattaatctgggaataccacctacctgacacacgttcttcctaaaattacctgcgctttcagaaataactggagtccttttgtagagcgacaattcaaggcagtacaaaaagagccaagcttagagtatcattgaattgttgatattcctgttaccattttaagagactttcaattaagatggccggatcgtcgagcattagtgcgctgttggccgagcaaatgaatttgggcgagaagattcaaagcattattcgcaattataaaaaggctccggctcaacggaaatctaaacctggatattttgaagggcgactatccaaattgcaaagcttgtgggatgcattttccaaaggggaaaatactattaaaactcgcaacgaaaagacgcaaatggaacatacatactttaaaaacaacttctttgtcaaaataaagactttggtagttgaatatacatcagaattcaatcgaaaactgcacgcatcggaaaatgatactgaaaacgtgcacgcatcggaattggatactaaacacgtgcccgcatcgcagcagaattctgaagatcaattcaattctatgcttagagagcatcggatattgatggacagattggataatattataaacgagttggaatgcgtgacaaggaatgggattaatcccatcattttaccctatttaactgatatgcaaaatatgcatg

SEQ ID NO: 19382 - DNA, 1400 bp, DROSOPHILA
actttcgtgtggatagcaatcaaatcatgtccaccgtgagcgaccccaacagtagcaatccgccggagagtgcggggaacattcggccggagcccattttccgggaaatcaatgcggagcagaccgacgagatagtggaggtcgaatccgcctgcatgaactgcttcgaaacgggagtcactcggctgctgcccaccaagatacccttttttcgcgaggtggtgctcatgtccttcaagtgcgaccactgcggccacatcaacaacgagatgcagtcggcatcggagatccaaaagtccggcattcgcatcgaactgcgagtgcaatccgtggctgatctcaatcggcgcgtggtgcgctcggataactccagcatcagcataccggagatcgagctagagattccggtgcagtcgcagaagggcgaggtgaccaccgtcgaaggcatcatcgagcggacgatagccggcttgtcgcaggatcaggagaagcggcgcatcgatcatccggagacagctgcttcaattgaaaagtacatcgagcgattgcaccgcctaaaggaggtgacaacaccctttcaagtgcttctcgaggacatatccggcaatagtttcatcgagaatcccctggcacctgccgccgatccgcagctaaagacttcgtacttcacacgcagccagcagcagaacgagcaattgggcctgtacgagcagaatcacgaggagcagcacttgttgaagccgattgccgaggactcgtggcccattgagaatctgcacggcgaagtgcttcagttccccaccaattgtcccagctgccaggcgccctgcgagacgaacatgaagctgacaaacataccgcacttcaaggaggtggtgatcatggccaccgtttgcggtgcctgtggccacaagacgaacgaagtgaagtccggcggcggagtggaggcgcagggtgtacgcttccgcgtccagattgccagcagggaggatctgacgcgtgatgtcctcaagtcggagacgtgcagcatgtctattccagagctggacctcgaggtgggtccgcatgccctgtgcgggcgattcaccaccgtggagggtctgctggttgccatgcgggatcagttggacggcacgcttttccacgactccgccgacgacgcgaccaagcagcagatgcagcgattccttgacaccttcgaggatgtcatgaatctgaagcgagtcattacgctggtgctggaggatccggccggtaatacctatgtgcaatcactgagcgatgacgactcggagccggatgacaagctcactgtggagcggtacgatcgctcctacgaggacaacgaggatctgggcctcaatgacatgaagaccgagggctacgaggagaaggcgtga

SEQ ID NO: 19383 - protein, 457 aa, DROSOPHILA
MSTVSDPNSSNPPESAGNIRPEPIFREINAEQTDEIVEVESACMNCFETGVTRLLPTKIPFFREVVLMSFKCDHCGHINNEMQSASEIQKSGIRIELRVQSVADLNRRVVRSDNSSISIPEIELEIPVQSQKGEVTTVEGIIERTIAGLSQDQEKRRIDHPETAASIEKYIERLHRLKEVTTPFQVLLEDISGNSFIENPLAPAADPQLKTSYFTRSQQQNEQLGLYEQNHEEQHLLKPIAEDSWPIENLHGEVLQFPTNCPSCQAPCETNMKLTNIPHFKEVVIMATVCGACGHKTNEVKSGGGVEAQGVRFRVQIASREDLTRDVLKSETCSMSIPELDLEVGPHALCGRFTTVEGLLVAMRDQLDGTLFHDSADDATKQQMQRFLDTFEDVMNLKRVITLVLEDPAGNTYVQSLSDDDSEPDDKLTVERYDRSYEDNEDLGLNDMKTEGYEEKA

SEQ ID NO: 19384 - DNA, 12052 bp, DROSOPHILA
gcgctgagctaagtcgtgcttcattccgaatccacgaagaagattcctccgtatggaaagctgagatagtcaggaaatggtaccaaggatttatagctcgagtatgaaaaccccaaatggattccaattgaatgaaaagacatgcgtggtttctttgtaatgattctatttttagttttatcaatttttacataaattgcatatatgataattagtccttaaacacgtaatgcacaaagggaatgaagctgtcactgatatacatagagttatgtatcatgtgcatgatagtttggattccataggctgcatgttgatgtcatatataactatgagagttctttgtatatgtgtatatgtacaatcaaattataattagtttcttgctcaacatgtctcttggctgtttcacttaagcttatattaatattatacaaataatacaaatagacttaaactaaatacgcgaacctaaagttacatttatgcttgtaatttgtattcattaaaaataagtaaagttcgtattacttatgtgacgtttcaacgcgcgaccatattaagatcgaggaaagtattttgccaatgtggggactcagtgcttaggttgaatgctaggtctgaagtataaggaagtcttaacctcttttaatttgatttttgtttgccacaaacatctgcatctgcatctgcatcgtaatcttcatcttcatctgtatcgtaatcttcttcttcatctgtatcgtaatcttcatcttcatcgtaatctcattttcatctgttcaagaatttatgtgtagtttacaaaagcgttgcgcttcatttattggtgttctctcaggctcaaaatgatgctgggaggaggtaatcaggatgggactttcattcatgggttttctttcatgacaatgacatttttttggtggaggtgatcgaaattttgaaaattcctttgtcttattcgccttgccaatggcgtttagtaacgacttgccgcctatcatcgactgggcgccaccgatgacaccggagatattccgattacaccaccaggtactgaacttagcccaacaccagcattcgacacaatgcccattgtgtggtccgactccttcttggcgctaacagactgctggcccatcgaatcgacgctaatcatgtgctggactggaatgcttcctggtgcctgtggccctccagagttctttaccatcccgccgccactggacatctgctgctgttgctgctgacttggcggaccgggctgctgtacccccgattgcgccacactggacactatctgtaggcgatgatgtggcggcggagggcctagagagccaaccgaaggcggaataggacttggctccttgctacgcaaatgagctgcagattgcgctgcatagatatttatcgccttctgcctttcctcggcctcgtgtcgcagggcagcctccatgatgggattgtagcgaagaatgggatagggatcgcgatacggatctattccccagccgggtggcgctggtgcaccgaagtgcgtgatgggcccaccgacactcagagtaggcggcatcatggtgcgcgtgaggtgcgagggtggcggtggcaagccgtgtcgactggctgccataaagttggcatgatgatggtgtgccgctgccgcagctgcactcgcctgtgcggcggccagcgaggaggaatggtagcggggatcaccaacgccgactgccgccgctgaagctcgcaaaagcattacgtcctgctcctcctttgtgcgcggatgctcctccttgatacgaatctccgtgttaagctcgcccacgtttcgatgtggcgaacggtcacgaacgggcgccgtcgcagcagccgcagcttggactgcagcctgcttgttgctctcgttgatccgctgctgttgcaacatacgctcgcgctccatttcccgccgctcgatttccctgcgttcgcgttcccgctcctttcgatcccgttctcgttcccgttcccgttcctgttgctcccgtttcagtttctcctccttctccttcctttcccgctcctcgcgttcgcgtcgctgacgatcccgctcccgttgctcacgatcccgcagctcccgttcgcgttcctccgcctcgcgtcgtgcattgtccagaccaggatccgactttaccggccagttgggggacggcgccgcggaggagggatgataagcgacactccgttgcatggcatttgttctaaaagaaaatgaaatgcacgtttacacattgttttctaaacaagttaatattattggaaatgcaaaacggtaaacttaaatatgctcttaaaccagttatttaatttaatttcatttatttacctccacgagtccaagtggccaccaaaatgcgttagccctgtgaatccaaacggagtcacatagcgtccaaatggagacactgcggttcctgttaacaaatgattttggtttacttgacgaaattgggttaacgccacaaaatattccactcaccaatatgactaggaggcgctccaatgaaactcgccgccaggggagaagtttcaaatgctaagcgacccggtagaccgcctggaaatgctgctgatggcggcatttcactcgctcgatgcaaaatatgctgtggcgtcgagctcatgccaagagtgggagtcgtcttcatgccaagcaccgagggcggaccattggacacgaggacgccaccgccgaccgccggaatagctgccacattgttgaccggcgtgctggctccgctggccataccaccacctcctccgctgatcatgttgccaggaggtattggtgcattgatcgatcctgcgttcgatgacgccgttggaaagcctggctgcttctccgggctttgtttattctggtggtagtagatttcccacgcgatacgaacgtgcatggcattccagcgaccagttttctgttgcgtgaaacgaatatggagaatgtgaacatatttaaaagctcgtatttgattgataagcagcaactccttacctttggagcaaaggatgttaaatggttgggaggcatgaacggcgtcgggccaccaaggccactgtgcaaaaggcccgctgaggtgtagccactgtagcctcccggcggcaatcccatgccagtgcgatagaactgaggatcgacggatgagattttagaaatatctttaaaaagtggcgggggaaaaatttgtccagagctcggttgcacagcagataggggagttgatggggccgatactggtggaagcaactgcggatgctgatgtagatgtgcgtgctgttgatgctggagatcagttcgtaaatatgtcgatgatggcggtgtgggggtaacagccaagccagatctatccaggaatcggctatctagctcgcgccgcagcaaatcagcttgatcatctgcgaaaacaatgacatgatacattcaatgatcacaccgcttagtgcgaattgtgtgcaaacaacaacatacttttacttggctgaaaaagcgattctgcagaaaagggatgcggcgtgtttgtaactgggttcgatatagccgcaaccgaaggctgcgttacagatgaagccgtggtcgtagtggctcctgccgtcgtcacaatactgctcattgagtgcgacacagctggattgaattgcgaagcggaggagctgatgatggccgcggaagaagtagctggcgatggggaggatggtggcggcgctaaaggtgttgggaaatatgacgacgactgaaaagagggatttgtagcagacacgtgaataccagcggtcgcaggtatggatagcggtgatatggcattgcaagaacttctcgccgtcgatgccgcattcaccatgccaatgcccatgcttgtgcagttggagagcggaggcgtcggacgggcactaccactcgatactatgggcgttgtgggagcacatgtcgtcaccactgcgttggcaggagagctgcaccagaacaagaaggaagccacgttagtttgatgcatagcgaaatgaatatttgattattactttaaccacagtgctgccttcgatgagtacgaggagagatttcccagtcctggcggcattgaagaacttgacgataatactggggtacctgtaccaccatattgacttggggcgataccacaaaacgacgatcccaggccaatgccttgggatgcgccaggcagcattgttgacgcaccatgggatctgatatttgtactgcaaacgtaaagattgattttcaaactgcatatcaataaatgtatatggctatcgctcacctgtagctggaatcccgatctttattgcaaggactctctcctttgggggaaataaccttctggatcacagatgatgataaagttgatggagatgacgagctcgacgtgaccgctgtcgtcaaactttgcacagcgagaaccgagggcgtgaagttggagacagcagcagcagctgatggcggcgcagttgcagccgcagacgattgtgagtatagtgtacttccgcagcgaaccattggctgattctgcgatgacattgggtgcgtggtcagcaaatgggacactgacgaaaagttaccgctctgcggcagcatctgcgttgactgggggaagtgcgagtgcggttggggagcagccgacgttgatagtgaggtaaccgccagtgtagagagtcctgaattcggggtgctcgtcccagcggccgcagaggatgagaatgcacctgaagcgtaggcaggcacatgatgggaatgagatatatgtggattgctcatggaaagggcagtcgagttcgccgaaggcaccaccgacacaacgggctgcgatgcgccgctagaaattgcactgctattattaagtggcgtgatggatcgcagggtcggcgccatggatacatttaatccaatattcgatggcgttgacttcaaggatgctggcgactctcgactgttgcgactatccgagctccggtgttgtgtgggcggtaagttggacaagttgggcgtggcaaccggcaatactggaggcaggtatgacccgtgcgtaaggccgctatatggagtgtagagagggtaattcgtgtacggtgctcggtatggcggcgcctggatgatcatcggcacgccagtggccacatgagaaatgggagcgggcggtgcgccaggaaaaagcagtggagaccctgtgcccacaatggcattgccgccagcgccgaagaccacctttcccatgccggaagttgtcgtcgttccaccagaaataccaacatagtttgtgtttatcgagatggatgttgtggcggagaccggtggcactaatttattggctgcgttgggcgagacgcgtgacaacgcacttgtagttacggatgacgttgcaatggtagcagcaggcggcggataaacactaaggaagccattgaccatgggattggggggtgaggacgtcgttggtaccgaattacttttcgcaatttctgaagtgctcgacaatcccaccgaagacagttgtccctggccattggcgctgccattgttgctgccattgttggtgttttttatactgctgttggctagaatcacactcgatgccgaacttagtattgataatccggcagcattcggtgcagctgcgatgtgtgcgctaaacggactgcttagagtaaccgcagccggcgatggcgccgcagatagtaatggaacaattgaccgttgcacccccgacgacaagccgttcgaaactgaagcagttgccttgctgttgaaaataatcttttgatcgatgtcagatgcaactgttgatgcaattttttcatttccagctgatataccaacgttggggaactgttcaaagataaatacaacaattagatgacacttcaagttggctattgcatatcttaacttacttgcactgacgaaaccgatggcggagcacacaagttgggatagagtggcttgtcgggtgaggttttctgcagcacacccagctctctgttcccaggatcgcccacgctggccgcaggtggtggtggaatcggagcaccagcatgggcatggaccgccttgcccgatgcgctctccgatgcgttcttaatgtttaaagctttacttggatcgctgtccggagatactgtgcccatcgctgccgcaaaaggtactccggcatatgggccattatccctatctccacacgccgcactctttttcttgaggtgtggaagttcggaaaacttgcgagaagacgatcgatccgaacacgaagaagtatttgaaatgttcatgggcgttggggggttgtcaatatcaaatatttgttcagaattctgcaagtaaaagagtatatttcatttaacgagcaattaaaacgagtcgttgtagatttatgcacaaataaaagcccaaattcatacttaaagctaacctttatatttatagcaaaaatcaaatatacccatttataaaagggattctatgcttgttcgcttcaactatttctttggcagtgaaaaagaatgagatagaaataattgggacgccttaagaaatggatgtcgtccttcctggacataagaagagtacttattactgcgcaattagaggcattttcagacattttaatcccatgatttaatcctaattataaataaaatgcagaacatatgtgcgtcccctagttcaattgttgtgcaaccaaagtaaatgatttcaatattatagattagaatagaagcaggacatacctttttatcattgctgacattatcacactgtaagaaaagaatgttagaatgcatattcgttgaaaatgctgccatatacttacgatattatttcctttgctgttgctgctacaattggttgaagcctacattaacagaagattcgttttaacaaaatattttgcgttgaagaaatggattcttacatcgttcaaaagatcactttgctcgttttccttctttatgctaatgctgctgctgctgctgctgctactggccccaaaggattgcgccgaaacattggccagctcctgaatatccagggagcggcaggtcgctgaattcgtcacggtttcaatgttctccaaacccatcgacttctgggcaacgagttaagataactattagtaaataacatcttatcggacagttgaggtggactcacctttgcgacctgtgctgattgcgagcccagtttgcagacacccaggtgattactgtttgcgtttgcatttgcggcggcattaagatcacttgatattagattattgagctggtgcgtgggcagcggttttgttacgtgcaattggtcaatagtgttactcgtggcgggggaattgtgagattttttggtgtcgctgctgctgccagtacaactggcgtgaatcacaccaacgtcaatgtggtcatgactatgcgatacggcgccaccaacgcccagcgatggcaggctgatatccaacatcagtgaatcgttgtcgttctccaaaaatcgagtactaacagtagcactgttgttcacttgcatttttgccgcattgcaaccaccgtccgccgcctgttgttgcttgctcgattggttgttggttgtgtggtttatttggtggctactattgttaatttgattatcatcactaatgttattattacttttactgtttgcgctattgtccgattgcaattggtcttgctgctgcccatattcggatcgccaatgatccctgggctcggcttccgtctccagaacattgcccaccatgttcacagatggcagcaggtagaccacgttggataaactgctgctattgctgttcgcgttggggccattgctgttgatcatgctgttgttgttgttgctgctgttattgttattattgttgctaatgacattgccgccacgatcacgatgaaggcttggctgcgggttctccttcagattgttattgttaacagtcaaagtggacaggctggtgacacgcaacggttgcgattgaccagtatctataacctttgggattttcatttcctctatactgtaggtacaagttagctcgtccagtgcggatagacgcttctccttccgcttctgtcccaatttgatggcaaactgttgtgaagaaagattattacagtaggctgcgtgcacgtatgaaatgaaatggcaacgaaacctacctcaagatcctcgtatgtcttaaactccagtatagcgaatccatcgatgatttcctcctcgagcaccggagatcgtggcagctttcttcgaaccggaggtggtggtcgaggcggtggcttgtcgcgcggcaagagcagtgtggacgaggacgaggtcgagagcagatcctcgtccagcgactcaccctcgctatcgctaggcgtggccatcaatcccgagttgcactcgggggaatgtggtggatttaggagtaacgatgcaatactatctgtgggcggcagcagattgttgctgccattgctgctgctggtgaaatttccatttgaattgttgctatcctcgcccatgctgccagcgctgttgatgtgatagatcatcccattgttgccgggtcctgccgccgatccgttgcccattgcaacagccgaggatccgccaccgacgctactattaggcgtgacgaggccaactccacctccctggccaccgttggccgcactcatggcactgccgacccccacagaggatccggctatgaaggtgccactcagcgagttggcattgcatcgactgtcgcgttccgcttgcaaacgctgggcacgttccctccggcgtttctgctggcgctgttgcttggcattcagactcagatgagtactgctactggaggtggtgctgtggccattggtattcccagcagccaccgctcctgatcccgctccgaagccggactgattaccggctatgctagcagtgcctcccgcactggaattcagctgtggcattattgtggatcccgccgccgtcggaggagacgtcggggatcgcgaatctatgccggctgaggcggagacggccgctgcagctgccacaatcgagagttccgtgtcggagtcaaagtcacaggcactgggagccatcgataccgtcgaaacagatggacaggtgggctccgatatggagacaggtgatgccgggggaatcgctgccacggccatggttttgccgccatccgatgccgacgtcgccgtcgtcgtcgtcgccgccgtcgaggaggtgttcgatacaaacgatggccgagcacgaggcatggagcccagatcggctatattggcacttgcttgaactaaggcggtcgccgtcggcggaggaagatgcagtaccgccagggcgccggtcgaactctttgatatactctggcccactaccgtgagcactgtggactgtggctgtgactgcgattgcgactgggacgactgtgagctggagctggagtgtgaatgtgagtgggagtgcgactcgctcttctcatcctggactgggacagcgggaacggaggatccgatgtcctgcgacgatgatatatgcttgatttgggatcctattccattaatactactgctgcccgacgcagacgtctttgatttagcgctggcatttgatgtgtccatttcttttgctacgtaaagcttccagtggattacacttcagttccttttccttgggaatacaaattatcgatgagcattattatgtatattgctatctggaccaaaccttttccaatgcattcgactattatttttatctatatttctttactttttttttttttttctttggaaggaggggttttctatgccagcgataaggcgagaaagctttacaaatattggatttaaggtgctactacggccgattcaatcgcgtgtattttgaaaaaatcgatgctgcgccgactgtttttacgtgatattgttatttggtggccactgtggggtttttcacattccgaccggttaacatatttgattagagtcactaatttggttaaaaataataattgtacaagttgttttcatttcgtttgctctttttcttgtagtcaacttccctattgcgcttttttctgtacacacacacataatatttaattctgcacacttcttttttacaacaaacacttattgttttttcgggtcagtgggattgcacacaaatcagaacagatgtaaaatataataaaaaaaataaataacataaagccgatatgagaattcaccgaaaatagtccatatttattttgtctagcactttatcattcgtcatatactcttcttcttcttcgtattcctcctctgctgcttcttcgccttcttcttcttgaaatatatgtatgcacatatatgtacgtacatgcatgcgtacatataaattcgtacgagtatacgtatgtatatttatatacaccagttcggttttgcttttgctgttgctttttttcttgctttccttctttctttcggccttttttctctatgcctccgtgttcgtgccgtctataagtctgccgctagcgagtgcacaaaccattcaaccagagtttcacaccgttgcctttgcaaataaaattacgataaaataattttttttttaattaaagagaacattttgaagcagcttcttttttatttttactctttcgcagaactttagttggcttttctcttaaagatttgcagaagcagcgcagaaacagaaacaatagtgtcatctcgctcacacttacacttttctaattgcgacatacgtacatacaaaatacgacaacgacaaatacaaatacgacgacgacgacgacgaatttttgtgaactgtatgcgattgttcgtacatttttacattttccacacacaccgaacgcacaacgaacggccaaaacgatcgattgtgcatcaacgcgttataagcatcgctaccaaactaactgtcatcacggctattatgtatattttacataaaatccaatattattttccgaaaattttgttaaccacaaagaaccaacatagtctctcagagacggaccaaattttcgatagctgcagaaaatcattttcaaggggataacattatgataactatcgaagtagcggccagtctccactggtggccgcgatttcgggcgtttcacaccgataacaagatgcgaaaagttggtttcaaaaaatactgggaacaaatggaataaatcaaaatccattattaggaaaaaaacctgttttttgcttttcttgcagttcaggattcccccacctcccaaataaagatattgaacgtttaagtatttaatttgtatttcaaatatagttacatttaaatttatattgccacgaaaatgactcccataccctccacacattggcctcctccttaaataattttatgatttccgtttgttacatttgtatgaatatacgactataatatatggaacaagatcacatcacaacgtgaattatagtaacaactatagcttttgtcaaggctgcactctaagaataacattcaaaaacgattttatctgttttaaattcttttgaaatgttcacgataaatttaatgccttgatttgtacggttcaaattggggcgtgttctttaaatgttttccaaataggtcttgttctcgattttaaaggagcagaggcagcatcaaaaagagtcggaaatgctatttagttttgttgtgtttctaaccgaaagtaaactattacagccacatccaaaagcaaaacaaaaaacccgattcgctaacagtcggtagaaggagtggcctgatcttgtgcgttatttttgtttgttacattgctttgcaaaatgtgactttccttttcttgtttggtgtcatcagtctcagttttcgacttgggtaggttctttcgctcttgttcatcattgttaacattctcctcgtcctcatcatcgtcatagttggttggttcctcgcccttgcgcaatagcttaccaaccagctcatatttttctaaataacataatgaga

SEQ ID NO: 19385 - DNA, 7544 bp, DROSOPHILA
ttctttgtggttaacaaaattttcggaaaataatattggattttatgtaaaatatacataatagccgtgatgacagttagtttggtagcgatgcttataacgcgttgatgcacaatcgatcgttttggccgttcgttgtgcgttcggtgtgtgtggaaaatgtaaaaatgtacgaacaatcgcatacagttcacaaaaattcgtcgtcgtcgtcgtcgtatttgtatttgtcgttgtcgtattttgtatgtacgtatgtcgcaattagaaaagtgaaaaggaactgaagtgtaatccactggaagctttacgtagcaaaagaaatggacacatcaaatgccagcgctaaatcaaagacgtctgcgtcgggcagcagtagtattaatggaataggatcccaaatcaagcatatatcatcgtcgcaggacatcggatcctccgttcccgctgtcccagtccaggatgagaagagcgagtcgcactcccactcacattcacactccagctccagctcacagtcgtcccagtcgcaatcgcagtcacagccacagtccacagtgctcacggtagtgggccagagtatatcaaagagttcgaccggcgccctggcggtactgcatcttcctccgccgacggcgaccgccttagttcaagcaagtgccaatatagccgatctgggctccatgcctcgtgctcggccatcgtttgtatcgaacacctcctcgacggcggcgacgacgacgacggcgacgtcggcatcggatggcggcaaaaccatggccgtggcagcgattcccccggcatcacctgtctccatatcggagcccacctgtccatctgtttcgacggtatcgatggctcccagtgcctgtgactttgactccgacacggaactctcgattgtggcagctgcagcggccgtctccgcctcagccggcatagattcgcgatccccgacgtctcctccgacggcggcgggatccacaataatgccacagctgaattccagtgcgggaggcactgctagcatagccggtaatcagtccggcttcggagcgggatcaggagcggtggctgctgggaataccaatggccacagcaccacctccagtagcagtactcatctgagtctgaatgccaagcaacagcgccagcagaaacgccggagggaacgtgcccagcgtttgcaagcggaacgcgacagtcgatgcaatgccaactcgctgagtggcaccttcatagccggatcctctgtgggggtcggcagtgccatgagtgcggccaacggtggccagggaggtggagttggcctcgtcacgcctaatagtagcgtcggtggcggatcctcggctgttgcaatgggcaacggatcggcggcaggacccggcaacaatgggatgatctatcacatcaacagcgctggcagcatgggcgaggatagcaacaattcaaatggaaatttcaccagcagcagcaatggcagcaacaatctgctgccgcccacagatagtattgcatcgttactcctaaatccaccacattcccccgagtgcaactcgggattgatggccacgcctagcgatagcgagggtgagtcgctggacgaggatctgctctcgacctcgtcctcgtccacactgctcttgccgcgcgacaagccaccgcctcgaccaccacctccggttcgaagaaagctgccacgatctccggtgctcgaggaggaaatcatcgatggattcgctatactggagtttaagacatacgaggatcttgagtttgccatcaaattgggacagaagcggaaggagaagcgtctatccgcactggacgagctaacttgtacctacagtatagaggaaatgaaaatcccaaaggttatagatactggtcaatcgcaaccgttgcgtgtcaccagcctgtccactttgactgttaacaataacaatctgaaggagaacccgcagccaagccttcatcgtgatcgtggcggcaatgtcattagcaacaataataacaataacagcagcaacaacaacaacagcatgatcaacagcaatggccccaacgcgaacagcaatagcagcagtttatccaacgtggtctacctgctgccatctgtgaacatggtgggcaatgttctggagacggaagccgagcccagggatcattggcgatccgaatatgggcagcagcaagaccaattgcaatcggacaatagcgcaaacagtaaaagtaataataacattagtgatgataatcaaattaacaatagtagccaccaaataaaccacacaaccaacaaccaatcgagcaagcaacaacaggcggcggacggtggttgcaatgcggcaaaaatgcaagtgaacaacagtgctactgttagtactcgatttttggagaacgacaacgattcactgatgttggatatcagcctgccatcgctgggcgttggtggcgccgtatcgcatagtcatgaccacattgacgttggtgtgattcacgccagttgtactggcagcagcagcgacaccaaaaaatctcacaattcccccgccacgagtaacactattgaccaattgcacgtaacaaaaccgctgcccacgcaccagctcaataatctaatatcaagtgatcttaatgccgccgcaaatgcaaacgcaaacagtaatcacctgggtgtctgcaaactgggctcgcaatcagcacaggtcgcaaagaagtcgatgggtttggagaacattgaaaccgtgacgaattcagcgacctgccgctccctggatattcaggagctggccaatgtttcggcgcaatcctttggggccagtagcagcagcagcagcagcagcattagcataaagaaggaaaacgagcaaagtgatcttttgaacgattgtgataatgtcagcaatgataaaaagaattctgaacaaatatttgatattgacaaccccccaacgcccatgaacatttcaaatacttcttcgtgttcggatcgatcgtcttctcgcaagttttccgaacttccacacctcaagaaaaagagtgcggcgtgtggagatagggataatggcccatatgccggagtaccttttgcggcagcgatgggcacagtatctccggacagcgatccaagtaaagctttaaacattaagaacgcatcggagagcgcatcgggcaaggcggtccatgcccatgctggtgctccgattccaccaccacctgcggccagcgtgggcgatcctgggaacagagagctgggtgtgctgcagaaaacctcacccgacaagccactctatcccaacttgtgtgctccgccatcggtttcgtcagtgcaattccccaacgttggtatatcagctggaaatgaaaaaattgcatcaacagttgcatctgacatcgatcaaaagattattttcaacagcaaggcaactgcttcagtttcgaacggcttgtcgtcgggggtgcaacggtcaattgttccattactatctgcggcgccatcgccggctgcggttactctaagcagtccgtttagcgcacacatcgcagctgcaccgaatgctgccggattatcaatactaagttcggcatcgagtgtgattctagccaacagcagtataaaaaacaccaacaatggcagcaacaatggcagcgccaatggccagggacaactgtcttcggtgggattgtcgagcacttcagaaattgcgaaaagtaattcggtaccaacgacgtcctcaccccccaatcccatggtcaatggcttccttagtgtttatccgccgcctgctgctaccattgcaacgtcatccgtaactacaagtgcgttgtcacgcgtctcgcccaacgcagccaataaattagtgccaccggtctccgccacaacatccatctcgataaacacaaactatgttggtatttctggtggaacgacgacaacttccggcatgggaaaggtggtcttcggcgctggcggcaatgccattgtgggcacagggtctccactgctttttcctggcgcaccgcccgctcccatttctcatgtggccactggcgtgccgatgatcatccaggcgccgccataccgagcaccgtacacgaattaccctctctacactccatatagcggccttacgcacgggtcatacctgcctccagtattgccggttgccacgcccaacttgtccaacttaccgcccacacaacaccggagctcggatagtcgcaacagtcgagagtcgccagcatccttgaagtcaacgccatcgaatattggattaaatgtatccatggcgccgaccctgcgatccatcacgccacttaataatagcagtgcaatttctagcggcgcatcgcagcccgttgtgtcggtggtgccttcggcgaactcgactgccctttccatgagcaatccacatatatctcattcccatcatgtgcctgcctacgcttcaggtgcattctcatcctctgcggccgctgggacgagcaccccgaattcaggactctctacactggcggttacctcactatcaacgtcggctgctccccaaccgcactcgcacttcccccagtcaacgcagatgctgccgcagagcggtaacttttcgtcagtgtcccatttgctgaccacgcacccaatgtcatcgcagaatcagccaatggttcgctgcggaagtacactatactcacaatcgtctgcggctgcaactgcgccgccatcagctgctgctgctgtctccaacttcacgccctcggttctcgctgtgcaaagtttgacgacagcggtcacgtcgagctcgtcatctccatcaactttatcatcatctgtgatccagaaggttatttcccccaaaggagagagtccttgcaataaagatcgggattccagctacagctctcctgccaacgcagtggtgacgacatgtgctcccacaacgcccatagtatcgagtggtagtgcccgtccgacgcctccgctctccaactgcacaagcatgggcattggcatggtgaatgcggcatcgacggcgagaagttcttgcaatgccatatcaccgctatccatacctgcgaccgctggtattcacgtgtctgctacaaatccctcttttcagtcgtcgtcatatttcccaacacctttagcgccgccaccatcctccccatcgccagctacttcttccgcggccatcatcagctcctccgcttcgcaattcaatccagctgtgtcgcactcaatgagcagtattgtgacgacggcaggagccactacgaccacggcttcatctgtaacgcagccttcggttgcggctatatcgaacccagttacaaacacgccgcatcccttttctgcagaatcgctttttcagccaagtaaaaatgatcaagctgatttgctgcggcgcgagctagatagccgattcctggatagatctggcttggctgttacccccacaccgccatcatcgacatatttacgaactgatctccagcatcaacagcacgcacatctacatcagcatccgcagttgcttccaccagtatcggccccatcaactcccctatctgctgtgcaaccgagctctggacaaatttttcccccgccactttttaaagatatttctaaaatctcatccgtcgatcctcagttctatcgcactggcatgggattgccgccgggaggctacagtggctacacctcagcgggccttttgcacagtggccttggtggcccgacgccgttcatgcctcccaaccatttaacatcctttgctccaaagaaaactggtcgctggaatgccatgcacgttcgtatcgcgtgggaaatctactaccaccagaataaacaaagcccggagaagcagccaggctttccaacggcgtcatcgaacgcaggatcgatcaatgcaccaatacctcctggcaacatgatcagcggaggaggtggtggtatggccagcggagccagcacgccggtcaacaatgtggcagctattccggcggtcggcggtggcgtcctcgtgtccaatggtccgccctcggtgcttggcatgaagacgactcccactcttggcatgagctcgacgccacagcatattttgcatcgagcgagtgaaatgccgccatcagcagcatttccaggcggtctaccgggtcgcttagcatttgaaacttctcccctggcggcgagtttcattggagcgcctcctagtcatattggaaccgcagtgtctccatttggacgctatgtgactccgtttggattcacagggctaacgcattttggtggccacttggactcgtggagaacaaatgccatgcaacggagtgtcgcttatcatccctcctccgcggcgccgtcccccaactggccggtaaagtcggatcctggtctggacaatgcacgacgcgaggcggaggaacgcgaacgggagctgcgggatcgtgagcaacgggagcgggatcgtcagcgacgcgaacgcgaggagcgggaaaggaaggagaaggaggagaaactgaaacgggagcaacaggaacgggaacgggaacgagaacgggatcgaaaggagcgggaacgcgaacgcagggaaatcgagcggcgggaaatggagcgcgagcgtatgttgcaacagcagcggatcaacgagagcaacaagcaggctgcagtccaagctgcggctgctgcgacggcgcccgttcgtgaccgttcgccacatcgaaacgtgggcgagcttaacacggagattcgtatcaaggaggagcatccgcgcacaaaggaggagcaggacgtaatgcttttgcgagcttcagcggcggcagtcggcgttggtgatccccgctaccattcctcctcgctggccgccgcacaggcgagtgcagctgcggcagcggcacaccatcatcatgccaactttatggcagccagtcgacacggcttgccaccgccaccctcgcacctcacgcgcaccatgatgccgcctactctgagtgtcggtgggcccatcacgcacttcggtgcaccagcgccacccggctggggaatagatccgtatcgcgatccctatcccattcttcgctacaatcccatcatggaggctgccctgcgacacgaggccgaggaaaggcagaaggcgataaatatctatgcagcgcaatctgcagctcatttgcgtagcaaggagccaagtcctattccgccttcggttggctctctaggccctccgccgccacatcatcgcctacagatagtgtccagtgtggcgcaatcgggggtacagcagcccggtccgccaagtcagcagcaacagcagcagatgtccagtggcggcgggatggtaaagaactctggagggccacaggcaccaggaagcattccagtccagcacatgattagcgtcgattcgatgggccagcagtctgttagcgccaagaaggagtcggaccacacaatgggcattgtgtcgaatgctggtgttgggctaagttcagtacctggtggtgtaatcggaatatctccggtgtcatcggtggcgcccagtcgatga

SEQ ID NO: 19386 - protein, 2406 aa, DROSOPHILA
MDTSNASAKSKTSASGSSSINGIGSQIKHISSSQDIGSSVPAVPVQDEKSESHSHSHSHSSSSSQSSQSQSQSQPQSTVLTVVGQSISKSSTGALAVLHLPPPTATALVQASANIADLGSMPRARPSFVSNTSSTAATTTTATSASDGGKTMAVAAIPPASPVSISEPTCPSVSTVSMAPSACDFDSDTELSIVAAAAAVSASAGIDSRSPTSPPTAAGSTIMPQLNSSAGGTASIAGNQSGFGAGSGAVAAGNTNGHSTTSSSSTHLSLNAKQQRQQKRRRERAQRLQAERDSRCNANSLSGTFIAGSSVGVGSAMSAANGGQGGGVGLVTPNSSVGGGSSAVAMGNGSAAGPGNNGMIYHINSAGSMGEDSNNSNGNFTSSSNGSNNLLPPTDSIASLLLNPPHSPECNSGLMATPSDSEGESLDEDLLSTSSSSTLLLPRDKPPPRPPPPVRRKLPRSPVLEEEIIDGFAILEFKTYEDLEFAIKLGQKRKEKRLSALDELTCTYSIEEMKIPKVIDTGQSQPLRVTSLSTLTVNNNNLKENPQPSLHRDRGGNVISNNNNNNSSNNNNSMINSNGPNANSNSSSLSNVVYLLPSVNMVGNVLETEAEPRDHWRSEYGQQQDQLQSDNSANSKSNNNISDDNQINNSSHQINHTTNNQSSKQQQAADGGCNAAKMQVNNSATVSTRFLENDNDSLMLDISLPSLGVGGAVSHSHDHIDVGVIHASCTGSSSDTKKSHNSPATSNTIDQLHVTKPLPTHQLNNLISSDLNAAANANANSNHLGVCKLGSQSAQVAKKSMGLENIETVTNSATCRSLDIQELANVSAQSFGASSSSSSSSISIKKENEQSDLLNDCDNVSNDKKNSEQIFDIDNPPTPMNISNTSSCSDRSSSRKFSELPHLKKKSAACGDRDNGPYAGVPFAAAMGTVSPDSDPSKALNIKNASESASGKAVHAHAGAPIPPPPAASVGDPGNRELGVLQKTSPDKPLYPNLCAPPSVSSVQFPNVGISAGNEKIASTVASDIDQKIIFNSKATASVSNGLSSGVQRSIVPLLSAAPSPAAVTLSSPFSAHIAAAPNAAGLSILSSASSVILANSSIKNTNNGSNNGSANGQGQLSSVGLSSTSEIAKSNSVPTTSSPPNPMVNGFLSVYPPPAATIATSSVTTSALSRVSPNAANKLVPPVSATTSISINTNYVGISGGTTTTSGMGKVVFGAGGNAIVGTGSPLLFPGAPPAPISHVATGVPMIIQAPPYRAPYTNYPLYTPYSGLTHGSYLPPVLPVATPNLSNLPPTQHRSSDSRNSRESPASLKSTPSNIGLNVSMAPTLRSITPLNNSSAISSGASQPVVSVVPSANSTALSMSNPHISHSHHVPAYASGAFSSSAAAGTSTPNSGLSTLAVTSLSTSAAPQPHSHFPQSTQMLPQSGNFSSVSHLLTTHPMSSQNQPMVRCGSTLYSQSSAAATAPPSAAAAVSNFTPSVLAVQSLTTAVTSSSSSPSTLSSSVIQKVISPKGESPCNKDRDSSYSSPANAVVTTCAPTTPIVSSGSARPTPPLSNCTSMGIGMVNAASTARSSCNAISPLSIPATAGIHVSATNPSFQSSSYFPTPLAPPPSSPSPATSSAAIISSSASQFNPAVSHSMSSIVTTAGATTTTASSVTQPSVAAISNPVTNTPHPFSAESLFQPSKNDQADLLRRELDSRFLDRSGLAVTPTPPSSTYLRTDLQHQQHAHLHQHPQLLPPVSAPSTPLSAVQPSSGQIFPPPLFKDISKISSVDPQFYRTGMGLPPGGYSGYTSAGLLHSGLGGPTPFMPPNHLTSFAPKKTGRWNAMHVRIAWEIYYHQNKQSPEKQPGFPTASSNAGSINAPIPPGNMISGGGGGMASGASTPVNNVAAIPAVGGGVLVSNGPPSVLGMKTTPTLGMSSTPQHILHRASEMPPSAAFPGGLPGRLAFETSPLAASFIGAPPSHIGTAVSPFGRYVTPFGFTGLTHFGGHLDSWRTNAMQRSVAYHPSSAAPSPNWPVKSDPGLDNARREAEERERELRDREQRERDRQRREREERERKEKEEKLKREQQERERERERDRKERERERREIERREMERERMLQQQRINESNKQAAVQAAAAATAPVRDRSPHRNVGELNTEIRIKEEHPRTKEEQDVMLLRASAAAVGVGDPRYHSSSLAAAQASAAAAAAHHHHANFMAASRHGLPPPPSHLTRTMMPPTLSVGGPITHFGAPAPPGWGIDPYRDPYPILRYNPIMEAALRHEAEERQKAINIYAAQSAAHLRSKEPSPIPPSVGSLGPPPPHHRLQIVSSVAQSGVQQPGPPSQQQQQQMSSGGGMVKNSGGPQAPGSIPVQHMISVDSMGQQSVSAKKESDHTMGIVSNAGVGLSSVPGGVIGISPVSSVAPSR

SEQ ID NO: 19387 - DNA, 4025 bp, DROSOPHILA
tcttcacctggccattgacgttttccagcgcagatgcagcaacgttactcagagcactcattgcgtgttgctgatccggctggtggtaaagatgactttgccctgagctgccaaactgagacacattcttcatggagccattggacttatcaacctggtattcgttgtagccggagctgttggcggactgtggagatgttaggaagttcggcacatggcggtaggacttgcgcggctggatgtgctggtccaagaacttcattttctccaggtatggacgcgacaggtgttcgtagacaggtggatcgccctgcttccgctgcgacacgtagcgttcgcgtaggtacttccaccgcttcttgcacgtgtccactggaaaggagggcaacatttatatagaggatctgccggaggagcgcgtcttcctcaccatccgtgcgcagcttcatcgcaatcagctgccaggcctcgtccttcgtctcgtacttgccaccattggcgccgccgttgaggtagtacttctgccggttgtagatcactccgtgctgcgctacctcgtcaattagctgctcatccatcattttagtttaattcgtgttttcagctgccaatttgcctttggtgtatgtcaggccatttccaacactgttcatgggacatcgaaacagtgtgaccgaaaatgtagcagcagagtgtcaaatataatttgaagatattgatatcgaaatatattcgacaatttgcatcatgtttaaattcgtcagcattttgatttatatatagtaatgcatttaattaattaacacgcaataaaattaataatttcagcaaaagtaaatcatttgctgttcctgaatttactaaataaaaatgtttaaaaatttaacttataagttaccttcacaaaattctcgaaaaataaaagtcagctataaaatagttgctataaacgtattatggttatttgaaattttaaggtgggttcttttgcgaaccgagattcagtcacactggcaatttggtacccgaagttgaattgccgttttgtgaagcggatagttacctgccgataatcttaaataaaaatgtttaaactggcccgtatgctcctgccgcagcagcggatcctggccagcccgctgcgcctgcaacgcctgatctctaccagcgacgaggtcaacgcagagcccatcatcaagtccatggacaccattggcggcctccccaccgaactggtcaacgaacagaagctgaagaagactagcaggtaatcaatctaccggttttcgcacttgacctttgccttgcctgtttgttttgtttacatttcgaccggtatgggcatgggcatggtatgcatgtatcggaggcctgttttgggcgtgattttcgaaaaggagtttcggggtctttttttcttgatttcaagtgggggagaaagtttgtatcgagccgcttatgcagtcacgtagaccatagatgcgtgcatgtgtgtgtgtatgtatttgtgcctgcctggtggtgtcagttatgggctctattgttcttgacttttgttttgtccacagaaccttatcgacgctccaaaatcactcggttcccattgccgctcgcgtcacggtgtcgaaagatgagagtcgcgactttatggccgtgttcccaggtgagatttgtttatttatgcccagtaacaattatcatgcaaatactaatgctaattatatttcgatgtgcagatcttgtgcgtgacatcaccaccgtgacgaaggcatacaattgcagcgacgcagccaaatggttcgcccaagtcctccagtacaatgtgcccaggggcaagaagaaccgcggcatcctcaccgtgctcacgtataagaatctagtgcccacccaggatcttacgccggagaacataaagctcgcccagtatctgggctggtgtgtggaaatggtaggagttttatgcattaaatagttttcctaatacaaagttatcgatcatcttttcagctccaaagttttttcatcatctcagacgatgtgatggacaacagcaccaccagacgcggccaaccctgctggcacaaggtggagaacgtgggcctgactgccattaacgatgctcttatgattgaaaacgccatgtatgccattctcaagaagcacttcagccacttggactgctatgtcgccctaatggagctcttccacgaaatcacatacatcactacctgcggacaatcgttggaccaactgaactcgaaccgctgtgtctcggaattcacaatggaaaactacaaagcaattgtcgaaaataagactgcctattactccttctaccttccattcgcacttgctttgcacttggctgggtaagtaatggccatacatatataagattccgcttattaatcttccgctctattgtttagctataaagacgcagaggccttccgtcaatcgaagaccattctcctagaaatgggcaactttttccaggttcaagatgatttcctcgactgcttcggtaatccggaagtgactggtaaaattggaaccgacattcaggacaacaagtgctcgtggctggcagtggtggcaatgcagcgagccaatgtcgagcaaaagcaaatcatggtcgattgctatggcaaagaaggtaaaactagcttagcaaacccgcacaattagacattgacttttgaatattaacctgcagaaccagctaaagtggagcgagtgaaagaactgtacaaggaacttggactgccatccacctatgccattttcgaggaggaatcctacaacatgattaaaacgcacatacaacaaacctcacgcggggtgcctcaccagaccttcctgcaaatactcaacaaaatctaccaacgtgactcctaaattactcaagcgcaacgactttacggatacgtttttaattaaattgtagttttagcatttacatggatgaactgttagcaagggctcagcaattacaaccgatatgaactttttactatacatacaatgttctttgcttaatcgtctgtaaaatcaaagggcgcaaaagcctttcggaaatcttccacatacgccacttcttcgtccttatcgagaaggcaatccttccagttcactttttcatcgcagttaagaagattctccgaacagaacacgtccctgaaaaaatgagtttagtcaagagttggtagcttaaatcgagaagttaacgcaccttgcgaaatgaatgggaaagtgtttcatttgccgcgttataagtgtgctatcgtcgggtaactcggccaggaaataaggtcccatttcaggcagcattttctcagaatccaatgcgggaagtgtctcaaattccagattaaattcctccgccttatcctgcaatgttgtgggatatacatcatatgttataaaaggttgaatgtcgtgagcatacctcaaaactatgttttatcttccaggcatagccttcttcaaaggcaagcgcgttgatttgtaggtgaaccgatttatagtgccgttcagtaaaacacaccacttggcctaacgttttgaagaactttcgcaaagctgccttgaacttgttgagctccttccaatcatctggacttagttgagcagcgcagggcacatgcttggtggacaatatcatgacatggtgtttgttaatcggtcctttggccagagcaagataaaaatgttcgcccacagtgataatgagatgcttctccacatcaggtgaggataaacagaaccagcatttatctacaaatataggaatagtattaaggatgcagcttgtaaaattaagtactagacaaaccttgctcaatctgcggtattctaggacgtttatctcttttgttattatcaccgccttgtcgcttgcgtctgccaccatccatgtcgtagaagtattgtcggttttctgactgaaagaatatataattagtcacttggagtacttatagatatgtaaaggttacccaccgaatcattcttgccaatagctc

SEQ ID NO: 19388 - DNA, 1472 bp, DROSOPHILA
ttcagtcacactggcaatttggtacccgaagttgaattgccgttttgtgaagcggatagttacctgccgataatcttaaataaaaatgtttaaactggcccgtatgctcctgccgcagcagcggatcctggccagcccgctgcgcctgcaacgcctgatctctaccagcgacgaggtcaacgcagagcccatcatcaagtccatggacaccattggcggcctccccaccgaactggtcaacgaacagaagctgaagaagactagcagaaccttatcgacgctccaaaatcactcggttcccattgccgctcgcgtcacggtgtcgaaagatgagagtcgcgactttatggccgtgttcccagatcttgtgcgtgacatcaccaccgtgacgaaggcatacaattgcagcgacgcagccaaatggttcgcccaagtcctccagtacaatgtgcccaggggcaagaagaaccgcggcatcctcaccgtgctcacgtataagaatctagtgcccacccaggatcttacgccggagaacataaagctcgcccagtatctgggctggtgtgtggaaatgctccaaagttttttcatcatctcagacgatgtgatggacaacagcaccaccagacgcggccaaccctgctggcacaaggtggagaacgtgggcctgactgccattaacgatgctcttatgattgaaaacgccatgtatgccattctcaagaagcacttcagccacttggactgctatgtcgccctaatggagctcttccacgaaatcacatacatcactacctgcggacaatcgttggaccaactgaactcgaaccgctgtgtctcggaattcacaatggaaaactacaaagcaattgtcgaaaataagactgcctattactccttctaccttccattcgcacttgctttgcacttggctggctataaagacgcagaggccttccgtcaatcgaagaccattctcctagaaatgggcaactttttccaggttcaagatgatttcctcgactgcttcggtaatccggaagtgactggtaaaattggaaccgacattcaggacaacaagtgctcgtggctggcagtggtggcaatgcagcgagccaatgtcgagcaaaagcaaatcatggtcgattgctatggcaaagaagaaccagctaaagtggagcgagtgaaagaactgtacaaggaacttggactgccatccacctatgccattttcgaggaggaatcctacaacatgattaaaacgcacatacaacaaacctcacgcggggtgcctcaccagaccttcctgcaaatactcaacaaaatctaccaacgtgactcctaaattactcaagcgcaacgactttacggatacgtttttaattaaattgtagttttagcatttacatggatgaactgttagcaagggctcagcaattacaaccgatatgaactttttactatacatacaa

SEQ ID NO: 19389 - protein, 419 aa, DROSOPHILA
MFKLARMLLPQQRILASPLRLQRLISTSDEVNAEPIIKSMDTIGGLPTELVNEQKLKKTSRTLSTLQNHSVPIAARVTVSKDESRDFMAVFPDLVRDITTVTKAYNCSDAAKWFAQVLQYNVPRGKKNRGILTVLTYKNLVPTQDLTPENIKLAQYLGWCVEMLQSFFIISDDVMDNSTTRRGQPCWHKVENVGLTAINDALMIENAMYAILKKHFSHLDCYVALMELFHEITYITTCGQSLDQLNSNRCVSEFTMENYKAIVENKTAYYSFYLPFALALHLAGYKDAEAFRQSKTILLEMGNFFQVQDDFLDCFGNPEVTGKIGTDIQDNKCSWLAVVAMQRANVEQKQIMVDCYGKEEPAKVERVKELYKELGLPSTYAIFEEESYNMIKTHIQQTSRGVPHQTFLQILNKIYQRDS

SEQ ID NO: 19390 - DNA, 5626 bp, DROSOPHILA
ggtgttgtgttatatatatatatatataggtatggatatatattaggcataattcattttcattagcaattaaacatcatctggttgggctcccagcgagcgtccaatggaatttaaatagatatagaaatagcattaggtattatattacgtatacgtacagctaaaccgcactatgccaaccgtgtgcgtgtgtttctctctatatgtatatatatcatatatctgcgtatatgttaggcatatataggtgtgtgtgtatatatttataatgtattattcaatgcatgcgtggcactttagcacagctaaaattgacgaaaaaaaaacgctctcttctgactcccggatctctgcgactactatatcttataactaggattggtgagggctatacttcaaataaatatttacaaagcaggtggcgcaggaggaggcggacttcttgggcgtgcgttcgaataaccttctccactttaaatgatcctctatggaagtactactcgtatcggctagtacactcaatgaaatagtacgcaataaaaaaaaaaaaagaatttataaaatacattataaaatgggcggcgtgggtggtaggtagaggggtatcttaggtggtgagcgtgcgtgaaagaggataatatctagctatagatagatataattgtagatgagctgctgtttctccactactgagacgacaccgccggcgcccgtttgcttttggccacatgtggcaaggcaacaacgggcttgttgttgctggtggagctggtggtagtggtggtagtggtgctagtggtggttccaaatggcgaacaggcgtcactgctgctgccaccagactgctccacattcgtgcccatcgacgagttaataaaattgatgtactgatgcaacttgagggcggctatcagggagctcagatagtcgttgatgttgcccttctggacctgcttgatctgtcgggagacatttcgatagacgcgacgcgagatcttattggatagccgtccaactgtctgtactgtgtgtaggactggatcctcgctggcgggaactggcactacaagtaaattgagcaaaggcaatcaccattaacgagggaagcaagcaattgtaatttgagtatttgttacgggttataaacaagtcattgattgattagtaactttggcgctgtgtgggcttgtgtgtgcttaccataaacttgttgagttccctatcgataatgcctacgatctctggatttcttctaacgtactcaacaatttcggttatgattttcagggacatggacagaaataccgtcgaggcggccactaagaatctatcatcaatctcttgatcgtgatcccggtcgtagctctccccaacaataataactaacaaatggcacagagaaagagagatagagagagagagagatattaatttagaaaataagtgtcactttttggtgggggttgggtggttaattaatgttaggggcggggaaaggaccaggatcaggatctgggtttcggaaatcccaaggctagccaacatttatcgctcgactcgaaatcgtaaatatttctgtatattatattcccattttgttctcgttttgtgtgtgaaattatcgccatgcttgattagtgttcatgcttttttatttacttgctatttttatgcttattagacggtgtgttagtggtagacaaagaaacaaacgatcgaacgaacaaaagatcggatcggggatcgggaacttactgtcattttcagaactcttgccattctgcacgacggcattttgtttatcatctgagaattaaaaatatttacgatttatatttagaattttgtttacacaccgcgcaaaaaaaagtgagggcagcagaaggcaaacaagctaattttaaatttttgtgccaacagatgaaaaatggtacggagccaataaataatgttctccaccatcatccagagttcttaaataaaactgaattctaaacttattcgctctgaagacagtatttttaatttttagaaagaagtgtcaaagagaatatatataaaaattataatggaagtacgacaggacaagactattaattcaagtgaagtcaaaatgatcttatgaatttgatattaaataaattaaaaaagtagttttaaacgtaatgaaatgtacaacaagatttcaattaagttgcatcaactaacttatattatattaaattttacgtcatggcaattgagagattccaagtgaaaccactgttctacggctccaatgaacaaatatataaacaaaagtaccctaacattgtgacctacttttttgtaactctaccgtcaacactcaccattatcttcctcgacatccgactcgcacttggggaagtagtattcaaggaggcgctcggccagcgccgtggtggtgtccactccgttgacagccagactgccgtactgggtggccagcacctcgttggccttctgccaggcgagatccttcagcgaggcggccttctgctgaccagctgccttgaacttgacgacgcgctccagatggggctgcaccacatcgatcaccttgctcttggcctggttgtagatctcctggggtgtgtccttgatgatcggcgcctttacctcaagcttatcgatgcccttgaccagggtctggtccacataggcgatgggtcggtccagtttggtgacgaagggagccgccgttgtcaccgcgcgcgtcacacaatcctcggccgccgttaaagcccattcgaagacacgatttttgcctgaaaatatgagtagttcacattacgatgaaaaatacggattggaaattatatgtcttagtataagtttaatttaaaagttaacagcctgtttaatttagagatctagaacttctagaatttctagaattgtgtagtaataccccacacatgtgacacaagtacgaagagcgcgcttatcagttgcaaccgtaataataataacaataacaataataatagtaataataaatatgtagcatttctggctgataagcaactgcgcagttcacgaaccccagggccccttggacccctacattctatctgtctggggcccgccagtttagactttgatagttcgtcactcgtcaaacacatcatccattccaattccagtcccagcaactgcagcaacaacaactgcgaaatatcacaaacaagtcgaaagtccaactagaatttttgttgtcgttgctgctgacggtgagaccccaagagccccttagcataagtgctgcccgctttagttagtttccagccaaatctagctttattcgacagcggtaattggtattgtctagtaaatgcattaagtatttgttttttcagggatctgtgcttttacgatcggcaaacttaggctgggatcaatattgagaagaaaactagtaacattattttagctataattaaagtgcaagtttagcttaacttttggtcagatcgagcagcactgccagtgccagtggcgttgccattgggtctgctttgcttttcctcttgtcaaaacgagcccccttttgttgacggcgcctctgcggctgcagcctacgtgcggtggcctttttgccgtcagccaccgctctctctctcctcactctatctctcttgcgctctctattgcgttggccaagattgttttattattatgtaaattttaagcgaactttgaacgcaacgcgtcacgagggcaaagtgccggcctttttgcttttcttattgctaggtcatggttgttgttgctgtgatttcgattattgaacgaccggcaatcaatttatatcaattgagcttaatttctggccaattaaacgaaaaaaaagttgaacaaaaaaaagttgtttctgccctctatgtgcgtttcgagttcgaattgcaactcgaaataaaatggcgaagcaaagtcaaaaaagcaacggtttcggtttcgattacggcttcgagtgcatatggtcgctgcaattgttgttgctatttacctcctccttcaccggtcgtttattctctatatgtgccgttaggcgcgccaaagtaacgggacttgagcgagttcaatgcacccggaggaggtcttattttcattttcttctgttttcctttgctgcacttaccttttactttgccatagacatcctgggacttgtcccatgccgcatttaccacgggcaatttgatgatcctctcgagggactcaaggtgcggcagaaggtccttggcatccttgggctggtccacatcgttcatcgccgttccattgccagttgttccgttcccggtggcgtgtttctgctctgcactggccatgatcagttttctttggttcctcttgcgctgctttctgctgcccttttcactttttctttctgtctttcgctatcaagctcttccgcttgccaccgcacttttcttttcgcctcttgcttcttttctttcacgaacaaaaaaacagcttaacctgcgagtgagtgtgtgaatgtagggtatgcgtgtgtctgcgttctggaagcactctgttttattttattcctagcactttttggcacgtctgctcacgtctgctcgttgggactctctgactgatttgcgagctgcgcggctggtttattatatgagcgagtgccgccgccagtgttgccagcgccgagcaacaaaaagctatgagcaacagtgatgccgcaggtggcaagaagtggatgaggaaattttagtcaaatagctaaaaagtacagtttttaccaatagagcttactttttgttcaaaccgcagtgtgttttttccaagatttatgcctagtcaagggtcatgtggctataatacactttgtattattaaaatttaaccatgagctttgacaagcacgattactacaaaatataattataatattaaaatcttcgaacttgtgtacttaaccatacacaaatttgtttatcaaaaatgttgagtaataaataataataatgtaataaaatatcgcagacagtgaaaaaacagtgctaaacaaataaaaaggttaaaataaccaaataatataaatgagcttaggaacatttctttgcaacatatatcttgaaaatagctagatcgtttgctgctgtaagatagcttcgctgcgaagagagcagagcgccaaagcagtatcagcgagagtttgagattaggactctctttgaggaccccatatacagtttgtcaagaaactgtttacatactgtgaaataagttgaatttttgactttaaagctaaaattaaaggttttttgcttaattaaacgcaattttttttataaaatttaattaaacaatatttattttacttataaatcaaaaaacaaatattaaaatattaaatatacaagaaaataaacaacataatccaagtttacacacctttgagactgtcaagaaactctttacacattttgttttcctactttgttttgttctttttcttagaacgaactcgatttttccggttatttttggctttgcattgctttttacaacggcttctaatgaaatttgtttgactttgcttgaagcgaattattattttatatttaattaaatt

SEQ ID NO: 19391 - DNA, 1554 bp, DROSOPHILA
agagtcccaacgagcagacgtgagcagacgtgccaaaaagtgctaggaataaaataaaacagagtgcttccagaacgcagacacacgcataccctacattcacacactcactcgcaggttaagctgtttttttgttcgtgaaagaaaagaagcaagaggcgaaaagaaaagtgcggtggcaagcggaagagcttgatagcgaaagacagaaagaaaaagtgaaaagggcagcagaaagcagcgcaagaggaaccaaagaaaactgatcatggccagtgcagagcagaaacacgccaccgggaacggaacaactggcaatggaacggcgatgaacgatgtggaccagcccaaggatgccaaggaccttctgccgcaccttgagtccctcgagaggatcatcaaattgcccgtggtaaatgcggcatgggacaagtcccaggatgtctatggcaaagtaaaaggcaaaaatcgtgtcttcgaatgggctttaacggcggccgaggattgtgtgacgcgcgcggtgacaacggcggctcccttcgtcaccaaactggaccgacccatcgcctatgtggaccagaccctggtcaagggcatcgataagcttgaggtaaaggcgccgatcatcaaggacacaccccaggagatctacaaccaggccaagagcaaggtgatcgatgtggtgcagccccatctggagcgcgtcgtcaagttcaaggcagctggtcagcagaaggccgcctcgctgaaggatctcgcctggcagaaggccaacgaggtgctggccacccagtacggcagtctggctgtcaacggagtggacaccaccacggcgctggccgagcgcctccttgaatactacttccccaagtgcgagtcggatgtcgaggaagataatgatgataaacaaaatgccgtcgtgcagaatggcaagagttctgaaaatgacatgccagttcccgccagcgaggatccagtcctacacacagtacagacagttggacggctatccaataagatctcgcgtcgcgtctatcgaaatgtctcccgacagatcaagcaggtccagaagggcaacatcaacgactatctgagctccctgatagccgccctcaagttgcatcagtacatcaattttattaactcgtcgatgggcacgaatgtggagcagtctggtggcagcagcagtgacgcctgttcgccatttggaaccaccactagcaccactaccaccactaccaccagctccaccagcaacaacaagcccgttgttgccttgccacatgtggccaaaagcaaacgggcgccggcggtgtcgtctcagtagtggagaaacagcagctcatctacaattatatctatctatagctagatattatcctctttcacgcacgctcaccacctaagatacccctctacctaccacccacgccgcccattttataatgtattttataaattctttttttttttttattgcgtactatttcattgagtgtactagccgatacgagtagtacttccatagaggatcatttaaagtggagaaggtta

SEQ ID NO: 19392 - protein, 352 aa, DROSOPHILA
MASAEQKHATGNGTTGNGTAMNDVDQPKDAKDLLPHLESLERIIKLPVVNAAWDKSQDVYGKVKGKNRVFEWALTAAEDCVTRAVTTAAPFVTKLDRPIAYVDQTLVKGIDKLEVKAPIIKDTPQEIYNQAKSKVIDVVQPHLERVVKFKAAGQQKAASLKDLAWQKANEVLATQYGSLAVNGVDTTTALAERLLEYYFPKCESDVEEDNDDKQNAVVQNGKSSENDMPVPASEDPVLHTVQTVGRLSNKISRRVYRNVSRQIKQVQKGNINDYLSSLIAALKLHQYINFINSSMGTNVEQSGGSSSDACSPFGTTTSTTTTTTTSSTSNNKPVVALPHVAKSKRAPAVSSQ

SEQ ID NO: 19393 - DNA, 7568 bp, DROSOPHILA
attttgatcctagctcgtattataaaaatgacaaatcatttccctaataataaacattttaaaatgaaatcaatgccatttggattacaataaatttcaaaagtgccaaaacattttctcccaaatcaaaatctagcctactttgccaataaattgtacccattaatgcctttggagaatccacactttcacactaaatgacctttcctcgttttcacattcgttacaaatttgcggaacctaagtttacacgtgaaaatttatcaaaattaaattaattaggtttaactttgagaagacctgcaattggatacgttatcctcattttcactttcgtcagcaatcagcgggcttgaattaaagactttagacttcggtataagttaacaattaataaatctaaatatatatatttaatactatatatatttatatcgattttgtagaattcgttaaacaagtgatagagaaattgcaggcttacaaaataataataaataattaaaatacacctgatgcacttaaagtttgcttcgtagtaggaaaagcatataaatgtaagtaagtatgtaaatatgtaacataagtaagcatgcgaatgtacatataacgtataagtgtttgtaagcgctaaacaatgattaactgtgcttatcgcagccaacttcaagtaggaaatgtaaaaacaaatgcttaaaaatgttaatgttaagtaacggattgtgaatgtaaagttgaaaaagacaacggttggttttacagaaaattaataaagacattgtgtaaagcctatttttactgtcacagctttcaaatgttttgtgttaaaattaaaattgaattaatttaaaatgatcaacattatgtatttgacttgtaaacatcatcaagatgtaaagaccttccgcaaactggtgtcgaaagtgaaatgaggagagatctgcccgcccgggaaacacacgcttgacacacgaaggaggacaccccttgggtgaatcccctagtgctggaggatgcgcgacttctgggcgagcacggcctccgactggtggagtcggcgcttgctgctgtagttgcacagcttgccggcgaccttgctgagggtggtggccgtggaggaggtgatcaggtccagggcctgcagccggttgtccagttcgtcgagcgccgacagcgaggcgctcgtcgtcgtggcggtcagcagggtggacagattgctgccggcggaatcgccggcggcatccgcatccggatgcgcatcggtggcgggcccgatgtcgatgtcgctgagctgattggccagcggatcctcgtcataaggatcgtaggggggtcttaattattgcttgaacacgaacagacccgtggggtcccactcgttgtcgtcgacggggccgaagcactcatcgaagtaccactccatcgtcttgtagacgtggctcagcgacctggcgatggcgtgatcctcgtccggatacacctggtgtcggaatttcacctgctgctccacgagcgcccgcaccagcatcagcgtgtgctcctggtggaccagcgtgtccgccgtgccgtgcattagcatcaggttgcggcccttgatgttgcccgccttcatcgtgagatccgcctcctggagggcacgcaaatagtcgcccttcagcgggatgtaacgctccgtgaagaaggaatctgcagaaagggatgcacataagttgggttgcaataaatggtctctacatctaagtgccactcacagtggaatccaaagttgacaatgggattgattgccaccgcgcactgcagcacctgttgcgagtcgtcgatgagcatcatggaggaggcgtagccaccgtagccccagccaaaagcgcaaatcctcagcggatcgatgaacttcaggttgtcccgcaggtacctataaagtgatatatattagatgcttatatatactatgttcatggggattcccttacgttaggactcctagttgatcctccacctcgacggtgcctagtttaccgtgcacctgggtgcggagcaattcaccctggaagccactgccacgcccgtcgatctgggccacaataaaactcctctggctggccaaataccagttccagtccacgtggaagcgctctgttaccaactgtgatcccggcgaggcatcgctgggttttttttcaaagagaaatcattatttttaagaaatgtttcaaatcaaattgtcaaagccttaaaatgttaaatacaacgaacttttgactacactagctgaagaaagaatagtaacttacacgtggagcaccagtggaaaggccacgtcttcctcctctcgcattccgggtggcaggaagagccgcacctgggcgtggaatccgtgacggatctcgacgctgaaggtgcgtgattgcggaatggcgagttgggagagtcggtggcgcaggacatcgccggcatttagcacataaatcttgtcattgctggccgtttccaccaggtagacactgggtgcctccggacccaggcactcctgtacgtagtagctgtagtcctggctgaactgcacccgattgaacaggcaattcttgggtatatcgtagaggcaatcgtctggctccaggcgagccacaatatcctcccaccgatcgccccgctgcgagattctggcccggtggagccggtacgtggactccgtgttgtcgcaggtaagacaagtgggcgatgtggaggtgatatacgtccgattcgattcggtgacattgagcttcaggctaatcttgtacaaatgccgttcgccaggtctcttctccggcgcagccatgaagtagacgatctcatgcggctcatcccaaccgacgatctcggtgacctcgaaccgacccatggtcagcggcacgggtcgtcggtccagcgaggatatgaagaccacgtggcggtagtgaccgtgttcgccatctcgaactggcaaacgcttcagcagatagccaccattgctgatctcatgcgtcgtgtgcgtttggccatccgtcacattcacattctgactctccgcttggatttcctccgcattctggaccatctttcccagccgattgtggccctggttgcggaccgagaagatgggccgttccgatggcagaacccagccatcgttgatggttacctccgtgtgcaccgcctggcaatggaagtgtggagctctgcacagcaccgtggtggccttggtctgttcgcgattggtcaccgtcaccgaaaggtcagtggatgaggcccatgtcaagccgcccacgtagctaccattggagagctcactcggcagcttgatctgcgtgggaaagatgtacttgatcaccgagagattcaccacgttgaccgtgacattcggattgcgggaacccgtcttggggtagcgttggctcatcaccgccgggtatttgatatcatcgcccatccaagtatatctgcggaaattacaaaaggaaaattgcaattattgccgatacctaatgtacttaataatatgcttttgccatgaaatgcatctttaaatgcatacaagtgtgagaaatgccaatggacttccactcacttatactcgttgacctcgctgtcattgtagctgaggaaggccaaaaagagtccgtccggcgagaactccatgctgctccggcggctctccagctccggcacattctcatacatccaatcgggcaccccattgaacaccacacctgtggattcgccttccagcgaacccgatcccgtctgtgttatccggcacacaagttcgccctgcaccttgggcttgtagtagatgtcgttgtggtggacaaaggcgatggcttggtttaaattgtaaccaccggccttgccattcggatttggtgcggaggagccggaggctccggcggatgctggtccattggcagcgccagccaggctgtttaggattatgctgccactgggcaaaggggccattgtcgtggtgctagcgccgctggcaccacttgcgccactggcaccactgggtggtggtgctccaagcggtggcggcggattcgctggcgcccacaccacgtgctggaggcgtggcgcctccgctatgttctccgttgggcccaacggaaatgtgttcgccgtctgcacctcgtatacgtgatgtctgttcggaaaaaagatggaatatatgcaaataatctatttcaaactttgtattgttaattgttaagaattaagcagctacaatataaattatattcacattgtaggaagcagcggaaattaaatatttaaataaatacaaataatatgaattctcgattaatgtctatgagataacccacctggagccctcggcatttgagtccgactgcagtagtacgtatttctggtcaggtgcgactagaaatgattccgcattcagttggcgctgaaatatgtgattgcattcatagccaatcattgttagttgatttttttaggaacttacgaatgttgaattggtcattaggatgcgtgtggtaagatcggccatattgagaatggagaggccgcccgttgggtcgcgataaatgagctcacgacctacaaaaagaacttggactcactaagaaggacttgcaacatgtatcgcaggactcaccattgctccaggtgccgttgaagggcttccactggaggcttctgcccagaatgtcgctgggcagcatccggcgaccccggatccgtagaccctcatcctccggcgacagcaggaagatcgagaatatgatcaggctaaaaacggcagcgatgaccagcagggcgatgaagatgccacgccagttgcggcgttccggggaaatggccaccagttcctggaaaattgcaaagtgtaatccggttttagtatagattttaacaaaataggtcagtataaagcgctgttatgtaatatatcagaaagtcaatactagcaatgggttttttttttcataatgacttgcaaatacttgctgttcactcctttttcgcattcaatatttcccaatttccccttaattggttaattgcatgcgactgcgccttgttttcgatttaattaaactaatggcataagaacgaaggttagtcataggaatagtttgggaatttatcaaattatatatcttaattctgtgtattgaatttacccactccctaatgaattatttttatctaacttccacacccttttcccacaagtgaccatgcgaaagtgctaaactattttaatgcattttgcatgtgtggttagaagtggcacgcccacataacaccccgcctcccatcaattttcatttagccaggactcggatttcttatcgcaggactcggagctgttcacttggagatggttttatttctggtttcggttttggtttcggttgctgtacccattcattttcattttgattttgattttcatttagattttcattttccctttcgtcgtcgcattttgcaaattcgattccagccgtcgtccccgaagtggcttacactcgcaatcaatggcactgcttgtgcagaaattgaattaaaaattgatatgcacttggctgtgggagtgtggaaatggaaaatgctggctgtatggtaaatggcgaatggcaagtggtaaatgaaagcagtaaaggggatttcccggctggcatgtgagggcaaaagtgctaattgaaattagttgctcgggctgctgactgccaacaaattcggttgccaaggagaaagtttgcccaagtcgagagatcgctgcactttcatggcctcgtgcattcgctttatttttgtgggctgttaaatccactttatgtcctgggaaattccagtctgtgctgttctctcctcatgatgagcgccatcaaaaagtttcgagctgcgtgatttctgtacagttgtacagttttaataggaggtcataaaatcacccaacttaactatattttccttgtttcccaactttacgacattattttttttgggaaaatatataaaatgttgaaatttaatgttcatttcgtatgcataaatcaaaggttttaataattaaattatttattatatctacagagacaatgtgcaaccagcttttttgtttcctgacctatttaattaaatattaaatagctggtgagttaataaaccacattatagctaattttattgcatacccaccggcaagtaaagaacacattgcaattaatcaagctctttggcaaatataaagccaattttcaattaattgaagttgccgtaggctaaatttaaatttacatgtgtacaagtttatccggaagcacgaacagttcaaatgtgacataaactggcaaattaattacggaaacagtcggaacaggatgcggaaagagaaaactcgggaaaaacaacagccaaaagtttccgaacggagcgggaaccacaccaaattatggccacaaaaagggagagacaatagcaaattgtctggcatttgatggtggccaattgtccttcgtcctgcggcccattttattgccactgccatgtggtcgggtcgttgatgttccttcattagctattaatgcgagcctggccgtaaaaaggtgtgacaattgtcggtgccaacaataggtgtggaccgaaaatgaaaggacctcttaatggcactcgactggcgggatacgtggccatcagtgttttaagtgtgaattcaacctattgaagtgcaacggtagctttttggtgtggagcatcataagaaaaaataggaagaaagttgagagctaaaataaaatttctttggatctgtttcatatagcccttcaagctggattgtgaaattggaaatattcgcctttaacagacattttaataccaattctgaatgcaaagtgttattagcctgcctgcattcacttccaattaaaccaatatttttggcttatcctagggtcgtgctaatataccctagtctacgatccacggggcgtatacgtggccaacagtacgcataatttatgtgcaaatgactgaagttgttgtcggcattattgttgcttttgcttttgatttgctcttggtcttggtcttggtcttgctcttcctggcccattgtcgtcacatcgactctttgttgttggtccttgggcaggacgccaaatgcaggcgctttgtgaacgcgttcacagctcattaaatgcccattggaggaaagtgcgggactgggaccgcctcatccgctgtattatcgattcaagagctgcatttgcatttcgtattccggatgtaggatgtcggattccgtttccctgtccccggattcgagttgcggctttgcgtactttaccgtaattttctgtgattacatctcgactggtttttcgattgttcgatggccgaccagcgaatgcaccgagaaaatgcattgtgtgaggctcttaaatatatttcttacattaaatagtcacgtttttgaggcaacgaattaattgtatttcgccttgggcgtcttttgatgcgacttgaactatcagtcgcccaactgccttaaaggattttttttttgcctttgt

SEQ ID NO: 19394 - DNA, 3147 bp, DROSOPHILA
atgaaggaacatcaacgacccgaccacatggcagaactggtggccatttccccggaacgccgcaactggcgtggcatcttcatcgccctgctggtcatcgctgccgtttttagcctgatcatattctcgatcttcctgctgtcgccggaggatgagggtctacggatccggggtcgccggatgctgcccagcgacattctgggcagaagcctccagtggaagcccttcaacggcacctggagcaatggtcgtgagctcatttatcgcgacccaacgggcggcctctccattctcaatatggccgatcttaccacacgcatcctaatgaccaattcaacattccgccaactgaatgcggaatcatttctagtcgcacctgaccagaaatacgtactactgcagtcggactcaaatgccgagggctccagacatcacgtatacgaggtgcagacggcgaacacatttccgttgggcccaacggagaacatagcggaggcgccacgcctccagcacgtggtgtgggcgccagcgaatccgccgccaccgcttggagcaccaccacccagtggtgccagtggcgcaagtggtgccagcggcgctagcaccacgacaatggcccctttgcccagtggcagcataatcctaaacagcctggctggcgctgccaatggaccagcatccgccggagcctccggctcctccgcaccaaatccgaatggcaaggccggtggttacaatttaaaccaagccatcgcctttgtccaccacaacgacatctactacaagcccaaggtgcagggcgaacttgtgtgccggataacacagacgggatcgggttcgctggaaggcgaatccacaggtgtggtgttcaatggggtgcccgattggatgtatgagaatgtgccggagctggagagccgccggagcagcatggagttctcgccggacggactctttttggccttcctcagctacaatgacagcgaggtcaacgagtataaatatacttggatgggcgatgatatcaaatacccggcggtgatgagccaacgctaccccaagacgggttcccgcaatccgaatgtcacggtcaacgtggtgaatctctcggtgatcaagtacatctttcccacgcagatcaagctgccgagtgagctctccaatggtagctacgtgggcggcttgacatgggcctcatccactgacctttcggtgacggtgaccaatcgcgaacagaccaaggccaccacggtgctgtgcagagctccacacttccattgccaggcggtgcacacggaggtaaccatcaacgatggctgggttctgccatcggaacggcccatcttctcggtccgcaaccagggccacaatcggctgggaaagatggtccagaatgcggaggaaatccaagcggagagtcagaatgtgaatgtgacggatggccaaacgcacacgacgcatgagatcagcaatggtggctatctgctgaagcgtttgccagttcgagatggcgaacacggtcactaccgccacgtggtcttcatatcctcgctggaccgacgacccgtgccgctgaccatgggtcggttcgaggtcaccgagatcgtcggttgggatgagccgcatgagatcgtctacttcatggctgcgccggagaagagacctggcgaacggcatttgtacaagattagcctgaagctcaatgtcaccgaatcgaatcggacgtatatcacctccacatcgcccacttgtcttacctgcgacaacacggagtccacgtaccggctccaccgggccagaatctcgcagcggggcgatcggtgggaggatattgtggctcgcctggagccagacgattgcctctacgatatacccaagaattgcctgttcaatcgggtgcagttcagccaggactacagctactacgtacaggagtgcctgggtccggaggcacccagtgtctacctggtggaaacggccagcaatgacaagatttatgtgctaaatgccggcgatgtcctgcgccaccgactctcccaactcgccattccgcaatcacgcaccttcagcgtcgagatccgtcacggattccacgcccaggtgcggctcttcctgccacccggaatgcgagaggaggaagacgtggcctttccactggtgctccacgtcgatgcctcgccgggatcacagttggtaacagagcgcttccacgtggactggaactggtatttggccagccagaggagttttattgtggcccagatcgacgggcgtggcagtggcttccagggtgaattgctccgcacccaggtgcacggtaaactaggcaccgtcgaggtggaggatcaactaggagtcctaacgtacctgcgggacaacctgaagttcatcgatccgctgaggatttgcgcttttggctggggctacggtggctacgcctcctccatgatgctcatcgacgactcgcaacaggtgctgcagtgcgcggtggcaatcaatcccattgtcaactttggattccactattccttcttcacggagcgttacatcccgctgaagggcgactatttgcgtgccctccaggaggcggatctcacgatgaaggcgggcaacatcaagggccgcaacctgatgctaatgcacggcacggcggacacgctggtccaccaggagcacacgctgatgctggtgcgggcgctcgtggagcagcaggtgaaattccgacaccaggtgtatccggacgaggatcacgccatcgccaggtcgctgagccacgtctacaagacgatggagtggtacttcgatgagtgcttcggccccgtcgacgacaacgagtgggaccccacgggtctgttcctcagcgacatcgacatcgggcccgccaccgatgcgcatccggatgcggatgccgccggcgattccgccggcagcaatctgtccaccctgctgaccgccacgacgacgagcgcctcgctgtcggcgctcgacgaactggacaaccggctgcaggccctggacctgatcacctcctccacggccaccaccctcagcaaggtcgccggcaagctgtgcaactacagcagcaagcgccgactccaccagtcggaggccgtgctcgcccagaagtcgcgcatcctccagcactag

SEQ ID NO: 19395 - protein, 1048 aa, DROSOPHILA
MKEHQRPDHMAELVAISPERRNWRGIFIALLVIAAVFSLIIFSIFLLSPEDEGLRIRGRRMLPSDILGRSLQWKPFNGTWSNGRELIYRDPTGGLSILNMADLTTRILMTNSTFRQLNAESFLVAPDQKYVLLQSDSNAEGSRHHVYEVQTANTFPLGPTENIAEAPRLQHVVWAPANPPPPLGAPPPSGASGASGASGASTTTMAPLPSGSIILNSLAGAANGPASAGASGSSAPNPNGKAGGYNLNQAIAFVHHNDIYYKPKVQGELVCRITQTGSGSLEGESTGVVFNGVPDWMYENVPELESRRSSMEFSPDGLFLAFLSYNDSEVNEYKYTWMGDDIKYPAVMSQRYPKTGSRNPNVTVNVVNLSVIKYIFPTQIKLPSELSNGSYVGGLTWASSTDLSVTVTNREQTKATTVLCRAPHFHCQAVHTEVTINDGWVLPSERPIFSVRNQGHNRLGKMVQNAEEIQAESQNVNVTDGQTHTTHEISNGGYLLKRLPVRDGEHGHYRHVVFISSLDRRPVPLTMGRFEVTEIVGWDEPHEIVYFMAAPEKRPGERHLYKISLKLNVTESNRTYITSTSPTCLTCDNTESTYRLHRARISQRGDRWEDIVARLEPDDCLYDIPKNCLFNRVQFSQDYSYYVQECLGPEAPSVYLVETASNDKIYVLNAGDVLRHRLSQLAIPQSRTFSVEIRHGFHAQVRLFLPPGMREEEDVAFPLVLHVDASPGSQLVTERFHVDWNWYLASQRSFIVAQIDGRGSGFQGELLRTQVHGKLGTVEVEDQLGVLTYLRDNLKFIDPLRICAFGWGYGGYASSMMLIDDSQQVLQCAVAINPIVNFGFHYSFFTERYIPLKGDYLRALQEADLTMKAGNIKGRNLMLMHGTADTLVHQEHTLMLVRALVEQQVKFRHQVYPDEDHAIARSLSHVYKTMEWYFDECFGPVDDNEWDPTGLFLSDIDIGPATDAHPDADAAGDSAGSNLSTLLTATTTSASLSALDELDNRLQALDLITSSTATTLSKVAGKLCNYSSKRRLHQSEAVLAQKSRILQH

SEQ ID NO: 19396 - DNA, 2281 bp, DROSOPHILA
ataagttttggccaaacaaagcttcgaacaaaaggtttatgaaaaaatatatatggtatattcttgtatactaaaatagatttaatatttcaacttaaaataaaataaataggccattgctattacatgcaaacaattaagtaaatgttttattgaattctgtgcctgcaattatcaaaagctcatttactttgcggcgctgggactattgatgtggatcacattcttgttttcgttggtgttcggatccgcagattgggcgaaagccacaccggcaaagagcagaacaagtgcagaggtgatcttcatgtcggccagttggaattggaagtaatgacaagctaggggagtgctcttcttataaggcctgggttgcgtaagcgatactaatctaaatgccagacaatttgaaattaattgcacgatgaaagaaaaagaagtggaactaattccttaaacccgagacataatagaccgattacaatttaaataacacttgattccttttgtcaatctgacaaacatttatataatctgaacttacctggcacggcgatagaaatctttcttgatttcataaaattagtattagtctttagcaagcatttttaaaaagcacgccaatgaaatttactaagccgaaaaaaaaagtttcttcttgaattcaaattcataatcacacctgtttcagaaggatatgagaaagcagttgtctggttactatctaccacagttctcaatgacttgtcgtgataacaatagtcagttaaaataaaattattattttcccaacaatattgggaaacgtaaatgaaatttactgaaccgaagatacctttttgttgtttgaattccaattcataatcacacctgtttcagaaggatctatgacagcagtggtctggttactatctactcccatgtctggttggggtttcaaaagtcagtccatgtagtttaatattgtaatacatagattaaacactctcataaacatatattgtgattagcgatccattttattagaagaaaataacctctgactcataatatttaactttcggctggagcatctgcgagtcctgcttcaggagcagctggagctgcggcaggagctgcggcaggaggtgcggcaggagcagcagcagctgctgcggcaggtgcagctcctggcttcttggcaccgatgacgatgacgttgtgatttgtattctggctcttttgggcgctaaccaaagccagaacaaccagcaaagtgacgaaaagagctaggaacttcatatcggccagttggaagtcaatttaaaagaaatgaggaaatgcaagaccgcttatataggcaaaaaagatcgccaagtgaaacaaatcttcaaattcgacacgcttgaccttattatacgtggttcattcgaggaaaataatgtaattatcattggcatgtgtttgattatgctgatatataaaaaaaggaattaagtggaacccaagcataagttacttaaaatatagagcataagctttcaaaatatcatacaaaatatttttttcttgcatattgctgttacaatcacaatttcgtgtgtgaagtgaaacgaatttggctgttagttaaccgtaagctacgacgttgaagtgcagtctaaaaatctcataatgaaagtgtcacgaactttaatcgttgtaggttctctgctcctgattctcagcatcgtattaacctacaaatggatagcatacaatcatgcttacccgaaagcacaaacagaactaacgaattcgacgaagaaagcaaatctcatcgatagcaaggctaagaataaaaagcacgtgcagaattccttagccaaaaaggcagccaagtcggtggccaaccaatccaagttcaaattggacaaggtttctaagaaaattccagtcatacccctgctcgatgttcttaaggccaaaaagcagccaagtcgtggacaaaatatattcttccatgaaaccacgaatttcaagcggatagaaaagagctctgtggtccaattgacggcacgggaggcctgtgccattgaatcggccgcccttcacaatccaggcctcactgtatttgtactttttgccggcgccactcatcgcccatcaagtggagatccgctgatcagggctgttcacacatgaacacgaatatatttaaagacttacaattttgggctccgttcatatcttatgtaaatgaatcgagagcgataaattatatttaggattttgttatctaaggcgacatgggtgcattgct

SEQ ID NO: 19397 - DNA, 281 bp, DROSOPHILA
atgaagttcctagctcttttcgtcactttgctggttgttctggctttggttagcgcccaaaagagccagaatacaaatcacaacgtcatcgtcatcggtgccaagaagccaggagctgcacctgccgcagcagctgctgctgctcctgccgcacctcctgccgcagctcctgccgcagctccagctgctcctgaagcaggactcgcagatgctccagccgaaagttaaatattatgagtcagaggttattttcttctaataaaatggatcgctaatcacaa

SEQ ID NO: 19398 - protein, 75 aa, DROSOPHILA
MKFLALFVTLLVVLALVSAQKSQNTNHNVIVIGAKKPGAAPAAAAAAAPAAPPAAAPAAAPAAPEAGLADAPAES

SEQ ID NO: 19399 - DNA, 4123 bp, DROSOPHILA
tgctacccgaagaacgacatgcatttcatccgcagcgcggaatgggtgcccgtggagaaggcaggcgtgggccgctcattcgccaatcccaatggcgtgatctatccgcgggtggtaggcatgattccacgctacggcggccacgttccgggcaacaaatttcgtgtgggcaacacctatggccgttccaccatcgacgccaagcgtcatctggccctcaatcatgattgaggaccgagttatcggaacactcactcaccattagccaatcaaattcgctgtgttacgcttacagaagcacccgaaataaatcgtatccagtagaagcctgtagaaaatggcaaatagaaataaaatcatacaaattcaaatgtccaagaaaagcacatttaatttatgatggctttttcgagcaataaaattaattaaactttaggtcacaagataagaatatattcgttatggtacacaaggtgccaaaaacacttttctcctaacaaatatcaagaaaagtaactataattattgatcgcacgcgaaaaattttaaaataaaatctcaaaaagtatttatttcatttattatttgacttttagtacatttattacaacatttctgtaaatgcttcaatatttttttataataataaatacttcttgttaattttcaatatttttagaaatgaaaggagtgatatgtatatttaaacgccttatgagagtatcaagtatcaaaaaggcgcgcaatttaaattcttgctccgctgcaactgtctgtataacaatattaaaacatccttactttcctagctttctattactaatgtactgtcggtgcttggggtcatatatttttagatttttcataggaattttcatctcagaaaaattaaattaaaccgaaatcacgtagtgttaccataacgcaatgagagcaaatactctgttttgtttggattccgttgggtattttggggactgctggcgaaagtctttcgagagataacgagtaaataagaaatcatcgttagcaaaaaacttttttgagaagatcacctagcaaaccgactgattatctgtaagatacgaaaacgagctgctttcccagtagcagagatcggcgactgatccacgatgggcatcaattgccttaacatcttcagacgtggcctccacacgagttccgcccgattgcaggtgatccagagcaccacgcccaccaagcggatatgcatcgtaggcgccggacccgccggcttctatgccgcccaattgatcctcaagcagctggacaattgcgtggtggatgtggtcgagaagctgccggttcccttcggactggtgcggtaagcagaacaatctttataaggcggtgctgttggctgccaggccaaagccaaatattggacccactacggagcggaagatgccagtgaagtatgctgaagagatcgacatgtgtgtaatccttgccagaaatccaggggtaatgtaaacatacctcccacctggtcaagactccacaggggattggctgcaatcagtgacggagtgatgatcaccaagagacacaagctgagtggattgccgcctagcacctgcatcttggaatacaaactgtgacaaccactccgaaatcaaatgcttatatccgcacacgattgcgtgtgcacggcattccatcgcacttatcgactaacgacttgtcccattatgcaaatcgcacattgcagctttggcgttgcgcccgatcatccggaggtcaagaacgtaatcaacaccttcaccaagaccgccgagcatccgcgtctgcgttactttggcaacatatcgctgggtacggatgtcagcctgcgtgagctaagagatcgataccatgccgtgctcctcacctacggagcggaccaggatcggcaactagagctggagaacgagcagttggataatgtgatatcagcccggaaatttgtggcctggtataatggattgccgggtgcggaaaacttggctccggatctgagcggtcgcgatgtcacgattgtgggtcagggaaacgtggctgtggatgtggctaggatgctgctcagtcccttggatgctttgaaggtgagtttctttttaatacccaaacaattccacgattctcatgtgcattgttacagactacggacacaactgagtacgccttggaagcgctttcttgcagccaagtggaacgagtccatttggttggccgacgaggtcctctgcaagctgccttcaccattaaggagctgagggagatgctcaagctgcccaatgtagacacccggtggcgtacagaggatttctcgggtgagaattgtggaatttccgaagtcgtatttatgatcatgacgtcctattcttaaggcattgacatgcagctggataaacttcagcggcctcgcaagagacttaccgaactgatgcttaagagtctaaaggagcagggcaggatctctggctcaaaacaattcctgcccatctttctgcgcgctccgaaggcgatagccccaggggaaatggagttttctgtcacggaactgcagcaggaagcagcagtgcccaccagttccacagagcgtcttccctcgcacttaatcctgcgcagcattggctacaaatctagttgcgtggatacgggcatcaactttgacactcgacgcggtcgcgttcacaacattaatggtcgtattcttaaggatgatgctacgggagaggttgaccctggactttatgtagctggctggctaggaactgggcccactggcgttattgtgaccaccatgaacggcgcctttgcggtagccaagaccatctgcgatgacataaacacgaatgctctggacaccagttctgtcaaaccaggatacgatgcggatggcaaacgagtggttacttgggatggctggcagagaatcaatgatttcgagagcgcagcgggaaaagccaagggaaagccgcgcgagaagattgttagcattgaggaaatgttacgggtggctggcgtctgatgccaggattccatgggttgcggttgacaatagtttccttttataaccaatctagtgttctttatttatctgtcgtttgaggcctttgttattcgttgtaaatacacaagtcatttataaaacaattgtaaatctctagtatccaaatttttttgtgcaagataaattttagagagttacgagaatggaccacgctataacgccggaaccgcacttggtgccagggtaagctcattgaattgctccactgatggatgaatgtatcaaaggtgttgatgtaactttcagttacacgggtcactgcgcccagaatcgcgaccgagtgggtcgaacttatggccgtcagacgcacaagctgttaatagacccctgtatttaccacgctcccgaactgatagtggctcccattcatgccaagcgcggcctcaaggactatcccacagagcaggagctgaagattctgcgcactcgtgagggtttggtggactccgtttaccgacatcccatattaccaggctacgccggatttgtcccgaacaaagtgagtcagattggcaagcgatatgttgctgccgcatccgctggagtagctcggcatgagacgctgatggagttgtatcggtgcgagaatcggacgctcaggcatcgggatctactggagagtgggaacggactcttcgaccgcaagatcaacgaaagactgctgccacaaacctattaccgatcgcccctgatcctggtgaccggagtgtccaagggcattaaggacgagacttgtccgccgaaaacggagaaactctgctatagcaagttcacatcgccgcacttcctggaggatgaagatgccgacaagttcataatcaatggttactccggccacattcccatgtcagtgacccgattcggggagtccaacaaggtgctgaccaaccgggcactgtgcagcttctcggactatatgtacaagcggaagcgggatacgtggtgttgtggacaggatctcagccggccgtccatcacctgcccgcccgtgggacacttcgtcgtctatcacgaggacagcggaatggtgcccaactatgcgggtca

SEQ ID NO: 19400 - DNA, 1623 bp, DROSOPHILA
gataacgagtaaataagaaatcatcgttagcaaaaaacttttttgagaagatcacctagcaaaccgactgattatctgtaagatacgaaaacgagctgctttcccagtagcagagatcggcgactgatccacgatgggcatcaattgccttaacatcttcagacgtggcctccacacgagttccgcccgattgcaggtgatccagagcaccacgcccaccaagcggatatgcatcgtaggcgccggacccgccggcttctatgccgcccaattgatcctcaagcagctggacaattgcgtggtggatgtggtcgagaagctgccggttcccttcggactggtgcgctttggcgttgcgcccgatcatccggaggtcaagaacgtaatcaacaccttcaccaagaccgccgagcatccgcgtctgcgttactttggcaacatatcgctgggtacggatgtcagcctgcgtgagctaagagatcgataccatgccgtgctcctcacctacggagcggaccaggatcggcaactagagctggagaacgagcagttggataatgtgatatcagcccggaaatttgtggcctggtataatggattgccgggtgcggaaaacttggctccggatctgagcggtcgcgatgtcacgattgtgggtcagggaaacgtggctgtggatgtggctaggatgctgctcagtcccttggatgctttgaagactacggacacaactgagtacgccttggaagcgctttcttgcagccaagtggaacgagtccatttggttggccgacgaggtcctctgcaagctgccttcaccattaaggagctgagggagatgctcaagctgcccaatgtagacacccggtggcgtacagaggatttctcgggcattgacatgcagctggataaacttcagcggcctcgcaagagacttaccgaactgatgcttaagagtctaaaggagcagggcaggatctctggctcaaaacaattcctgcccatctttctgcgcgctccgaaggcgatagccccaggggaaatggagttttctgtcacggaactgcagcaggaagcagcagtgcccaccagttccacagagcgtcttccctcgcacttaatcctgcgcagcattggctacaaatctagttgcgtggatacgggcatcaactttgacactcgacgcggtcgcgttcacaacattaatggtcgtattcttaaggatgatgctacgggagaggttgaccctggactttatgtagctggctggctaggaactgggcccactggcgttattgtgaccaccatgaacggcgcctttgcggtagccaagaccatctgcgatgacataaacacgaatgctctggacaccagttctgtcaaaccaggatacgatgcggatggcaaacgagtggttacttgggatggctggcagagaatcaatgatttcgagagcgcagcgggaaaagccaagggaaagccgcgcgagaagattgttagcattgaggaaatgttacgggtggctggcgtctgatgccaggattccatgggttgcggttgacaatagtttccttttataaccaatctagtgttctttatttatctgtcgtttgaggcctttgt

SEQ ID NO: 19401 - protein, 466 aa, DROSOPHILA
MGINCLNIFRRGLHTSSARLQVIQSTTPTKRICIVGAGPAGFYAAQLILKQLDNCVVDVVEKLPVPFGLVRFGVAPDHPEVKNVINTFTKTAEHPRLRYFGNISLGTDVSLRELRDRYHAVLLTYGADQDRQLELENEQLDNVISARKFVAWYNGLPGAENLAPDLSGRDVTIVGQGNVAVDVARMLLSPLDALKTTDTTEYALEALSCSQVERVHLVGRRGPLQAAFTIKELREMLKLPNVDTRWRTEDFSGIDMQLDKLQRPRKRLTELMLKSLKEQGRISGSKQFLPIFLRAPKAIAPGEMEFSVTELQQEAAVPTSSTERLPSHLILRSIGYKSSCVDTGINFDTRRGRVHNINGRILKDDATGEVDPGLYVAGWLGTGPTGVIVTTMNGAFAVAKTICDDINTNALDTSSVKPGYDADGKRVVTWDGWQRINDFESAAGKAKGKPREKIVSIEEMLRVAGV

SEQ ID NO: 19402 - DNA, 3620 bp, DROSOPHILA
catttatttggaagacatcttaatcgagctggatacgacgaaatgctgggatattcggtccaaggagcggtggaaatcgctatctgtcatgtgttgcatgtacatcaaaccggaaattatttattaattgctcacactaccgcaaaagaatcgaaatctgcgcacaattaaatcgatataatgagtggcacagcaaacatcatggccggctgaccaagcacacaaaatatttcatgcgttgtcgaacaaaatgaatgcataaataattgatttaattttcgtgttgactacaaatgaagcgcttaaacgaatggataaaagggtgtggaatgcggttcattggccagaacgaaagcatggccctgcgaatttcatattattaacgcgcaacaaacatataaatgcattctaaaacctaaagtggatgcagtgtaaataataaaccatttgatgtccattgaaaaatttcgaacactgataacagcgtggttcactcaaacacattatttaaatgcattttccaaatgtgtttgtaaatatagatgaacctatttctttttgcatataacttcttaaatgattaaaatggaattatatttctttttgtgtaatttaatttggaaaataaactaaaatgaaagttaattctacagggaaacagcataccttttatttttggataattgttcaactattgtgtggtttttgcaactacggaaatatttgctgtaatgtaaatataaattatgttttttttttttgcttgtctttatttcactcttgtcattcatttgaaactgacaaattcatggttttaccataatcacggcttcagttatgtcctcgctttagattatattcaagcgttgatagaagtataaaaaaccaaacctagatcaagatcaactcctttttaagccccataaaattaaaagaccacaatatggaagtccataaactaaaagtccatgtttaataaaaaaaaaaaaaccatttatgttcaggcggcatccttcttcttgtttgaattggtgccatcattgaagggttgcacatcgccggacgcccaaatacaatacacaatcgccgtgacgacaagaacgccaaatgcgacccagaagactaatctccactccaagagggtggcattcggtgtcattacaccaactaagtatggtgataccacgcccgtaatcgcaccaatgccattggtaatggccatcagagttccagcataattcggactcatgtccaatggcgtgagcttcatgccagcatagtaggtgcccatcagacccatggtaattgtgaatagagcaacgaccatgcctcgattgcatccagcataggatgcagctaccatgaagacagccggtccaaaggcggccactcctgtcattattttgcgcgtgtttgtggtgctcatgcagttgcgtttgatcatttgatcggccacacagccgctgagcagcgacatgatccacatggtaacgtagggcagtgaggagtagagaccattcgacttaatcgaaaaccgcagcacatccgacatatactttggcaggtaggagaccataatatagaaaccccaatcgtgtccgatttgagcactgatcaatgcccacatgggtatgcttgttaatatggcaaaaaatggtgtcttcggcttgttcttatccggcggcggtacctcctgtgccaagaacgcacgttcctctggcttgatatatggatgagtgaatggactgctaaagcacactagcgtgaaaacgacaaaccagacaagggcgatgatcgcaaaaacatagaatacccatggccagtccatggagctgagtacatagccagaaataatgttaccagcaatactacccatctgaccaccgccgagtacaagggctcccagcattcctcgctcgtttgccggtacccagctggctagcaaaacgctgagtgcggggaaagtggttccttcaccgagtcccataagtacgcggaggacaattaatgcatcggcaccgccataaacaatgcagacgggtgtcagcaatgtaaaaatagccgtaaaaaagattccaagactcagtgtccactttccgccaaatttgtcagccagaattccaccaggcaaatgagttacaatatagccaatgtagaaagaggccaggattagaccctgtttctcctgcgaccaatcatagtcgcctccctcgaaagtgctcgagggatcagactggtcatccggttcacatatcgcttcggtgtggaaaatagtataattcctcttcaccaccagcactgtgatggcctgggatagacatatccgcatggtgtatgcattaaagatggcaaagaatcccatgatggccagaatccagcgttggggtaatacaaagaattttgagagctttatgccccattctggttgctcttttgcatccgccatataaatgcgtctgttttgttataactactaaaatttacgcacgaaatagaattatttgacttgcatgaaatttggatttacaaaaaaaaaactaattttttcacagtatttcacatttatcaaaaactcaaaaaaactaaaattttttgtacatttttgtaatgtatgtggttagaccgtaaaacctgtattgactattttcactgatcactgagggaaaaatcaaatgctacgctgatgtctggctaatgtgatgtctgaatatatgtttttagaaatatttaaaaatcatattgtttacagaagtttttccatatattttcgcacctctaagcactgggtccagtacatcaaccatatgttgtgcgtagaaagtgtgtggcctccatataacccacttcctgtttctttgcaccatctgtgggtttttttttcttgtgtgttacccgactacttggccaggccacacagagcagtcccaagatgtccctaacaattacatttccctcacaatttatgtatgttttgcaaccttttcagtttcttttgcttcgtcctcgtcgtcgtcgtcgtcatctattgttttgaatgcgagtgagtcagtcacatgtgtgcatgtgacgatggttgggaaggacgggagtttgctgggttttgacaaccgcaggcgcaggtctttgcggtggcctaaccgaagaagggcttccattttcatcatcataaagtctgttgaaaggaaatcgatatgggcaacttaatcatgaaatgaagtcgccgtcaagttgtctttcattttcaattccgttctcagaacctcgtacgccacaccccgcccaccaacttttggcccgcccaagtgctttgtgtttacctatagagtgcgaagggccaaaaacttttccctaggtttagttcagttcagtacggatcgtcgtggttcattttgcctcgcttcggttcggtttggtatggtatggtttggtttggtttcggttttgccttgactggaattgttttgtttgtttgttttcatgtctaagttagcttacttttgtgaaaaagtttcttctactatccgctgtggcgcttatgctttcaatcacccacggttctgccccctgttgcaagcattttttgttcatttccgtttcgacttccgttgttgctttgtcag

SEQ ID NO: 19403 - DNA, 1620 bp, DROSOPHILA
taaccacatacattacaaaaatgtacaaaaaattttagtttttttgagtttttgataaatgtgaaatactgtgaaaaaattagttttttttttgtaaatccaaatttcatgcaagtcaaataattctatttcgtgcgtaaattttagtagttataacaaaacagacgcatttatatggcggatgcaaaagagcaaccagaatggggcataaagctctcaaaattctttgtattaccccaacgctggattctggccatcatgggattctttgccatctttaatgcatacaccatgcggatatgtctatcccaggccatcacagtgctggtggtgaagaggaattatactattttccacaccgaagcgatatgtgaaccggatgaccagtctgatccctcgagcactttcgagggaggcgactatgattggtcgcaggagaaacagggtctaatcctggcctctttctacattggctatattgtaactcatttgcctggtggaattctggctgacaaatttggcggaaagtggacactgagtcttggaatcttttttacggctatttttacattgctgacacccgtctgcattgtttatggcggtgccgatgcattaattgtcctccgcgtacttatgggactcggtgaaggaaccactttccccgcactcagcgttttgctagccagctgggtaccggcaaacgagcgaggaatgctgggagcccttgtactcggcggtggtcagatgggtagtattgctggtaacattatttctggctatgtactcagctccatggactggccatgggtattctatgtttttgcgatcatcgcccttgtctggtttgtcgttttcacgctagtgtgctttagcagtccattcactcatccatatatcaagccagaggaacgtgcgttcttggcacaggaggtaccgccgccggataagaacaagccgaagacaccattttttgccatattaacaagcatacccatgtgggcattgatcagtgctcaaatcggacacgattggggtttctatattatggtctcctacctgccaaagtatatgtcggatgtgctgcggttttcgattaagtcgaatggtctctactcctcactgccctacgttaccatgtggatcatgtcgctgctcagcggctgtgtggccgatcaaatgatcaaacgcaactgcatgagcaccacaaacacgcgcaaaataatgacaggagtggccgcctttggaccggctgtcttcatggtagctgcatcctatgctggatgcaatcgaggcatggtcgttgctctattcacaattaccatgggtctgatgggcacctactatgctggcatgaagctcacgccattggacatgagtccgaattatgctggaactctgatggccattaccaatggcattggtgcgattacgggcgtggtatcaccatacttagttggtgtaatgacaccgaatgccaccctcttggagtggagattagtcttctgggtcgcatttggcgttcttgtcgtcacggcgattgtgtattgtatttgggcgtccggcgatgtgcaacccttcaatgatggcaccaattcaaacaagaagaaggatgccgcctga

SEQ ID NO: 19404 - protein, 481 aa, DROSOPHILA
MADAKEQPEWGIKLSKFFVLPQRWILAIMGFFAIFNAYTMRICLSQAITVLVVKRNYTIFHTEAICEPDDQSDPSSTFEGGDYDWSQEKQGLILASFYIGYIVTHLPGGILADKFGGKWTLSLGIFFTAIFTLLTPVCIVYGGADALIVLRVLMGLGEGTTFPALSVLLASWVPANERGMLGALVLGGGQMGSIAGNIISGYVLSSMDWPWVFYVFAIIALVWFVVFTLVCFSSPFTHPYIKPEERAFLAQEVPPPDKNKPKTPFFAILTSIPMWALISAQIGHDWGFYIMVSYLPKYMSDVLRFSIKSNGLYSSLPYVTMWIMSLLSGCVADQMIKRNCMSTTNTRKIMTGVAAFGPAVFMVAASYAGCNRGMVVALFTITMGLMGTYYAGMKLTPLDMSPNYAGTLMAITNGIGAITGVVSPYLVGVMTPNATLLEWRLVFWVAFGVLVVTAIVYCIWASGDVQPFNDGTNSNKKKDAA

SEQ ID NO: 19405 - DNA, 4056 bp, DROSOPHILA
acatacaaaatacgacaacgacaaatacaaatacgacgacgacgacgacgaatttttgtgaactgtatgcgattgttcgtacatttttacattttccacacacaccgaacgcacaacgaacggccaaaacgatcgattgtgcatcaacgcgttataagcatcgctaccaaactaactgtcatcacggctattatgtatattttacataaaatccaatattattttccgaaaattttgttaaccacaaagaaccaacatagtctctcagagacggaccaaattttcgatagctgcagaaaatcattttcaaggggataacattatgataactatcgaagtagcggccagtctccactggtggccgcgatttcgggcgtttcacaccgataacaagatgcgaaaagttggtttcaaaaaatactgggaacaaatggaataaatcaaaatccattattaggaaaaaaacctgttttttgcttttcttgcagttcaggattcccccacctcccaaataaagatattgaacgtttaagtatttaatttgtatttcaaatatagttacatttaaatttatattgccacgaaaatgactcccataccctccacacattggcctcctccttaaataattttatgatttccgtttgttacatttgtatgaatatacgactataatatatggaacaagatcacatcacaacgtgaattatagtaacaactatagcttttgtcaaggctgcactctaagaataacattcaaaaacgattttatctgttttaaattcttttgaaatgttcacgataaatttaatgccttgatttgtacggttcaaattggggcgtgttctttaaatgttttccaaataggtcttgttctcgattttaaaggagcagaggcagcatcaaaaagagtcggaaatgctatttagttttgttgtgtttctaaccgaaagtaaactattacagccacatccaaaagcaaaacaaaaaacccgattcgctaacagtcggtagaaggagtggcctgatcttgtgcgttatttttgtttgttacattgctttgcaaaatgtgactttccttttcttgtttggtgtcatcagtctcagttttcgacttgggtaggttctttcgctcttgttcatcattgttaacattctcctcgtcctcatcatcgtcatagttggttggttcctcgcccttgcgcaatagcttaccaaccagctcatatttttctaaataacataatgagaacgttagtttacctatgaatctgagcatatacatatatatatatatgatttaattacccttaaactgcatttcccattcccgcacagagtccatttccacggcacttaaatcgctcaggtcatcgtattcatccttgtcaattgaaaccacgctgaaagtggccaagtttcgcgaggcatctctacccgcaaaagttgcgtagggtccacctgaaaagcagagaatcatcatatgttactatctaaatatttatatagttttagtttgttggagtcagcagtctggtcatcaggaacacggcaccgttgatagaagatagtatacaatcaagtgcgcaacttaaggcttttctgcgcatctacgtcacaagtgtcgtgcatcttgctcgcactcgttacttttagttaaaatacttaaggaaaaagtgcaagccgttgttgaaatgccactggtttctgtttggtgtctttgaacatttcaattaaggcatttacattaggaagtatttcgatttgataaggcggacgacaactatttcatatgaaaatgacgatcatggtgaactatttttgcatttcatgcttaacaataaaaacacctagtcgacatttggtaggcattatttgattattgaatttggttagatagttgcgttatctcaaaacgaaaactttcttgttgataagctgttaatcttagcgcaaaaaaaaatgacgaaatatagcagagatatgagcatatgtcgtgcaatatctcctcccacagaaattaaatgcgattaagagagttacagatatcaggaaaaccaatattgtgacgtagcattgcaattatagatagacatcgtatagagggatataaataatgggatcttggcaatgaaacacataccaaaataccaaaatcccttccttataatcggcaatagatcaatcgaaaatagttctaaaggtatatgctatactgtaagcttaggaacaacttaaattcaaatatttatagcctagcactcacctgggccgtaaaaacgccttcctttgctgacatcgtaaacacttccgttgacggcgaccaaaacacggccatccggctgagttccatcgtactggcgaagctccttcacggtaaaatcgcgtcggattttgggtaactcaggttcggatggctttgcaacgcccacggatggcacttcggtgcgatcccgaacgattttatagaccaggaagcagatgatggccaggagggccaggttcattggactgtacaggatttcgcggattatgttgcccagaaatgaggaatcatcgttgtttagattgttgccgatttccttgtcgtaggccgaactaggatctgcacccactttggaatccatcttgttcgcttaatttacttgctgcactggatgtcgctatgcactgaatgttacaatattgtacatcaacctgtgaattgtgtatactgccatttaataaatatgcgtttcgtgttcggattttatgtaaaaaagcggttcggtattccgaaaaaaagtggtaaatatatgtaagcgcaatggtaatggaccaaaatatatgtacatatgtaattgcaatgtaaattccaaagtttattagctcaccttttagacgtgccgtctcgattcgattattttcatattcctctgatcaatttttgctgcgcaacaatgatttcataaattaatacctttattgctcagcagcaccgaccttttgcgacttactgtatttacaattttacgaactacctatgaaaattgtgacaatgattttagtaggttaaaggtctttcattactgaaaagtaatcgaaagaagcgatatcagcgtgttgttaaacaccaaacagatataacgcggtctttccactgaagttttctcatggaacggtgggaaaaaatatatatatcaacgtcggttctcagtgaacggaaattccaaatttatatatcgtaacgttatattttcgattttttccgatgttattccaaattaatagaatatatgttaatatttttataatctgaaacacggaaaagacaacaactaaaatgcaatttaaattattaaataaaaatgagcaaacttggttatttaaacacttgcctgttatatggcatgttactctgcaagcaactgtcgaaaatcaacttttattctgtgaattcttagatatgaagttaaatgaagtgcaaataagctatcccccaaattaaagtggtccagagtgctcgaaattatcgtccatctctaacgcattttaaaaacgcaagtggctggtctcactcatgttattccacattatattttgtattgcattctattttatctaagctagcaaatatatttaaggcaactagactaaatgttaagcattcgtgttttaaggctacaaaatggacactccgttcttaacaacgcctgccaattggcactttcgcgaaacaagagctccaaaaggtcgagcaaagacaacgtaacgcgacagggaaaaatatttggctcgttgtttggaaatcggcttaaaggcagcaaaagccattggtatccatcgcccgatgcaggaacatcaggcaatcaaaagtcgctgcacgccttaaagtttggaaccccacactcgaagacaacttgcagccacaacaatcgacgcatgtctgttctgaacaagttgttcatgacgaacatcactgatattctggccaccggcgcagttgccgattccatcgtgggacacggagtgcagatttcctatgtcaagatcaccagcgacttctcccgcatcaat

SEQ ID NO: 19406 - DNA, 1000 bp, DROSOPHILA
tttaacctactaaaatcattgtcacaattttcataggtagttcgtaaaattgtaaatacagtaagtcgcaaaaggtcggtgctgctgagcaataaaggtattaatttatgaaatcattgttgcgcagcaaaaattgatcagaggaatatgaaaataatcgaatcgagacggcacgtctaaaaggttgatgtacaatattgtaacattcagtgcatagcgacatccagtgcagcaagtaaattaagcgaacaagatggattccaaagtgggtgcagatcctagttcggcctacgacaaggaaatcggcaacaatctaaacaacgatgattcctcatttctgggcaacataatccgcgaaatcctgtacagtccaatgaacctggccctcctggccatcatctgcttcctggtctataaaatcgttcgggatcgcaccgaagtgccatccgtgggcgttgcaaagccatccgaacctgagttacccaaaatccgacgcgattttaccgtgaaggagcttcgccagtacgatggaactcagccggatggccgtgttttggtcgccgtcaacggaagtgtttacgatgtcagcaaaggaaggcgtttttacggcccaggtggaccctacgcaacttttgcgggtagagatgcctcgcgaaacttggccactttcagcgtggtttcaattgacaaggatgaatacgatgacctgagcgatttaagtgccgtggaaatggactctgtgcgggaatgggaaatgcagtttaaggaaaaatatgagctggttggtaagctattgcgcaagggcgaggaaccaaccaactatgacgatgatgaggacgaggagaatgttaacaatgatgaacaagagcgaaagaacctacccaagtcgaaaactgagactgatgacaccaaacaagaaaaggaaagtcacattttgcaaagcaatgtaacaaacaaaaataacgcacaagatcaggccactccttctaccgactgttag

SEQ ID NO: 19407 - protein, 248 aa, DROSOPHILA
MDSKVGADPSSAYDKEIGNNLNNDDSSFLGNIIREILYSPMNLALLAIICFLVYKIVRDRTEVPSVGVAKPSEPELPKIRRDFTVKELRQYDGTQPDGRVLVAVNGSVYDVSKGRRFYGPGGPYATFAGRDASRNLATFSVVSIDKDEYDDLSDLSAVEMDSVREWEMQFKEKYELVGKLLRKGEEPTNYDDDEDEENVNNDEQERKNLPKSKTETDDTKQEKESHILQSNVTNKNNAQDQATPSTDC

SEQ ID NO: 19408 - DNA, 4850 bp, DROSOPHILA
gttcttctgcagcttatccacgtcctgaatgtaatcagtgccgaccttcacgatggcggcgccagttcccaagcccgccagggtcgccagcagtgcattgtcctgtggcagggcggacttgatgagcgcccaggccagaacggatcccatggagaatagggtggcgcccagcagggcgtacgcacctcgcttgttgttcttcacgtccttcaggtggggcctgccgtaaatgtagaaggcactgcccaccaccgcggagatgaggaacacgttcgtcaggtccttcttgggcaggattttgggcacgatctgggggttcataacattcaccgcaagggctccgtagctcaccaggccgtgcagcggtatgtagtagttgaacacattatcccgggtgaagggcttgaggcccactttgtcgcatatgctgcaggcgtcttttgactgtgtcccggccattattatcggtgaaaatgcaattaagtttttggatcccggtgaggtcgacgagtcttcttcttcttgttatgtaaagaatagggctgccaggtcgcgatatatgtgaaagttatgtcggtcttcgcggacactctgcagatggtatatcactggttctaggtagatatgtgtataaagatgtaaatgttttgaccaatataatatgtcaatgtctgagagatcctaatatataaatgtacatatctgacagggagagtacttgttatcaagggctttaacgcttggagcgctcatgttagtgggcgttttgcgtatttgcataacattagccccgatatttcctgaatgtacaattaaaaacaaatgttatagttattttcttggctggttttttaaaaattttcgaatttttaagtttagtggttccggaacgagtcacctttctgaacaagaagtgtcaactctgttgaacagccggcacggtgtgcacaaccaggtggcaacaccagccggcgcaggagaatgagtggaggagtgcctgagaggtgggaggaccgaatggggagagacagagagcgaaataggtgcgaaaaatttgtagttgcctggaaattcctcaatttcaatttgcaaaaagtaaatatcagccgccccaaagcaacgtcgataaatgtgcgcgccccgcgagcagagaacaaccaacgccagctcctgaagcacttcagtccagagatatcgccgagagccacagtgcagcagatccgtggacgacatgttgacgcacaaaacttgtcaggcacgtaagaaaatgcaggtgagtgcgccaattgaaaacgggaaggaaagcggacacctaagcccaaactaattcaattaaaccgtcggacgccaggtttccttcgtgatacgggacgccgaggagaaacagcaccggaatggcgtaaacgctctgcagctggatgccaataacggcaagttgtactccgccggtcgcgacgccataatccgtgtgtggaatacacggacggactccagcgagaagtacatacaatcgatggagcaccacaacgactgggtcaacgacatagtactttgctgtaatggcaggaaccgtgagttgctccaccgatcagtttaggcattcattcaaacattcaatcttttgcactcatagttattagcgccagctgtgataccacggtgaaggtgtggaacgcccagaaaggcttctgcatgtccaccctgcggacccatcgcgactacgtgcaggcgttggcctacgccaaggatcgggaacaggtggccagcgctggactggacaaggccatcttcctgtgggacgtgaacacactgaccgcgctcacggcgagcaataacacggttaccacctctagtctaaccgggtccaaggactcaatctacagcttggccatgaatccatcgggcaccgtgattgtgagcgggtccacggagaatatactgcgtatctgggatccccgcacctgtatgcgcagaatgaagctgcgaggccatacggagaacgtgcgctgcttggtggtgtcgcccgatggaaaccaggtggtgtctggcagttccgacggcacgatcaaggtgtggaacctgggccaacagcgctgtgttcaaaccatccacgtgcacaaggagggcgtgtggtcgctgctgatgagcgagaacttccagtacatcatctccggcagtcgggatcgcaacatcattgtgaccgagatgcggaaccctagtaacaaaacgcttgtgtgcgaggagcaggcgcccgtgctgagtctgggctacaacatcgacaagactggggtgtgggccaccacctggaactcggacattcgctgttggaagctgcccatgtacgacaggtgcacactaaattcctcgggcggaatggacgcacaatggacacagggcggcactgaggtggcctgcataaaaggtggagccgccatcaaggagtgcgcggtgctgaacgacaaacgttatatcataaccaaggactcacaagatcaggtcgtggtgtacgatgtgctgagagttgtcaaaaaagagcaattgggcgctgttgatttcgaagcggaggtgaagaagcgtaataagcaggtctacattccaaactggttcactgttgatctgaaaaccggggtgagttaagctaagctctattgaagcttaagttcgtttatacttaattatgctttgcagatgccaacgattgtattgggtcaggaggaagtggattgcttttccgcttgggtttccattgaagctggactgccggagtgcgtcgatcccacaacagagattaaggttgatcgctcatcagaccccttcacatattaaatgccatttaaaatgctttgtttttttatagatcaactatggcaaattacttttagaagccctgctagagtactggacaccaccgcatagcataccaccaaacgaaatggaacccgatatgcacggcaatggctacttccaagtgcccaagcacacgcccgtcatctttaggttagtgactgtgatataaccttatctgcaccataactaatttctcaaatttctggctaaattaaacagtgaagtgggtggccgcactgtttgccgacttttggtacgcgacgcagctggcgatagcgaaagtaccctgctccacgaaacggcgcctcagtgggtgaccgacgtggtgatcgagaagaacattcccaagttcctcaaaataccgttcttcctgcagcctcacccgcaaatgaccaagcctgaacgaacgaagaaggtagccgtccttgacagcaaacaaaactcatgttctaacgcaatttatattaaattttttaggatcgtcttgtggctaatgaatttattcagtgtcgcaaggtctgcgagcacgtgcttgaaaaggtgctgaatgcggaaactaccccaagtgggggcaatgctaacaattcactgcagaatagccagagcgatgctaattcggagggatcccaactgccagctgaggaacgaattgaactgtggtgtaacgatgtggtaagacaaatggacaaatctcatttaaaggaccttgttcaccgcctttcctttaaaggttgtggaccccaacatggacctgcgcacggtgcgccactttatctggaagcagtcgaccgatctaacgtttcagtacaagaccaaacagaatttcaactacgatggtaaataagagagcccacgcattgaacaacacaagaacacctatcacaaacacaacgcatacttgatttctgcaattgctattgcctaaccgagagttgtgcttatatatatccgccccataggttcgatcggggatagcttggagcgcgtgacgcgcaagtattgaacgctggcaagtgatctcccgcctaaccgaagcagtaccgatgcattattgaatgagaacgagattgagcagatcgattaacaatttatatttttataagttgattttgcaatatatttgagttaacctgcgattcgtctcatctcttctcgactcgactcgtggacaaacacaaacacattcaaggagaatctgtacgagcgttaactttaaatttaaaagtgcaccggagtacttttgtttgttcacttctcgttaggaataaatatgtacttcagattcagacttataacaattaggcttgcgacacacgtagataagcattgcaaaggagtaactgcagacataccattaaatcgtatttgcatctgaagcaactagacctagagtattgcgcatatatgtatgtatgtaatattcacacttgtttcacattaggtttatacataattatttacatagaacatacataggtataagaaatctgttaaatatacagaaaaatcaatgcaatggtagtagcccaacttgtaaagagctctatgcaagccaatttgtacataagtaataagcgaaaatcgaaaaccaggatggaaatcaattaaagttattaaattatttggaaatcaagcctgtctctcagtccctaagatgattacccgccctcttaactaacaactaggagtgtgctcctaacgccgacgtcgcgtgcccgccactcgggaataggactcgatgcaggtcagcaggctgagcagctgttgcttcagcgtcgagggtatgtggtatccgtggataatcctccgtggcgcgttgctcgtccggatcagccagcgggcgaccagccagaggcagttttcgcgcagcgatctcatcggaaagtggatcagcacttcgctgcgtacgtcaaccagctgatccggactctgctggctcttgggtacccgcacccgaatcggctgaaagatcctctgcgagcgtacgtgcatccgttcgcccg

SEQ ID NO: 19409 - DNA, 2274 bp, DROSOPHILA
agaggtgggaggaccgaatggggagagacagagagcgaaataggtgcgaaaaatttgtagttgcctggaaattcctcaatttcaatttgcaaaaagtaaatatcagccgccccaaagcaacgtcgataaatgtgcgcgccccgcgagcagagaacaaccaacgccagctcctgaagcacttcagtccagagatatcgccgagagccacagtgcagcagatccgtggacgacatgttgacgcacaaaacttgtcaggcacgtaagaaaatgcaggtttccttcgtgatacgggacgccgaggagaaacagcaccggaatggcgtaaacgctctgcagctggatgccaataacggcaagttgtactccgccggtcgcgacgccataatccgtgtgtggaatacacggacggactccagcgagaagtacatacaatcgatggagcaccacaacgactgggtcaacgacatagtactttgctgtaatggcaggaaccttattagcgccagctgtgataccacggtgaaggtgtggaacgcccagaaaggcttctgcatgtccaccctgcggacccatcgcgactacgtgcaggcgttggcctacgccaaggatcgggaacaggtggccagcgctggactggacaaggccatcttcctgtgggacgtgaacacactgaccgcgctcacggcgagcaataacacggttaccacctctagtctaaccgggtccaaggactcaatctacagcttggccatgaatccatcgggcaccgtgattgtgagcgggtccacggagaatatactgcgtatctgggatccccgcacctgtatgcgcagaatgaagctgcgaggccatacggagaacgtgcgctgcttggtggtgtcgcccgatggaaaccaggtggtgtctggcagttccgacggcacgatcaaggtgtggaacctgggccaacagcgctgtgttcaaaccatccacgtgcacaaggagggcgtgtggtcgctgctgatgagcgagaacttccagtacatcatctccggcagtcgggatcgcaacatcattgtgaccgagatgcggaaccctagtaacaaaacgcttgtgtgcgaggagcaggcgcccgtgctgagtctgggctacaacatcgacaagactggggtgtgggccaccacctggaactcggacattcgctgttggaagctgcccatgtacgacaggtgcacactaaattcctcgggcggaatggacgcacaatggacacagggcggcactgaggtggcctgcataaaaggtggagccgccatcaaggagtgcgcggtgctgaacgacaaacgttatatcataaccaaggactcacaagatcaggtcgtggtgtacgatgtgctgagagttgtcaaaaaagagcaattgggcgctgttgatttcgaagcggaggtgaagaagcgtaataagcaggtctacattccaaactggttcactgttgatctgaaaaccgggatgccaacgattgtattgggtcaggaggaagtggattgcttttccgcttgggtttccattgaagctggactgccggagtgcgtcgatcccacaacagagattaagatcaactatggcaaattacttttagaagccctgctagagtactggacaccaccgcatagcataccaccaaacgaaatggaacccgatatgcacggcaatggctacttccaagtgcccaagcacacgcccgtcatctttagtgaagtgggtggccgcactgtttgccgacttttggtacgcgacgcagctggcgatagcgaaagtaccctgctccacgaaacggcgcctcagtgggtgaccgacgtggtgatcgagaagaacattcccaagttcctcaaaataccgttcttcctgcagcctcacccgcaaatgaccaagcctgaacgaacgaagaaggatcgtcttgtggctaatgaatttattcagtgtcgcaaggtctgcgagcacgtgcttgaaaaggtgctgaatgcggaaactaccccaagtgggggcaatgctaacaattcactgcagaatagccagagcgatgctaattcggagggatcccaactgccagctgaggaacgaattgaactgtggtgtaacgatgtggttgtggaccccaacatggacctgcgcacggtgcgccactttatctggaagcagtcgaccgatctaacgtttcagtacaagaccaaacagaatttcaactacgatggttcgatcggggatagcttggagcgcgtgacgcgcaagtattga

SEQ ID NO: 19410 - protein, 680 aa, DROSOPHILA
MLTHKTCQARKKMQVSFVIRDAEEKQHRNGVNALQLDANNGKLYSAGRDAIIRVWNTRTDSSEKYIQSMEHHNDWVNDIVLCCNGRNLISASCDTTVKVWNAQKGFCMSTLRTHRDYVQALAYAKDREQVASAGLDKAIFLWDVNTLTALTASNNTVTTSSLTGSKDSIYSLAMNPSGTVIVSGSTENILRIWDPRTCMRRMKLRGHTENVRCLVVSPDGNQVVSGSSDGTIKVWNLGQQRCVQTIHVHKEGVWSLLMSENFQYIISGSRDRNIIVTEMRNPSNKTLVCEEQAPVLSLGYNIDKTGVWATTWNSDIRCWKLPMYDRCTLNSSGGMDAQWTQGGTEVACIKGGAAIKECAVLNDKRYIITKDSQDQVVVYDVLRVVKKEQLGAVDFEAEVKKRNKQVYIPNWFTVDLKTGMPTIVLGQEEVDCFSAWVSIEAGLPECVDPTTEIKINYGKLLLEALLEYWTPPHSIPPNEMEPDMHGNGYFQVPKHTPVIFSEVGGRTVCRLLVRDAAGDSESTLLHETAPQWVTDVVIEKNIPKFLKIPFFLQPHPQMTKPERTKKDRLVANEFIQCRKVCEHVLEKVLNAETTPSGGNANNSLQNSQSDANSEGSQLPAEERIELWCNDVVVDPNMDLRTVRHFIWKQSTDLTFQYKTKQNFNYDGSIGDSLERVTRKY

SEQ ID NO: 19411 - DNA, 4066 bp, DROSOPHILA
cttccggctgattttgcttagcaaatcgaatcccgtgatgggttgctacatgttctggaccagtctgctcgtgctgaagatgctcgttatgtcactactcaccgcccgccagcgcatgaaaaccaagacctatgccaacccagaggatttacgcctgagtcggagcacggaggttcgattcggggatcccaatgtggaacgagttcgtcggtaagtgaaaatagttggacatataaataaaggtacattataaccacatactcttagctctcatcaagttctatttagcaaactaagattacctaaattttggatatccgaatgtataaaactggtatatctccttttcagtgctcatcgcaacgacctagagaacattttgccctttcttctgatgtcgctggcctatgtggccagcggaccgaatcccctgaccgcccgtctgctcatccggatcggtgcaagtgcccggctgatccacacggtggtctacgccatcatcccggttccgcagccagcaagagccctggccttcttcaccaccttcgccatcacctgcttcgaggcgggctacgtgctcgtctgctgtatcaagtacatttagactaatgctgaccccactttgccaactaactactcacccactcgcattcatagcaccagtgatgtcaaggtacaggttttgggtgctcattttcagtgaaacgtatggttaatttagcagcttttgtcctataagtaggaagtataagtcacctataattgctataattggttggtacgttaaagaatatataggtaatgcaattggttaacaaaattttgatatagattatatacacaaaattaaaacttattaaaaaacataataatgtgaagacatgataataatcatttatcatctaggttttaacaagtaagatttcaaaatgttcagagggaaaataatgaaatttgcattagttttataattaattacttttaattatatattaatctctttttttttttttttgcaaatatgtaaaacgtcttgtaagttctaagaaatcaatttaaatactagtgtaccctgcgtagaagtgtagtttagctggcccacatggacaaagtagagagataccacttgtcccatggctgcacagcaccttagatttgtttcgacgcaattcgtaaccagtttggtcgcatgcttatgatcaccaatctccacattgagctgagagtgcggctcagccatttgtcgaagtcggctcaaagcgaacgcacacacattccgcatccgccatgtcggccgcagctagtaattccagcaagatgatgacatcgcccggcgatatgtttaccctggagaatcctgtcttttgctgctatcttttttggtccacagtcctggtggtgaagatgctgctcatgtcgctgctaacggccgttcagcgtttccggtataaggtaggctgaagatatgaagataaaattatgtctgtgcacttgctcaaaggtcatcatcattccaccattcaattcacagctgctggcgatcgtaccgttggcactgcggcgcagggtaataacttcaaatctccatgtcatcgcgatcacattcgattatttagattaacctgttttagtctcgttctaaaaatggttattttccgctcttatagatctttcccaaccaggaggatctgttcttcaagaatcttgaagtgcaattcgatgatccgcatgtggagcgggtcagaaggtgcgttattaccattaatctactaaacaagaagttttgtcatgagaaagttagaaactagtatttgacttaaccatgatttagagtagttcgactgcgggctatgcaactgtaggttcacatcctaataaccttatactttacgttttagggcccatcgcaatgacatggagaacattctgccgtattttatcatgtccttgatttatatcagtaccaatccgaatgccgatgtggcctgcatactgttccgagtggcctccgtggccaggatcatacacactctggtttacgccgtttatccggtgccgcagccatcgaggattctagccttcgccaccatgctactgatcaccttctacatggccgccgtggtcgccctgcgtaccctaagctttatatgaataaattcaagtccctttcggcttaaccctcaaatataacacgagcttttcaagaagattaacattgagtatctagtttcttggctaaaggagggaaaaattaataatttcccgcctaaattgctaaatttttagggaccctcatttgcgagcatagttagaactcttcagaactacttttcaaatgactaaagaagtacgtatttccttattgaccaattaaaagctagctagctaactgctacaagcggcatccttgaacaagaaaattacaaaccggttggttttcaattaatttagttctataattagcttgagatgcaacaaaaacaaacagttgaaggggctggggatccgaggagtggcactggggggagtgtgtgcaggactagtgttatcctataatcctggtgtcctcatcccaggatgtgtcggtatatctagatattgaagccggcatcgcgcatgcacttcttgtgcgcctctatcagcgccaagcaattctcctcgccgttctccacaatgctggtggggatttggtatcgaaattggataagaattttgttgttagccatgtggttgcgtcatgggatgcaaaaggtgcacactcaccaggcgtcacgtgccctcttggtctccgggcaggcgcaacaggccttgcacttgggcttctcgccggatgcggtggctgcggatgcggtggttgtggatgcggtggctgcggatgcggtggtcaacgggtgggccgccgaaacacttggagctgcaactccttgagatgcactgttgcccattcttcaatcgggtatcggtcaaaagcggctgagaaacaatattatggacgttactgaaccgcctcacgtttgtttatataataaaactcacttcgagacggatatttcaccacaattcggtttatcggcgcacagcacacgaaaataactaaattcaagttcagcgaacagggctgtcaatggctgacaaatatcgccgtgagtgctaagggttggtagtccgtaaaactatcgttacgcgttgcttagaattgttagaaaattgttgtaagatctgttattaaatctgtccgcttaaaaacagtatgctattacaaaattattaatattaaattgcatattcttttccagcattgtatatacatatattttgaaattctttctcagttgtgaaatttataaataaagtcataatttttccatctagcgtccgattataatctgagctatagtgattttacattaagtttcagaattgaaggcactagggtatttgaagccatgtgacagatgtaccgaacgtgacaaccctaccgaagtttattttaacgcagaacagctgcaccaccaatcgatagcaagtagtgttgctcaatagcaaaatacaaatgtcaacaaacaattacagttttaatttacatttattttatgtttccatctgctcgctggtttcttttttcttagactgctccttcagccgctgcagcatgttataggagactaggtcgagtttcaggtgctgcacactgagcgcactgccgtcccaatcgcgcagcattttcagcttgagtggatcgcagaggttcatcagctccagaccgccagtgcggaattcgttgcgctccttctccagcgtcatggtgatcacatccttgcgggcggcatgctgattggcccgatgtttgccaatcgactgctttaggttaatctgctccagctcctcgtcgaatcgcgtaaaatagagctcaatcagatcctccagctcctgcggcctcagcggttcagtgcgtccctcatcgatttggccgagaaaccagctcaacttctcgccagtgatgttgcttttgatggcatgacccaaacggaccttgtgcttgttgttttggcgacgtgccttcttg

SEQ ID NO: 19412 - DNA, 488 bp, DROSOPHILA
accgaattgtggtgaaatatccgtctcgaaccgcttttgaccgatacccgattgaagaatgggcaacagtgcatctcaaggagttgcagctccaagtgtttcggcggcccacccgttgaccaccgcatccgcagccaccgcatccacaaccaccgcatccgcagccaccgcatccggcgagaagcccaagtgcaaggcctgttgcgcctgcccggagaccaagagggcacgtgacgcctgcattgtggagaacggcgaggagaattgcttggcgctgatagaggcgcacaagaagtgcatgcgcgatgccggcttcaatatctagatataccgacacatcctgggatgaggacaccaggattataggataacactagtcctgcacacactccccccagtgccactcctcggatccccagccccttcaactgtttgtttttgttgcatctcaagctaattatagaactaaattaattaaaaaaaaaaaa

SEQ ID NO: 19413 - protein, 88 aa, DROSOPHILA
MGNSASQGVAAPSVSAAHPLTTASAATASTTTASAATASGEKPKCKACCACPETKRARDACIVENGEENCLALIEAHKKCMRDAGFNI

SEQ ID NO: 19414 - DNA, 6016 bp, DROSOPHILA
tactgcacgggggataaacgattgaggataaaagattgtgatcggcatggggatctcacctggctgtggaactcctccgctgcatatcctcactctgcacttagttgtggatgcagcagaggtgtctccagccacttggaaactttaatcaagctgcacaatataaaatgtttaatttaaaatttgtaatttttgatatctagttgccaaggagtttgctgataatacatctgtttttctccgatatttagtttcattctgcaatccaaatcgttcgtacctttccgatttgaaccccactctttccacaatgttttccgatcccgcccaggagtcggttgccacgcagacggaggcacaaccggttccgtcgcccatctgcaccccactgctgatggtggacgaggatggacgaaagcggtactgctaccatggtggaaaatgcaagtgtgccacttgcgcacaaattcgtgcagagcaggcagtgaaactcgaccaggagctgctgtcctacataccgcactcgaagctccacctggaagttccaatccgaatggccaagccgaagcagtatcgcctggaagctcgacgggctactcccgaactggcaaaatttctgcgggaggatcacgagaggctgagggcggagtatccatcgtactatctcccggatcgatactttggtaagaaattctacgagttgccaggaccgcagcacaaggagacccagacggacattccgattgggcgttacggcatcgatggttgtccctgtaccaataaatcgctctgctatgacttgtaatcctgggcaggactcaattggggaaaaaagagtttaataaaagttcggaatgtgagaagtatttgcatgtttttcaataaatcactatagttaatttccccgactatcacatacccattactcagctagtaggtgtgcaaattaaatttaatgtaaataaattgattatcacttatgataatagttatgatactcctatttcttgggtaatttggaatagaaatcctccaggaaatcctttaatatcaacttgaacttttcgccgtgcttggccaatagcaacttggcctcactgtcctcattgtccagcatctcatccgcttcctccagcacctgaaggtaatgcagccaagccgtttccaatcccataacctgctcaaatgtttcctcgctaagcttcacctggtatttgtgcagcagaacgaagagttccagcatcggagtaaatgcggactgcttcactggcacatccttcaggagtttttcaaagagctgtttggcagccaccgtttcacggatggtacgaggaaccttcatcacattacgctcgttgcgtcgcatatatcggtaaacagctaaaattacataaaatatagattagatcctagttcaatgtcttagctacataacttctcagaattataagtatgttgttaagaggtacatacctcccatcaaattgctaccatgatccagcagcattttaatatttagagcctgccacttctcgatccaatccagcatagtgctcttcagtgcattctgattgatcaggataaagtaaacgttagtgatggcatcctcgaagatgacatcgtccgccagggcactgtagtgttcaattccgccttcaaagacgccagccgttcgagacttagacataaggcgttgccggaattcctcctctgtcgtttgccaaagaacacgattcttattccactccgattcgtacttagctagttcctcccgctgaatgccaatctccgcttgaatgcttctcatcaattcagagcattcctgatcctcccgaaaaacgctagcgaatccctggcgttgctgcttctttgggagctttagtttataacccaatcgcggaaactgatccaacatgctgcgtatactgtccacgattccattgatcatatctccaatggcatccatgtcgggagtaaagacaatccgaccatctttcacatccgattcgacgacaataatgggagcggatgccatatccgcatcgcaatgaagggcctcatagagtttgtttaatgatccacgagcactggtcatcaaggagctggctagcatgtcatccatatcgttcacataagcaatccattccgcagacatctggcatataactaaattgtgtcacaaaaaagattttcaattttattataattaataaactcacttcgtcatccaccgattgaaattgcccactaaaggctgacagtagctccactacatgactgtagtagctccttaagatgtcaccggaggaactcagcctgctggacaactgctgttggaacacagatatatccacggagccggaaaatgcaaaatgcagcagacaagtgccgcagatcttctcacaaatcctggccacgccgcgattagcgcgcttgaatataagaactaactcctggaactcagcgataaactctgttccatcttcaaaaaattcctcgttgaactcggagccataggtgatcttaaataccccaggagcaagctggcggtcacacgcttggatcagaggacgaaagagtttccgttccctatcgctcaaaacagccagaatgcgattgtgacttaaggccagtttgattataccattatataacgatcttatagtatcgtatctttcgtaaagttttttcattgtgctgggaatggcgaagcccattcgctcaaaatgctgggcttgctcacacagttccagaacggaggcatcgatattgcactccaaaagtcccttgaatttcttacttcgcacgactagataacgatccaaacgctggcaaagatctcccgaaaagccacagcacttggccacccagtcatcgtatgcaagtcgaatttccttttggaattcgtgacgcagtgcatcgaatttggccaaagccggagatgattccttaacagccggcaaccattcggagttcttcaaccgatctcttagccatgtcaggcgttcaagattaatccgatagccgagagctatggatacgtgttttgataaccaggattctcggctttgctcctctaacaattttctcgacgtagcatccatttccttggagaacatcctccacagcttgcttgtttcctttaagtatgtttttctcagtgttcccctctggcgataggagtagaatagcatggcctgcagagcctccaacatttcctcaacattggacacttgctggaatacattgaagatcagcctctggacagtctcctccagtttctgcatatttttgcgaaagccagccacatctgcataccaatccgcgcgatggacattcaggatatatgcctgcgagttttgctgtagcttgttcaaggtgtccagaaactgcacctccacactttccgcaatcttctccagctcctcgccacaggttccgccaaatacgggtttgggtatgcttccgttttcatccagtcggccaaacacaatcatggactcacaaatgtcaatcacatcattcagacgttccacaaaggcgtcgatgtggttaaagattagtccctcatccagctcccacggcatttgtgtgtgtttctgggcaagatctctggaaattgtatcatagattcccctataagtcaggcagcactcaatagccacgttgcatatcctaatgccgaaacgcggtttgcccgagaggatctcctccactttggtttgctttgtgcagaatctgtaaggagcaataatgttgtatatattatccacttgtgtgattcatgtaatactcaccttatgatctgattactcaaattccgaaacaatgcagcaattagcctagttgtattgtagtattccgaattcagccaaatgaaacgtatgaggtggataatgcgaggtaaaagtttcgtcaaatccgccgggcttgtggccgcatcgattttggagcagggctcaatgagcagatgaaggtacttaatattcgacagagatttatgaagctcctttctggccctctcaataagtccatccatttgtggcatgtgcacggattgggcattgtgcaagagtaacaaaaccttctgaacatccgaatgagccaattgatcattgattccttgaaggacttcatctaaataggagaacaccatcttcaatttatatatactttacaggcgcaacagttacaaacttacagcgatattcccagaactcaaactcatcccgaacggtgaccagatcatgtggaaccgtcaaagtatcgtctgccagcaaagttcgaatctgtgtggtccagtagagagcgatgccctccaggctgccgaccaagtatctatcaacgggcccagccgtcaactccttgatgacaaaggggacgtacatcacggacatcccagagatttgatggtgcattccgctgagaaatgccaggaatctgtccatgctggaacagaaacggttacgcaccgtggcattccattcgagatagttccggaagaaggggacgtacaagcgatcgagtagctccatcaagcagccatccacatcgcttgtcaaggtgccgaagttaatctcatcgtgaaatccctccacgctaaaaatctcattcggttcgcggcgaaagtaactcagatccgagacacacatggagggcatgcccaagcaggcggctagggcatccctgtcgtagtaaatggttagcaggggctcgtgaacctccagtagccagccgcggatgatgtccagagttccctcctgccagtccctgtgatccaagcagctcaacacactcatccgctgaatgtagcccaccagttggttcagttcctcgtcgctatacgatggctttggggtctccggacggatctcctcctgacgaggttccacgctgcgctctgggttccaggattaaaagaagttctaggggaaatagtgacacaaactcaccctcatcgtcggttaaatcggaatccgttagatgctcatcttctacagcgctggaggaggccatttcaccgagtttttactcaccaaaattacagaaaacttaacaaaaatccatggcaaccggaagccggcctttccgttacttttagttcgcgctaaacaagtgcttcattttctaagtgcatttccggtgggcttttcaaaaacataatgactattgcagtttaaaaatacatttacaatgattcttttttgtcttaaaaatgtttattctaaaaatgtagaaatgtaaaaactcttctacatcattttacatagccactattatctaatgtcgaactaaaagtatgaaatggaatcttaagcgatttttagggtagcaagccttggtcacaccaatctgcccgaaaacggcgctttatttaaaaacaagagagaattctatagttaagtgcatcgactatcagatacccgttactcagctgaaaaatagcaataaaaatttcattcttttacactaatttaggaactcggacttaggaataggatctcaaaatatttgtgtatacagttgtgggggcaatttgtgtcacttgcttacttagcagatacattcctaggattcatctttaaaataatgctaagatgcccgaaagtgactcagtcgatgctggccaggatcagcgtccgccacttcgcagacgagatccacggcagtgtgcgagcggcctacgcaaaaggagacgctcgagctgatccggtcaatgtgctgcccaagtccaagtacggtggaatcaatacggtctctctggtcacgggcaccaccatcattggccagcagggagcccaattcgtgtcatccctgctttcgagcagccgcgtccctgtggaggtccaagtcatcgaagctggccaagatgacgagtacttccactcggtgctccggaacagaaccgccgttcatgtggacaatcaggcggacgcggaagccaagcagaaggcgctcaagatctgcaatgatctggacttgtacgtcttcaagacccggacacgcagctttcccg

SEQ ID NO: 19415 - DNA, 3684 bp, DROSOPHILA
atggcctcctccagcgctgtagaagatgagcatctaacggattccgatttaaccgacgatgaggagcgcagcgtggaacctcgtcaggaggagatccgtccggagaccccaaagccatcgtatagcgacgaggaactgaaccaactggtgggctacattcagcggatgagtgtgttgagctgcttggatcacagggactggcaggagggaactctggacatcatccgcggctggctactggaggttcacgagcccctgctaaccatttactacgacagggatgccctagccgcctgcttgggcatgccctccatgtgtgtctcggatctgagttactttcgccgcgaaccgaatgagatttttagcgtggagggatttcacgatgagattaacttcggcaccttgacaagcgatgtggatggctgcttgatggagctactcgatcgcttgtacgtccccttcttccggaactatctcgaatggaatgccacggtgcgtaaccgtttctgttccagcatggacagattcctggcatttctcagcggaatgcaccatcaaatctctgggatgtccgtgatgtacgtcccctttgtcatcaaggagttgacggctgggcccgttgatagatacttggtcggcagcctggagggcatcgctctctactggaccacacagattcgaactttgctggcagacgatactttgacggttccacatgatctggtcaccgttcgggatgagtttgagttctgggaatatcgctatgaagtccttcaaggaatcaatgatcaattggctcattcggatgttcagaaggttttgttactcttgcacaatgcccaatccgtgcacatgccacaaatggatggacttattgagagggccagaaaggagcttcataaatctctgtcgaatattaagtaccttcatctgctcattgagccctgctccaaaatcgatgcggccacaagcccggcggatttgacgaaacttttacctcgcattatccacctcatacgtttcatttggctgaattcggaatactacaatacaactaggctaattgctgcattgtttcggaatttgagtaatcagatcataagattctgcacaaagcaaaccaaagtggaggagatcctctcgggcaaaccgcgtttcggcattaggatatgcaacgtggctattgagtgctgcctgacttataggggaatctatgatacaatttccagagatcttgcccagaaacacacacaaatgccgtgggagctggatgagggactaatctttaaccacatcgacgcctttgtggaacgtctgaatgatgtgattgacatttgtgagtccatgattgtgtttggccgactggatgaaaacggaagcatacccaaacccgtatttggcggaacctgtggcgaggagctggagaagattgcggaaagtgtggaggtgcagtttctggacaccttgaacaagctacagcaaaactcgcaggcatatatcctgaatgtccatcgcgcggattggtatgcagatgtggctggctttcgcaaaaatatgcagaaactggaggagactgtccagaggctgatcttcaatgtattccagcaagtgtccaatgttgaggaaatgttggaggctctgcaggccatgctattctactcctatcgccagaggggaacactgagaaaaacatacttaaaggaaacaagcaagctgtggaggatgttctccaaggaaatggatgctacgtcgagaaaattgttagaggagcaaagccgagaatcctggttatcaaaacacgtatccatagctctcggctatcggattaatcttgaacgcctgacatggctaagagatcggttgaagaactccgaatggttgccggctgttaaggaatcatctccggctttggccaaattcgatgcactgcgtcacgaattccaaaaggaaattcgacttgcatacgatgactgggtggccaagtgctgtggcttttcgggagatctttgccagcgtttggatcgttatctagtcgtgcgaagtaagaaattcaagggacttttggagtgcaatatcgatgcctccgttctggaactgtgtgagcaagcccagcattttgagcgaatgggcttcgccattcccagcacaatgaaaaaactttacgaaagatacgatactataagatcgttatataatggtataatcaaactggccttaagtcacaatcgcattctggctgttttgagcgatagggaacggaaactctttcgtcctctgatccaagcgtgtgaccgccagcttgctcctggggtatttaagatcacctatggctccgagttcaacgaggaattttttgaagatggaacagagtttatcgctgagttccaggagttagttcttatattcaagcgcgctaatcgcggcgtggccaggatttgtgagaagatctgcggcacttgtctgctgcattttgcattttccggctccgtggatatatctgtgttccaacagcagttgtccagcaggctgagttcctccggtgacatcttaaggagctactacagtcatgtagtggagctactgtcagcctttagtgggcaatttcaatcggtggatgacgaaatgtctgcggaatggattgcttatgtgaacgatatggatgacatgctagccagctccttgatgaccagtgctcgtggatcattaaacaaactctatgaggcccttcattgcgatgcggatatggcatccgctcccattattgtcgtcgaatcggatgtgaaagatggtcggattgtctttactcccgacatggatgccattggagatatgatcaatggaatcgtggacagtatacgcagcatgttggatcagtttccgcgattgggttataaactaaagctcccaaagaagcagcaacgccagggattcgctagcgtttttcgggaggatcaggaatgctctgaattgatgagaagcattcaagcggagattggcattcagcgggaggaactagctaagtacgaatcggagtggaataagaatcgtgttctttggcaaacgacagaggaggaattccggcaacgccttatgtctaagtctcgaacggctggcgtctttgaaggcggaattgaacactacagtgccctggcggacgatgtcatcttcgaggatgccatcactaacgtttactttatcctgatcaatcagaatgcactgaagagcactatgctggattggatcgagaagtggcaggctctaaatattaaaatgctgctggatcatggtagcaatttgatgggagctgtttaccgatatatgcgacgcaacgagcgtaatgtgatgaaggttcctcgtaccatccgtgaaacggtggctgccaaacagctctttgaaaaactcctgaaggatgtgccagtgaagcagtccgcatttactccgatgctggaactcttcgttctgctgcacaaataccaggtgaagcttagcgaggaaacatttgagcaggttatgggattggaaacggcttggctgcattaccttcaggtgctggaggaagcggatgagatgctggacaatgaggacagtgaggccaagttgctattggccaagcacggcgaaaagttcaagttgatattaaaggatttcctggaggatttctattccaaattacccaagaaatag

SEQ ID NO: 19416 - protein, 1227 aa, DROSOPHILA
MASSSAVEDEHLTDSDLTDDEERSVEPRQEEIRPETPKPSYSDEELNQLVGYIQRMSVLSCLDHRDWQEGTLDIIRGWLLEVHEPLLTIYYDRDALAACLGMPSMCVSDLSYFRREPNEIFSVEGFHDEINFGTLTSDVDGCLMELLDRLYVPFFRNYLEWNATVRNRFCSSMDRFLAFLSGMHHQISGMSVMYVPFVIKELTAGPVDRYLVGSLEGIALYWTTQIRTLLADDTLTVPHDLVTVRDEFEFWEYRYEVLQGINDQLAHSDVQKVLLLLHNAQSVHMPQMDGLIERARKELHKSLSNIKYLHLLIEPCSKIDAATSPADLTKLLPRIIHLIRFIWLNSEYYNTTRLIAALFRNLSNQIIRFCTKQTKVEEILSGKPRFGIRICNVAIECCLTYRGIYDTISRDLAQKHTQMPWELDEGLIFNHIDAFVERLNDVIDICESMIVFGRLDENGSIPKPVFGGTCGEELEKIAESVEVQFLDTLNKLQQNSQAYILNVHRADWYADVAGFRKNMQKLEETVQRLIFNVFQQVSNVEEMLEALQAMLFYSYRQRGTLRKTYLKETSKLWRMFSKEMDATSRKLLEEQSRESWLSKHVSIALGYRINLERLTWLRDRLKNSEWLPAVKESSPALAKFDALRHEFQKEIRLAYDDWVAKCCGFSGDLCQRLDRYLVVRSKKFKGLLECNIDASVLELCEQAQHFERMGFAIPSTMKKLYERYDTIRSLYNGIIKLALSHNRILAVLSDRERKLFRPLIQACDRQLAPGVFKITYGSEFNEEFFEDGTEFIAEFQELVLIFKRANRGVARICEKICGTCLLHFAFSGSVDISVFQQQLSSRLSSSGDILRSYYSHVVELLSAFSGQFQSVDDEMSAEWIAYVNDMDDMLASSLMTSARGSLNKLYEALHCDADMASAPIIVVESDVKDGRIVFTPDMDAIGDMINGIVDSIRSMLDQFPRLGYKLKLPKKQQRQGFASVFREDQECSELMRSIQAEIGIQREELAKYESEWNKNRVLWQTTEEEFRQRLMSKSRTAGVFEGGIEHYSALADDVIFEDAITNVYFILINQNALKSTMLDWIEKWQALNIKMLLDHGSNLMGAVYRYMRRNERNVMKVPRTIRETVAAKQLFEKLLKDVPVKQSAFTPMLELFVLLHKYQVKLSEETFEQVMGLETAWLHYLQVLEEADEMLDNEDSEAKLLLAKHGEKFKLILKDFLEDFYSKLPKK

SEQ ID NO: 19417 - DNA, 3008 bp, DROSOPHILA
taaccgcgttgttctggtatattgcactggtaatcggagttttattcacttgaaaatcgtatcactgaataaaaaccaatgcagacaccaattttgaacggacctggccaaaaggggttcgaatcgtaaccaaaatacacttccatgtgcgaagttgaagtgaattcaaaccgaagtagccgatgttagtaacaataaatagattatttgtattaatgctatattctatgaaaattgtatatacattatgaagatacttaggagggagcaagctttataacatactttctttgtaatatgttcatcttgaattcgttactaatcaaaagagttcctataataatagagcatttggattcatacttaaacatattcaattgcttcgatttcagctgattcctgcaaatttcgaccagcgttttcttttggcatggtggacagttcaacaaactcctcaggtttctttcgattttggattgatcagcactttcgtaaagtgtgcgaaacatatgacacacaagtgtttgctggttgggttgcccgacattagccaaatcggtcagtcggtcagcgagtgttagattgtcgggagtgaggggcacttcatagtaactgacctgacccacttgtaagacaacgcgggagtggcctccagtaccccgggatgactaatgaacccttatgaatgtggggtgtgtattccgtggtctttaaactaagtcacttctgtttcaccatccgactgggtacttcaatcaaaggaccatacttgagttttaagtactcgtatcctgggatagcattccttgtatgtatatagatggatattatatatactaaagagaaactagtccaatcgcagacaccacctgttggtatgtcgtctatttatagtaacacttaaattgtagctacctaaacacatttcaaacaattctaaacaaacaattccaaacatacaattccacttaccacttaccgaccaaattacgagtttacaatggacaaagctgaacgcgactactggcatcttcgatccttggaaatcgaagaggagccgcgatttccgccaacaaacgtcgctgatccactaaccgcacgcaatctgttccagctctacgtcaacaccttcattggagccaatctggccgagtcgtgtgtcttcccattggacgtggccaagacccggatgcaggtagatggcgagcaggccaagaagacgggtaaagcgatgccaactttccgggcaactcttaccaacatgatccgagtggagggattcaagtcgctctacgccggcttctcggcaatggtgacccgaaactttatcttcaactcgttacgtgttgttctctacgacgttttccggcgcccttttctctaccagaacgagcggaacgaggaagtgctcaagatctacatggcgctgggatgcagcttcaccgcaggctgcattgcccaggcactggccaatccctttgacatcgtcaaggtgcgaatgcagacggaaggacgccgccgccagctgggctatgatgtgcgggtgaacagcatggtgcaggccttcgtggacatctaccgccgtggcggactgcccagtatgtggaagggtgtagggcccagctgcatgcgtgcctgcctgatgacgaccggcgatgtgggcagctacgatatcagtaagcgcaccttcaagcgcctgctggacttggaggaaggcctgccactgcgtttcgtgtcttccatgtgcgccggactaacggcatccgtgctcagcacgccggcggacgtgatcaagtcgcggatgatgaaccagccggtggacgagagcggcaagaatctgtactacaagaactccctcgactgcgttaggaagctggtcagggaggagggtgtcctcacgttatataagggcctaatgcccacttggtttcggctgggaccgttctcagtgctcttttggctgtccgtcgagcagctgcgtcagtgggaaggccagagtggattttaggagcaaactatcaatcttactatcgtattttgtatgtcttttaacacgcaataaaaggtgcaagtcaaaccatctattatacatattataaatataactttaatcccaatcctattcgttaatatgaaatgattttgttgtctttaattttgctttattttattttttatattccaatgcacacaacaaacactcaagatatttctcttaaatgggaaaaggcgttaacacagtctttaggccagcagaatgggacaattcggaggagaaggaaagacccaagttggagtacttggtgaccaacaagaagactccgccggttgaactctacctcacggcattcgcctccgcctgcagtgccgagattgtgggctatcccttcgatatgtgcaagacccgaatgcagatccagggcgagatcgcgagcagggtgggtcagaaggccaagtaccgaggtctgctggccactgccatgggcatcgtcagggaggagggtctgctgaagctctacggtggcatatccgccatgctgttccgccactcgctcttcagtggcatcaaaatgctgacctacgactatatgcgtgagaagatgatcgtgcccgacgaggacggcaggccgcagctatccttcctgggatcctgcatcagtggcgtcttagccggcgcaactgccagcgtactaacgaatcccaccgagctgattaagatccaaatgcaaatggagggacagcggcgtctaaggggcgagcctccacgcattcacaatgtgctccaggccctgacttccatttacagaacgggtggtgtggtgggtctctggaagggaactgttccaaacacatggcgctcggcactcgtgaccataggtgagccttaaaatcgggattggatcagtcaggttcagatatgttcaatatcaccccttccttctaaaggggacgtcagctgctatgacttttgcaaacgctttctgattgccgagttcgatctggtggat

SEQ ID NO: 19418 - DNA, 1008 bp, DROSOPHILA
atggacaaagctgaacgcgactactggcatcttcgatccttggaaatcgaagaggagccgcgatttccgccaacaaacgtcgctgatccactaaccgcacgcaatctgttccagctctacgtcaacaccttcattggagccaatctggccgagtcgtgtgtcttcccattggacgtggccaagacccggatgcaggtagatggcgagcaggccaagaagacgggtaaagcgatgccaactttccgggcaactcttaccaacatgatccgagtggagggattcaagtcgctctacgccggcttctcggcaatggtgacccgaaactttatcttcaactcgttacgtgttgttctctacgacgttttccggcgcccttttctctaccagaacgagcggaacgaggaagtgctcaagatctacatggcgctgggatgcagcttcaccgcaggctgcattgcccaggcactggccaatccctttgacatcgtcaaggtgcgaatgcagacggaaggacgccgccgccagctgggctatgatgtgcgggtgaacagcatggtgcaggccttcgtggacatctaccgccgtggcggactgcccagtatgtggaagggtgtagggcccagctgcatgcgtgcctgcctgatgacgaccggcgatgtgggcagctacgatatcagtaagcgcaccttcaagcgcctgctggacttggaggaaggcctgccactgcgtttcgtgtcttccatgtgcgccggactaacggcatccgtgctcagcacgccggcggacgtgatcaagtcgcggatgatgaaccagccggtggacgagagcggcaagaatctgtactacaagaactccctcgactgcgttaggaagctggtcagggaggagggtgtcctcacgttatataagggcctaatgcccacttggtttcggctgggaccgttctcagtgctcttttggctgtccgtcgagcagctgcgtcagtgggaaggccagagtggattttag

SEQ ID NO: 19419 - protein, 335 aa, DROSOPHILA
MDKAERDYWHLRSLEIEEEPRFPPTNVADPLTARNLFQLYVNTFIGANLAESCVFPLDVAKTRMQVDGEQAKKTGKAMPTFRATLTNMIRVEGFKSLYAGFSAMVTRNFIFNSLRVVLYDVFRRPFLYQNERNEEVLKIYMALGCSFTAGCIAQALANPFDIVKVRMQTEGRRRQLGYDVRVNSMVQAFVDIYRRGGLPSMWKGVGPSCMRACLMTTGDVGSYDISKRTFKRLLDLEEGLPLRFVSSMCAGLTASVLSTPADVIKSRMMNQPVDESGKNLYYKNSLDCVRKLVREEGVLTLYKGLMPTWFRLGPFSVLFWLSVEQLRQWEGQSGF

SEQ ID NO: 19420 - DNA, 2709 bp, DROSOPHILA
caatgcaatggtagtagcccaacttgtaaagagctctatgcaagccaatttgtacataagtaataagcgaaaatcgaaaaccaggatggaaatcaattaaagttattaaattatttggaaatcaagcctgtctctcagtccctaagatgattacccgccctcttaactaacaactaggagtgtgctcctaacgccgacgtcgcgtgcccgccactcgggaataggactcgatgcaggtcagcaggctgagcagctgttgcttcagcgtcgagggtatgtggtatccgtggataatcctccgtggcgcgttgctcgtccggatcagccagcgggcgaccagccagaggcagttttcgcgcagcgatctcatcggaaagtggatcagcacttcgctgcgtacgtcaaccagctgatccggactctgctggctcttgggtacccgcacccgaatcggctgaaagatcctctgcgagcgtacgtgcatccgttcgcccgtgtagtaatcccggaacagccagctgtgtgtggtgaacgtgttcacccgcacctcctcgaagggcttgagggtaaggtacatgttctcccgctcccgctcgcacacccagtacagatccagggtgcgataggtggtgtttgcaaacagcacgtacacctccacctttccctgatcagcgcccaccagctgctggccgtcgcggttgttctgcgctatttggagcgccatctccagcagggtgctaagccgatctgcaatggctgccaaatcaattttcgttgttttacgtttgcacaagccgtgggaattggattgaatcaaatcacaacaagctaacaacaagtatagataaaattcacttcttatcagttacggtaacatttttcctgctgcgtgtcactgcagctggccacactttcgatgaatgtcttatcgataaggggtaaatcagctgatttgcctccgcctctcgcgaaaagtaaacaaataaacaccaagaaataacaaaatatggcattttgcatagcagttattggcaaggatgtgagttttatttttcatttgaatacaattaattgcatgacaaattccccacagaacgcccccctgtacctgaccacatccgatatggagcaggaactggaattgcaatatcatgttaacgccgccttagacgtcgtggaggagaagtgcctgattggcaagggtgctccggagtccaaggagctgtacctgggactgctctactcgacagagaaccacaaaatgtacttgggtgtagttatgctggtgaatttgcaactgattggtggttgatttcattacagatacggctttgtgaccaacactcgggtgaaattcatagtggtcatcgactccagcaacgttgcccttcgggaaaacgaagttcgagcagtgggtatccaatctaactatctaaatgaaagccccaaatacctcctaccctctgtatcttccagatcttccgaaatctccacttgctctacaccgatgccatctgcaatcccttttacattcccggcgaatcgctgacttcaaagtaagcgggcttctccttaaagaatatataagttgctcttaatacgttacttttatatctgcaggaagttcgatcgcgctgtccagaaactgatgagcggcactgcctagctgtagattaatactgaacgaataataaagcgaattatttatcaaatgcatacgtctttctaggagggatgtcaaggtggcctggccaagtgcccgctccaagctagactcaagagagatacgcaccggagatacgcaaaccggtcgttggctggctagccgtagccaaatattatgctaattcgacatttttgacaaaaataattcgagaattaattatatctttacaatgtgtctgctagttgacacatagttagttaatgtctccgcgtcaaactcgtcttccgtctgtttcgggcattattatgggattcaatgcgaactttaactgaacggcaataacgaggcacacataaacatgtattttgtcttatctaatgcataattaatgaaatcaaatcctacgcgtctctagacttgaacttgggcgccaccggcagaggtaagctgagcatcagtatcatataaaaagcaggcagaagttccagttcgatatcagttagccttctcaagtctttcaacaatcaacatgaagttcttcgtaagtggctttatcgcaaattgatcctttaatgattctagctgatttgttatttacaatccttgtagattgctttcgcctgcctgttggccgtcgccctcgccaacgaagatgccaatgttctccgtgccgagcagcaagtgaatgttgacggctttgcttacgctgttgagctggacaactctgtcaatgtgcaacagaagggtgaccttaacggcgaagagtgggtggtgaagggaagccagtcgtggacatctcccgaaaatgtgccagtgtccatccaatatatcgccgatgccaacggttaccaggtggtgtctgccaaccctcctctgcccaccccaccaccaattccagaggccatccagcgttctctggagtacatcgccgcccaccccccaagtcaataaataatgttaaataaatgtgttgaactttactttcctagacttttaatttcttcccaaaaggactgtcgcttcttaaaccgagtagacaaaca

SEQ ID NO: 19421 - DNA, 466 bp, DROSOPHILA
caaaatatggcattttgcatagcagttattggcaaggataacgcccccctgtacctgaccacatccgatatggagcaggaactggaattgcaatatcatgttaacgccgccttagacgtcgtggaggagaagtgcctgattggcaagggtgctccggagtccaaggagctgtacctgggactgctctactcgacagagaaccacaaaatatacggctttgtgaccaacactcgggtgaaattcatagtggtcatcgactccagcaacgttgcccttcgggaaaacgaagttcgagcaatcttccgaaatctccacttgctctacaccgatgccatctgcaatcccttttacattcccggcgaatcgctgacttcaaagaagttcgatcgcgctgtccagaaactgatgagcggcactgcctagctgtagattaatactgaacgaataataaagcgaattatttatc

SEQ ID NO: 19422 - protein, 117 aa, DROSOPHILA
MEQELELQYHVNAALDVVEEKCLIGKGAPESKELYLGLLYSTENHKIYGFVTNTRVKFIVVIDSSNVALRENEVRAIFRNLHLLYTDAICNPFYIPGESLTSKKFDRAVQKLMSGTA

SEQ ID NO: 19423 - DNA, 2476 bp, DROSOPHILA
cgtcgtggaggagaagtgcctgattggcaagggtgctccggagtccaaggagctgtacctgggactgctctactcgacagagaaccacaaaatgtacttgggtgtagttatgctggtgaatttgcaactgattggtggttgatttcattacagatacggctttgtgaccaacactcgggtgaaattcatagtggtcatcgactccagcaacgttgcccttcgggaaaacgaagttcgagcagtgggtatccaatctaactatctaaatgaaagccccaaatacctcctaccctctgtatcttccagatcttccgaaatctccacttgctctacaccgatgccatctgcaatcccttttacattcccggcgaatcgctgacttcaaagtaagcgggcttctccttaaagaatatataagttgctcttaatacgttacttttatatctgcaggaagttcgatcgcgctgtccagaaactgatgagcggcactgcctagctgtagattaatactgaacgaataataaagcgaattatttatcaaatgcatacgtctttctaggagggatgtcaaggtggcctggccaagtgcccgctccaagctagactcaagagagatacgcaccggagatacgcaaaccggtcgttggctggctagccgtagccaaatattatgctaattcgacatttttgacaaaaataattcgagaattaattatatctttacaatgtgtctgctagttgacacatagttagttaatgtctccgcgtcaaactcgtcttccgtctgtttcgggcattattatgggattcaatgcgaactttaactgaacggcaataacgaggcacacataaacatgtattttgtcttatctaatgcataattaatgaaatcaaatcctacgcgtctctagacttgaacttgggcgccaccggcagaggtaagctgagcatcagtatcatataaaaagcaggcagaagttccagttcgatatcagttagccttctcaagtctttcaacaatcaacatgaagttcttcgtaagtggctttatcgcaaattgatcctttaatgattctagctgatttgttatttacaatccttgtagattgctttcgcctgcctgttggccgtcgccctcgccaacgaagatgccaatgttctccgtgccgagcagcaagtgaatgttgacggctttgcttacgctgttgagctggacaactctgtcaatgtgcaacagaagggtgaccttaacggcgaagagtgggtggtgaagggaagccagtcgtggacatctcccgaaaatgtgccagtgtccatccaatatatcgccgatgccaacggttaccaggtggtgtctgccaaccctcctctgcccaccccaccaccaattccagaggccatccagcgttctctggagtacatcgccgcccaccccccaagtcaataaataatgttaaataaatgtgttgaactttactttcctagacttttaatttcttcccaaaaggactgtcgcttcttaaaccgagtagacaaacatatatacgcatcgtattagcggacagaaacttgttggtcagggtctaccagacggatgaattatattagtacgtaatatgtatgggtctgacagatgaacattgtacccaaacgccatgctgcccctgaactcggggtcgttcagttttcactttcgatttaggatcacttaggagctgttactttaggatcactgttacgtaatcacgttttttaccggtttttaaaccatatccatatacaccggacctggttttgcggttttgaaatagaagtagactagttcccattgcatatttcagaataagaaattccatatattagactttattctatgcagatcatatcaaaataatgaaaaggggtatagttattttttttctgtttgaagacatttagcaatccctatctagtcacgtgatcgcgatgggataatcaggctctttgttgtcataatttgcgatgcaaatgttaggcttttggtctttgaaagtgatgcgaccgtttaagttgtgcgatgcagattatgccactgcaattatgacgtcgacgggtaaagtgaatgccatcgtaaattacgtggtgcaaccaggggcagaagtagcagtatccgaggtaactgaagtgcccgatccgccaacgatcaaggctaaccatcgtcggctctcaaatgtcaaaataacattgaaaagcctgcgcgctccggttaccgatttgccgccaaatcggcattctgattctgattcggattcggattctgggtcgttggggctaatcgttctggaagcacaacatggaaaacccgacagatggctagcgttaaaaacacatctcaacgatgatggattgagatggcgagagggcgatgtcaatatgccaccgaggctgtcggggatcagatcggaaaacactgccggaaaataataaaatctctgac

SEQ ID NO: 19424 - DNA, 408 bp, DROSOPHILA
cttctcaagtctttcaacaatcaacatgaagttcttcattgctttcgcctgcctgttggccgtcgccctcgccaacgaagatgccaatgttctccgtgccgagcagcaagtgaatgttgacggctttgcttacgctgttgagctggacaactctgtcaatgtgcaacagaagggtgaccttaacggcgaagagtgggtggtgaagggaagccagtcgtggacatctcccgaaaatgtgccagtgtccatccaatatatcgccgatgccaacggttaccaggtggtgtctgccaaccctcctctgcccaccccaccaccaattccagaggccatccagcgttctctggagtacatcgccgcccaccccccaagtcaataaataatgttaaataaatgtgttgaacttta

SEQ ID NO: 19425 - protein, 117 aa, DROSOPHILA
MKFFIAFACLLAVALANEDANVLRAEQQVNVDGFAYAVELDNSVNVQQKGDLNGEEWVVKGSQSWTSPENVPVSIQYIADANGYQVVSANPPLPTPPPIPEAIQRSLEYIAAHPPSQ

SEQ ID NO: 19426 - DNA, 5789 bp, DROSOPHILA
gttggccaagtagcgcgtacatgtgtgggttttcgccatttaaggcgtgcacccagcacgaaagtcgctttgtacgcaatttacccaaagtgttggtcggttttcgatttttgtcgaaccaccccacgttcagtaagtctagagaaatctctttctaaacggatttccaggaaacccacggcactcacactgttcacacgctgcggtaaaaattcagagtgaccgtcgacaagcggtagtactggaacacaagtcgctgttcgctcgaaacaatcgatgtgtgccaaaattcgatcacgatattcctcgcaatcgattgtattcgctatttgccttcgtaagtcccggttagaccagcggcatgaaaagtttaaattcacttccacattcgagtactatgagataagattactgtacttaaactcaaaaagattcaaaacaacactgatcgttaagctactaagacaaatagctggccggttccagtcccacgatttaaaaacagttcactgaatagcagcatatgtaaaattccatactttcatatatttgtataatatgattcacataaggttgttgttcaaatggttgaatactacaattaagtctttacaacaagagaatgtaatctgttggaaaacaatattacaatcaaatttattaaacaaatataagattcgggtttaaatatttatactggtggaaaactttgatgggcgtaatatcgatagcaaataaaatagcgaagtcaggcaccccagctctgggtctgcagccctgaacttcaagtggcacctccaaaataacgtaaaaaagtgcaaaataatacaaattgaattcaaaatatttgcattattttatgctttgtttttctttaccatacacactgcgaagccgcagcgaaattgccggatatccgctaacatctggcgatagttggcgatcgatctatcgatagtcgctaatgttttcttacatcactaaaacttttgcaagatggagcctcttttgcttggttttaacaaatcagtagcagcacgtgtataaaaagtgccaaataattttcagaaaatgttagtatataccctagattaagcgtttgaaatgtaaaaagccgcaaggcgatcttgtgccgcatcgattccgcaactgcttagcataatttccgcgtgttttaatgcaaaaaacgcgattttaaatttctgacggtcaaaatgagtggaaaaaaattacacgcccgtatgacagtgcagggagtgggagtgagaggcagccaccatgcgagcgagagagagcgagcgcagtggttgctccaagagagttttgttgctggactcggtctttgcacccctcccccttcgccttggcgaaacctagaactccgaactggggacttttgttgaagtccggtgacgtcggtgtcgccacttgactggattttatgcactctcgtccgtccgttcgcttgactcatgactggacaatgacgcagaccgctgattctatctttagtggacgacggcattcgtgggctgatttagccttgctccaactcaattttcgatttgctttggaatatttgcctgtcagtcggttttttttttctatccccaccccgccgtactgtcaaaactactgctattttcgatcaactactaccattcgcaactggtgttaggcaacactggcgccactgttacgtgctaatatcgctcggctgctctcgcccgttgacattgacacgaacgacactagggtcgtcccgctcgcacacgctcaggggcggactctcgccgcttgtcgctcaaaaaggctgcctagctatcgctttcggtctcatacgtaaagtcaccgcttcgcagagcgcatcgcagcacaaacgtaacggactaaaagcaaagcgctcgatagctcgagaaaacaacacagtcggcgttcggcccgaattctccgttattcgttctagacaaataggcaaacagttgattgagtgaaccgggcccaagccgtcgaaattcaggatataagtttacctagtcaattctttattgttgataatgtgagtggttgccaagcggcgctcgcggttttcgattctccctccaccagccttacttacttttcgcttttctgccattcgccataaccaacaattgtggctggaaaattttttacccccgtcccgctactgcttttgttgttgtttccactgttccgccccactaacgcattctcgctttcttgcagggatgaccgaaatgagatacctcaggatggccccgccagcatggaacccgagggcgtcatcgagtccacctggcacgaggtgtacgacaacttcgatgacatgaacttgcgcgaggagttgctgcgcggcatctacggttatggtttcgagaagccgtcggccatccagcagcgcgccatcattccctgtgtgaggggtcgcgatgtcattgcccaggcccagtcgggtgagtaaatggctccgagtcccccatcatcatcttcaccatcatccccctcgatcagtcacaaagaaaaactttcgagaatgtgcaaaatcggcgaaaaaacagcacgatgactcagccgctgcgcctgtatttctttgttgaaattccgctttgcagcactctctttcttctccttatactctctctcttccgtccgctctcttcgattgtcggcgtcgttgcgcttgcgcgccacttttcgctgaccagctgcgtttcggtttctcggccgccaggccagaagaaagttcccagaaagaaggtcgctcttcgagcgctcttggcgaattccagctgctatgcgtttttaaggtcatctgttccaaatgcgatctacctacattgctcattcggcactaatccattttgcaggctctgcaaaagaggctctatatacatattaatatagttcattctcaactcctgttttgtgttctggcacttgcacctgcctatcgatgtataggcagggattagtggccagctcgaccctgaaatggcacatcagctacctgatgaaacgatggacaactgtctttattccattgatctttccgtcattcaagtttacgcctaacagaattgcataacaaatggcgtactggttagtcgaaaattggaattttgctgaatttccataagaatatcacatagttagaaaagtaattgtgtatagtccgtagcacacactattctgcatactaaccattttacctttaatctcctccgtaggaactggcaagactgccaccttctcgattgctatccttcagcaaatcgacacgagcattcgcgagtgccaggcgctgatcctggcccccactcgcgagttggccacgcagatccagcgcgtggtgatggcgctcggcgagtacatgaaggtgcactcgcacgcctgcattggcggcactaacgtgcgcgaagacgcccgcatcttggaatccggttgccatgtggtggtgggcactcctggccgcgtctacgacatgatcaaccgcaaggtgctgcgcacccagtacatcaagctgttcgtgctggatgaggccgatgagatgttgtcccgcggtttcaaggatcagatccaggatgtcttcaagatgctgcccccagatgtgcaggtcatcctgctgtccgccaccatgccgccggatgtgctcgaagtgagccgttgcttcatgcgtgatcccgtcagcatcctggttaagaaggaggaactgacccttgagggtatcaagcagttttacgtcaacgtgaagcaggagaactggaaactgggcaccctttgcgatctgtacgatacgctgtccatcacccagtcggtaatcttctgcaacacccgtcgcaaggtaaattcactcattcttataattgtgtgaagctggattagtttcaatcgcaaagccgataagttgctaacaaaaatgtctacccattcttcaggtggaccaactgacccaggagatgtctatccacaacttcaccgtctcggccatgcacggcgacatggagcagcgtgatcgcgaggtcatcatgaaacaattccgttcgggctcgtctcgtgttctgattaccactgatttactggcgcgcggtattgatgtgcagcaggtgtcgttggtcatcaactatgatctgccctcgaaccgcgagaactacattcataggtaagtgctcaccacctcgcccctgaatctactcagctatgtgctatactaaacatgataccatcactttcaatctatttcagaattggtcgcggtggtcgtttcggtcgcaagggtgttgcgatcaactttattacagatgatgatcgacgaatccttaaggatattgaacagttctaccacacaacaattgaggaaatgcctgctaatattgccgatttgatttaaattttttctgctgagccgcaaaacaactaagaaagaattctaaacaaaaagtgagtgagcaaaacagcaaacaagaactgcgaaatcgataaccgagcgcaactataaattattcaaagatcaacaagtcaagttaaatatttattattcaaatattaattcgaaaaggcagccgaccgaccacccaaaaaaaggactaaaccaggacagagcagcaacatcttcagcagcggcgcagcagcagtaacatcagcagcagcggaagcggcagcaacaccaccaccaattgccgattagccggaacccctctgtatccatttagttctctgtgtatcatcaattttaaaactgcgttgtcaaccagcaacaacaaatatatacaaatatataaaaaaaaaaaaacaaaacttaaaacaacatttgcatctatctaaaaaaagtaatatctgaaaccaggtacaagataccacttgctaagaagagcgaggaactaaacgcaaaagccacaatatcagaacacctttttgccgcacctttgttttagctttttctagaactattgataaaaatatattaaaacaaaacaaaatacatatgtacacattatgtttaaatataccactcctaaaaaacagctgacaaccgaagcaacattttacgctaaacacgaacacacagcgaatccacccagatctataaatgtattaacatatagctatatatctttcggggtatggccaaaaaatatatggttgccgctattgggtgtatagcatgagttgatatagctgtggatatatacaattgggtggtattgtagattatgtttaacaaagcggaagtaaattccttatctcaaaacagtagaacgaaaatggctgtttttgaaaagtttttatgtatctgttacgtacgggttgggttaacctcatattaacccaaacctttttagccaatttcataagctttcgctttaaaaccagctctctaagcaagatgagttccaaaagttaaactaattttttaaaactttcaacaccactccactgcatatacttttaaaacgaaagcgcagtgggtaagttgcatttcgttaagccttcacatcaacttatcggttgaaattctgataacaagctatcgataatctatcgattcgactcgcagccctatcacgtcaggtcatattaatttttcaatccgcccagttggatgtttggacagtttccttcctcgcgccggtcgataatgttggccaactaacaccgacctgtagcacgtcacccgtaataacccataaccgcaaccagtccaagcatccaagatgggacagaaagtttcgcgcaccgacttcgagtgggtgtacacggaggagccgcac

SEQ ID NO: 19427 - DNA, 1664 bp, DROSOPHILA
agcctcttttgcttggttttaacaaatcagtagcagcacgtgtataaaaagtgccaaataattttcagaaaatggatgaccgaaatgagatacctcaggatggccccgccagcatggaacccgagggcgtcatcgagtccacctggcacgaggtgtacgacaacttcgatgacatgaacttgcgcgaggagttgctgcgcggcatctacggttatggtttcgagaagccgtcggccatccagcagcgcgccatcattccctgtgtgaggggtcgcgatgtcattgcccaggcccagtcgggaactggcaagactgccaccttctcgattgctatccttcagcaaatcgacacgagcattcgcgagtgccaggcgctgatcctggcccccactcgcgagttggccacgcagatccagcgcgtggtgatggcgctcggcgagtacatgaaggtgcactcgcacgcctgcattggcggcactaacgtgcgcgaagacgcccgcatcttggaatccggttgccatgtggtggtgggcactcctggccgcgtctacgacatgatcaaccgcaaggtgctgcgcacccagtacatcaagctgttcgtgctggatgaggccgatgagatgttgtcccgcggtttcaaggatcagatccaggatgtcttcaagatgctgcccccagatgtgcaggtcatcctgctgtccgccaccatgccgccggatgtgctcgaagtgagccgttgcttcatgcgtgatcccgtcagcatcctggttaagaaggaggaactgacccttgagggtatcaagcagttttacgtcaacgtgaagcaggagaactggaaactgggcaccctttgcgatctgtacgatacgctgtccatcacccagtcggtaatcttctgcaacacccgtcgcaaggtggaccaactgacccaggagatgtctatccacaacttcaccgtctcggccatgcacggcgacatggagcagcgtgatcgcgaggtcatcatgaaacaattccgttcgggctcgtctcgtgttctgattaccactgatttactggcgcgcggtattgatgtgcagcaggtgtcgttggtcatcaactatgatctgccctcgaaccgcgagaactacattcatagaattggtcgcggtggtcgtttcggtcgcaagggtgttgcgatcaactttattacagatgatgatcgacgaatccttaaggatattgaacagttctaccacacaacaattgaggaaatgcctgctaatattgccgatttgatttaaattttttctgctgagccgcaaaacaactaagaaagaattctaaacaaaaagtgagtgagcaaaacagcaaacaagaactgcgaaatcgataaccgagcgcaactataaattattcaaagatcaacaagtcaagttaaatatttattattcaaatattaattcgaaaaggcagccgaccgaccacccaaaaaaaggactaaaccaggacagagcagcaacatcttcagcagcggcgcagcagcagtaacatcagcagcagcggaagcggcagcaacaccaccaccaattgccgattagccggaacccctctgtatccatttagttctctgtgtatcatcaattttaaaactgcgttgtcaaccagcaacaacaaatatatac

SEQ ID NO: 19428 - protein, 389 aa, DROSOPHILA
MEPEGVIESTWHEVYDNFDDMNLREELLRGIYGYGFEKPSAIQQRAIIPCVRGRDVIAQAQSGTGKTATFSIAILQQIDTSIRECQALILAPTRELATQIQRVVMALGEYMKVHSHACIGGTNVREDARILESGCHVVVGTPGRVYDMINRKVLRTQYIKLFVLDEADEMLSRGFKDQIQDVFKMLPPDVQVILLSATMPPDVLEVSRCFMRDPVSILVKKEELTLEGIKQFYVNVKQENWKLGTLCDLYDTLSITQSVIFCNTRRKVDQLTQEMSIHNFTVSAMHGDMEQRDREVIMKQFRSGSSRVLITTDLLARGIDVQQVSLVINYDLPSNRENYIHRIGRGGRFGRKGVAINFITDDDRRILKDIEQFYHTTIEEMPANIADLI

SEQ ID NO: 19429 - DNA, 2545 bp, DROSOPHILA
tgctgacgggccatgtcagcgatgccacgccgtcgattgtactgcacgatgtgcgcgaaatcgaaacctggatcctgcgactactctccacgccggttcctgtgccaggatcgaccagagttgaggtaagtggttaggatcatttgtaatacccaatacatatcacatttccttttaggttgaggtgctgtcgccgacggtgcatgaacccctgctgtttgcattgcctgaccacactcgcttctctctggtggacttcccgctccatctgccattggagctgctcggcgtggagacgtgcctgaaggtatggaccctgatcatgcaggagaacaaggtgctgttccagtcgcgcgactataacgccctctccatgtcggtaatggccttcgtcactatgctgtatccgctggagtatatgttcccggtcatcccgctgctgcccacctgcctaagttgtgcggagcagctactgttggcaccaacgccctttgtcatcggggtgcccgcctctttcctggtctacaaaaaaaacttccggtatgatgaacatcttgttattgaagaaaattttattgtaacaacagattctttttagtctaccggatgacatttgggtggtcgacttggactccaccaaattgacgccaccgactggtggctacgaagaaataccaccgctacctgagcccgagggcaccattctgaagaaccacctcaagcaggtaagcccaaaggcattatccctaaactcctgtatataaccaaaaattctgaaatcttatggatgcaatgaaaataatattttactaaattttggaaattcacccaaaactaaaatgtaaagaacgttgtgtatttagaaagaaattaaatagaaattaagaaagaattaaattagaaattatcgttcattgggagatatatattacttggataatgaaggcttatatattttttctttttcttgtttgcactatttaatttgacaaatgagaatgttgaaatttaacttggcagctcaattaatgttttccagagaagattgacagttattgagtagctcgacgcagttgtcgtagagggcggtgtccagttggcgcagctcctgctgcttgtcgatgtcgaggaagcgcttcagcttgtccacctcgttgcgcattttgaaaacgatgccaggcagcatgccctgtgcctttttgagcacttgctcctggatctgcaaacggcgctcgttggctccctcgctgcgaaagcgctcgagacgctggagttccagctcccgttcgtgatcatagtgatccttctgttgcagcaggtgctgcaacaaagcccgatagacaatcagttgctcgaggcgtggatccgagtagacgttatccgtgggacgactctggaaacgcagcgtggcattatggcgcgtatcgttggcctgcacggccgataagtgggcgatgtggcgattgtacatggcactaactgatcactacaacggataacggatgagatggtttatgaatatgtaggcaccgacattgggctagtgattcgaatggaagtcttgttatgattgaaataaaactcaagggcttctgatgttttggagtttaaactaatgataaagtgacttaatgtttggaactttttcaatacttttaaatattcataactagataaaaatataaaaagatgcttttcgaagttggtgaatttccagaatttaatgaatatgtgtgtctacttaaggcactgtcacgcggttttacatatattctataatcgttataaatactcgcggcacacaactggatatcgcttttccatgtctatttacccgatgttacctgaaaatgtatctgcttctggggagtatttaatcaaaaaggcaattactcagagcagatgcatgtgaaacggcggttactcattgtagctaacgttatcgctgtcatataatcgttatcattgctccattcaagtttggtgtgattgttttaattcaaatgatatatcttaccacattctgtggcctgtcacagagcaaatatatgaagagagcaccccagcgatattataatttgaatttgtttctatatctcattaacaaactcctctgacacttgtacaattctctatctctctctttcttttattgtgttttttttttttgtgtactcactgcctccctttctgcctatcgatgtgtgtccatctctgtctctactctaatgctatactttttacactcatgcattatctgttatatgaaatttataatactcgatcacaactttaactacaacaacaacaacaacaacaactactacaacaacaacaacaacaaatcgtatatctacaacaacaacatgggcaggctatgctattgatggatgaagctggacttggtgtaaatatcgttcgcaaaagtgttaactacgtttggtttatcgttatatttgagttgaaaccgtttgtacatactaaacataatccataattattatactagctatatgtgaatattcgtaacgataaagtacttgac

SEQ ID NO: 19430 - DNA, 545 bp, DROSOPHILA
actagcccaatgtcggtgcctacatattcataaaccatctcatccgttatccgttgtagtgatcagttagtgccatgtacaatcgccacatcgcccacttatcggccgtgcaggccaacgatacgcgccataatgccacgctgcgtttccagagtcgtcccacggataacgtctactcggatccacgcctcgagcaactgattgtctatcgggctttgttgcagcacctgctgcaacagaaggatcactatgatcacgaacgggagctggaactccagcgtctcgagcgctttcgcagcgagggagccaacgagcgccgtttgcagatccaggagcaagtgctcaaaaaggcacagggcatgctgcctggcatcgttttcaaaatgcgcaacgaggtggacaagctgaagcgcttcctcgacatcgacaagcagcaggagctgcgccaactggacaccgccctctacgacaactgcgtcgagctactcaataactgtcaatcttctctggaaaacattaattgagctgccaagttaaatttcaac

SEQ ID NO: 19431 - protein, 149 aa, DROSOPHILA
MYNRHIAHLSAVQANDTRHNATLRFQSRPTDNVYSDPRLEQLIVYRALLQHLLQQKDHYDHERELELQRLERFRSEGANERRLQIQEQVLKKAQGMLPGIVFKMRNEVDKLKRFLDIDKQQELRQLDTALYDNCVELLNNCQSSLENIN

SEQ ID NO: 19432 - DNA, 3243 bp, DROSOPHILA
atttccatgtgcgagttgtcggtgtctgtgtgtggaatgattccatcctcttaattaatgtcgattttttaattgctcgttaatttggctgagttataaaatgattttatgggcacgtcgtgattgattcataaagcgtgtcagctggaaaatgtgatcagatttgatctaattatgagggaatatctgatacttatttaaatgagcaccaattaagcgtacactgggcgaaattcaactgctgaactgatactataacatctttgtctggaattttgctgactcatttcgtatggtaatttgttaataaaagcgaaaccgaaattcaaaagccgtagaacagggtaggtttttaagtttcagcctgagtttgtagttatttaagtggctaaaatcaaagaccagtattacgtcccaaaagtataaaaagagatgtttatttaaataaggttatttaagactattttttatcgtcattaagcgtgtttaattttaacagatgttgatagcgcatttggaactggtttatcaacagcatgatttacaataattccagctgccatcgaatctgataatgattttcccgcagtgtcggctaaaaatagtcattgttaagcttagcaaaccactacaaaatcgtattgtagtgggtggatgtggttcggatcgtctgctcttggtggtgatggtggtggtggcattggtggtgctgctgctttctggtggccaggcgcagtaaattcggcaatgctcaatggttttacagtgcttttcgtattttcctttttttcactccacgaaaattagaaacacattttaagatttccacaggttcgtgtgcgcgttcacttcttttgtttatttcgcttggttttattttcgaaatgctgctgaaaaccataaattagcttgttacttttggaatgcctggcgttgtgtgtgggtgtttctggggtttctggggatctcaagagctcaatgaagaagtggggaactgattcagtcgttagcggtgatcgatctggtgaacaactagcacaggatttaaaatggataacattgtgagtgccactggattatagaaacccctaggggtaacaccttgcacttgaaagcagtgttaaggaatagagaaatgtcgtttctcatcaatttaaagatttttaccgaattacaaacgaagtaatgtatggaaattcatggaactttcttctcaggacgaagacctgacccccgagcagattgccgttctgcagaaggcattcaacagcttcgaccaccagaagaccggcagtatccccaccgaaatggtggccgatatcctccgtcttatgggtcagcccttcgacaggcagatccttgacgagctgatcgacgaggtcgatgaggacagtaagtgttcgcagcctatattgccgggtgcccaaactaatcctcgattcttctgcagaatccggtcgcctggagttcgaggagttcgtccagctggctgccaagttcatcgtagaggaggatgatgaggccatgcagaaggagctgcgcgaggctttccgtctgtacgacaagcagggcaatggctacattcccacctcctgcctgaaggagatcctcaaggaactggacgaccagctgaccgaacaggagctcgacatcatgattgaggaaatcgattccgacggctctggcaccgttgattttgatggtaagtgcgcggaccaattagccgccgtcagtcgggctataaagatcttggattccttggcgcgctgccatggtattttccacacaaattatatcaatttgttgcggtggagaacccctacccctccccactaacaccaccatcccaccaacgaggggagacgcccttgtggtgctttatttatagttctttagatctttacacagaaacaagcagatcactttgccccagattctaaggggcatttcactattcctaaaacaaaatccgtccatattttccgccttttataattgttccgattggtgtaccagtttaaaaagaaacaaatttgtattatgaggttttggtccaatttccacttgtattagtacacaaaccatattttagttatcaacaataataataattaatattattttgtatttaatttccagaattcatggagatgatgactggcgagtaagcattgtggacccaacgtatctcataattgtctaccccccaacacccgaggcttgaataaacgttttgtattttatttctacgattgagtaatcataattacgctataaataatccgctcgttcaggaaccgattgagtagaaaaacccaaagcgcggcaaacattctatggctgcagtgcatctgcatccgagttgagtcatcttaattgccaattgccaccctctggcgtgcggattattattaaatttcaatgtttgtgcaatgggctgggagtgggcgtggccgctctgctcatttgtgtgttaatttggcaaggccattcggcgtatgagtgatgcatgttgcgcatacgcaacgtggccagatgcatgcggagttctttgtttcaatctttccgctattacttgcggcagtgcgtgcacattccgtttgccacttgactggcgttctggtccgcacagctgtgaccatcccaagcagaataaggcccactgacaacctgctagatttttgcctttccaaacagccaatgtagtatatcatagctatgcatgcaggctggcaaatgtcaatgagcattctccttgttgccaaaagatgtcaagcatttacgctaaacttggccgccgcgacatgcagtgagtttgttttcccaaattcagcgaaaagaagcaactgccctttctgaaaagttagcgaaaaaaaaggagaaggggcttggggcagatcgatgtggatgggttggggtttggatgttgccaccaagtggagcaacttgttttgcgcaatgcttagtctttcggccggagggtgtcgatattagtggtatttattaccgcttcgaatccagttttcagtttttacccaatcattaggtgaaaggtcacagactggacctggacgccctgtgaaagagctgaaaatgtggcggattgtgttgggtgtcagatttattgacatccgcctgggcagacttctcaatatgcgattcttgacaccgagcgcattaaaacggtttcccaaacgtgcaattcaatggagatgaagctgaatgatgatgatgcgctcgagc

SEQ ID NO: 19433 - DNA, 592 bp, DROSOPHILA
cagtcgttagcggtgatcgatctggtgaacaactagcacaggatttaaaatggataacattgacgaagacctgacccccgagcagattgccgttctgcagaaggcattcaacagcttcgaccaccagaagaccggcagtatccccaccgaaatggtggccgatatcctccgtcttatgggtcagcccttcgacaggcagatccttgacgagctgatcgacgaggtcgatgaggacaaatccggtcgcctggagttcgaggagttcgtccagctggctgccaagttcatcgtagaggaggatgatgaggccatgcagaaggagctgcgcgaggctttccgtctgtacgacaagcagggcaatggctacattcccacctcctgcctgaaggagatcctcaaggaactggacgaccagctgaccgaacaggagctcgacatcatgattgaggaaatcgattccgacggctctggcaccgttgattttgatgaattcatggagatgatgactggcgagtaagcattgtggacccaacgtatctcataattgtctaccccccaacacccgaggcttgaataaacgttttgtatttta

SEQ ID NO: 19434 - protein, 155 aa, DROSOPHILA
MDNIDEDLTPEQIAVLQKAFNSFDHQKTGSIPTEMVADILRLMGQPFDRQILDELIDEVDEDKSGRLEFEEFVQLAAKFIVEEDDEAMQKELREAFRLYDKQGNGYIPTSCLKEILKELDDQLTEQELDIMIEEIDSDGSGTVDFDEFMEMMTGE

SEQ ID NO: 19435 - DNA, 2478 bp, DROSOPHILA
ttcttataaaaataagctaataagatttacagtcattgtgtcacgtacaaattcatgaaaatctaattatttttcggttttccataacagtgaatggcgcgtagtgacgaagcgcacctaactgtacaagagaaaaatatatgtagaaaaagttgttgaatttattttaaaatggaaataaaatctgttgtaatcctttttagactttttgtttccccaattatttctccatgtgcatgctggcagtcatacctgattccgcgggatttaaaccaactcaccgactggggagccaccaagaatcaatttattaacacgttgcccgagagcctggccgttttggcaagtggaactggaaattggaactgggcgggccaaggcaaatgccaaaatgcaacttctgccgcaatgtggtgctgctgctgccgcagcccagttgcgaaattgctggaaattattattgaattctttttgtcttgccgttgccagcatgccgtttgccataaatgttagccgcttctcaaaggcccagaggtgcccacccactgtatcaaagtttgctggctggaatttgcatgtagaagtcaagtcaggtggagcagtcgttcgttaccatttctgcacctttcgcttgccacaaattgccgcagtgccggcaattgtgacaaattttattagctgctgcacctttcgagcagagcccacgccattcgcatgtgcctatgatgctatctgcattgtgtaaacatgacagtttacctgctctccacacttcttaatcgccatttgaattgcaaatctgaggttcaacaaaccccaaaaattctgagacacaacgagccgctactttctactgacctcaattaaaaagcatctggcattgcataacttttgtctgctgattgggtggagaaatgtatctatgtatctggactatcgtctaacggattgctataaaaagcgcagaatctttcctacacgcttagtattagcataaatcatgttcgcattggtaagtagcggatggctcatgaataccctggcgttaagtgactccacatcatttttcttcatgttttttctttttttcttttgggaacttccagctattgatcttgactggctgccaactgctgtggagttgccccgctgagtgtacttccattaacgtgccggtgccaatcctcaaatcggtgaccgaacaacttagctcgggttcctacctattttcgttcgagtccgcagatggcacctatcgcgaggaactgggcatagtgagctccgattcgaagacatctgacgacgatctcgaggtgtccggtatttatcgctatatcaacgactggggccaggaggtggaggtgcgctatacggcggacaagaatggctttctgccccacgttcggtacatatccaaaggggaagcctataaaccaattcgcatagagccattagctttgatgggcatacattcttgaaaatgttagccagccaggcaattaccaaagccaatcgccaatccaggggcgaatgcccggctttggggctcaaggagcggcacacggcaaaaaatatatgcaaactagtattattataattaataaaagtcatctttaagcatccgaatttttagcgagcgagaatcacctcatcgaagaacgggtatatatataaatgatttaaaaaaaattgattttgtaatgtttttttgtagtatgcaacttttttaacaatttttaacaatacatgaaaatgtattatgattatattaaaaaaaatcaatatcaaaaaaaaaaaaaaatttggcattttatttttttattttcaatatatgtatgtacatttatgtagctctgctcttaagttcaaaacgcgcagattacatgtttgtcatttaagataccttttttcatatctgaaaaaaagtagatacttacaaaaactagtttcgcattatgtattattttattgaatatatttttctttgtgtgcggcatccagcggctgtatttgaaatcgcttgctcatcgctaggatatttaatttgcgatcgatttttgaaattagttaagccgtcaaagttataaattgtggcagcagcaccgattgcccttttgccagatcccaggcaaatgtcgttgggtgcaagaaatgaattagtatttatcaccccatgaagtacgtaacgaaaaaaaaatcaaacacgatcgttagtatcgtttgccacggaactaccgatgattgaattaatggcgccgcaaatgaatgaaatttaaatgaaattgctgatgcaccccatcgcgattctgaatcgagccatttgtcagcagaagatgttcgctcgatagttatagatatgggtatatagtcagatagatagatagatagatagctagatattcgccctgggccaggggctacacccctagtataaattgcattaaagctgacattttacacatttctgggattggtgtg

SEQ ID NO: 19436 - DNA, 384 bp, DROSOPHILA
atgttcgcattgctattgatcttgactggctgccaactgctgtggagttgccccgctgagtgtacttccattaacgtgccggtgccaatcctcaaatcggtgaccgaacaacttagctcgggttcctacctattttcgttcgagtccgcagatggcacctatcgcgaggaactgggcatagtgagctccgattcgaagacatctgacgacgatctcgaggtgtccggtatttatcgctatatcaacgactggggccaggaggtggaggtgcgctatacggcggacaagaatggctttctgccccacgttcggtacatatccaaaggggaagcctataaaccaattcgcatagagccattagctttgatgggcatacattcttga

SEQ ID NO: 19437 - protein, 127 aa, DROSOPHILA
MFALLLILTGCQLLWSCPAECTSINVPVPILKSVTEQLSSGSYLFSFESADGTYREELGIVSSDSKTSDDDLEVSGIYRYINDWGQEVEVRYTADKNGFLPHVRYISKGEAYKPIRIEPLALMGIHS

SEQ ID NO: 19438 - DNA, 13134 bp, DROSOPHILA
ctcgttattatgtaaatatatagtcgtatagggtgttaagtatattgatcaagtaaacatggtttgactaatattatcgagttcctcgggttagagtgagatggatgtcaaacagggctctgaaagagagggtgtctgtaggtgtcagtgtgtgcgtaggtggttggtgggcggatatggaggtgtgatgtttgatgggtggtggagggaggtgggttaggtatggaaggggatggggcgcgactacgaattttggacgtactcttaatcggtatcaatatttttacactaactaaatgtaaaactcaacaaacgccaaaaaaaaaaaaatatctcaacctggttaggatcggcactcaaagttcgggactatatatacatcgagtggggctgcatgaccaagagtgagagatggagagagcaggaaatacttatttttcctttattttaaagtaattttcttcctttagttgctgcgcggcaacattcgaagtgctggcaaaaatctaacctaatcgttatattttttttagcatttgattatatatatatatatatacatatgcatatatgtatacacatacatatatataactagaggagggcactgggccgctcaaactatcaacaagtttactaacgatagctcaaaaaagtaataagaatattgttatcaattaatattaattaataagaaaatcaaccaatggttacagttgccgcttgggggccgctggacaggattgtgtggtgatggcgtgttcgtggctggtgtcgttgactgtgtgggatggaggtgctggctgggtgcatggttggctcgctggatgagtgagcgcttctccaaaacggataagtagtaaaatgcttagacgtaaaaataggctctcctaatgttagtatgtaataatcacatagactgccgccatttccattttgctgcctgtcctctgcttccttctcggtgcctgcggaggactacatgtgatgccactgcgccgccgctgccacattggcgttgtcgttcagacgggcgatctcgccgtgcagcccatgccccagccactgcaggtagatctttctgtaagccgcctgggacagtctcagcggattaccgcgcctcagacccatatccgtctcgccgtactcgtccaaatatggcggcgggacgaagcaccccttgccacggcccaggtacaccacctggcagtcgcgaatgcgcagaaagatgcccacttcggcgccacaagcgtgagcgtgatgagtgcatgcgcccaccgagaccttgcccagctctggctggcagcagtacgactgaccgcacaggattaagccgcatatcagacacatcgttggtgtcttcatctcttcgcgctcgttgttcggacagaagatgtccgagacgctgttgatcaaatcgctgaagtcatcacacagtaccttcaagcggggcagcgggcgcaggcaaggttccacctgaagggaacgacgggcgtcaggctgacaacgctgttccacttcacggtcaatgtgaggatgcgaggcaaacgagtgcatcatggtggcgtataccgtctccatgtcaaagtagacacccagcatggggtccaggcccaagtactggcacatcagatcaaagcgatccggttgatctgtgggaaatgtgtctgggaaatccacatcggtgagaaagcgatagaagagacaggagcagcgcaggaacgagctcatctgtcgctgcacgtactcgagaagaagggccaaatgatgcgattcacagggtatcaccactgtttgcccatgaccctgattctcttccgattcttcctccaccagctgtttctgtttagtcttctgcagcactctcgctgggatattgtagcgacgataaaagtcgatcatgttgtcccgaatccgtgacggtagctgctctatgtaatccaactgtgtaagttcagaattgggcgccttctccgctcgtttggccttctccttctccacgtcaaagcagaggaccgccttggtcagctgggccaggaacatagtctgcatgatgtaaaagtcgaacatgctgccgctgggtatgattgttttatatcctaaacaattatgaaacaatctggttatttacaactggttaatgaatggttttcacacttacccttctcgggtaccatcagattgagcactccaaactggaacggcactagcacgcggaagcagtcccactcgagcacactggtgtcattttgattgaagattgtatccagcagtctagaggaaaactccgcctgggaacgcatcggcggaagcaatggaagatcagtttcccattccaaggccgaactgcgtgagcaagccctcaccaagttcctggcacagctctggtggcgcattgacagctcggccttcaatggcttctcgaccgcgtacaaatagatctccagtgcctgcagcgtgtagctgcagctgtcccacagtatgggtaccatttcgatactttcgatggctggatggtcctttagatgtgactgctgaatcttcatggtatttagcagggcttttttaaggaattcaattccttcgatgtagtcagcatgcagtctaggaggattcttgatgagctgcacgctccgctcgaattgagccaagccaccgaccacgccggacaagcgcaaaatgttggacacacttggaagtgttgtcaattcgtggtccttcacgttacccagttcgatggccagtgtgctcatgatctccacgaaactgtccaatggtaaatagctttcgttcggtgaaggaggcgccgaaaaagcgggcagcgtttcggttaccggtattatagcgttacttagggttcggcaatacggacattggaactccacgttggcggcctgggctagggccgcacgattgcggtgcggacgacgcagctccttgaactcctcgttggtgaagtactccagccagcagctgtagtgcatcacatgaccgcagcaactaatgtgcagtgcgctctgactattacgcaaattgggcgtagtgaagatcacacgcgaggtttggacaaaggcagagctaaccaattgccggcccccacggctaatggcacagttctcgaagcagaggatgcatttaaaggtatcatcggtgccgtgataaaacttgcggtccggccccaagcaggctaccttcgactcaagggccactgctccctgttcttcctcggggggaatatcctcccaatccattggacccgtggatgctgactccttgcgtgtttcgttttcggtgtccgcaaacatttctgcattgctgcttatgaacgacttttgggctttctgcatctgggccataatgtgggctcgacgctcggcggctagacgagcacgattctccctctcctctcgcgcttgctcctcagcgctgagtgacaatttccctccggttccttgctgagagcaactgggtcctgctctaccatcactgggagcctgcttggcctgcagctgcttgaagcgctcgatggtccacagcacaaagtcataatgagcctccaactggccgggtaataggtaataaaataataaaacttttggaactttgaacttttagggattagacataccctcgggcagcgagcgagctcttccaacttctccagaattccgtactcctgggaacgctcgtagaagctcaagaagggatagtgctcgctaagctcctcctgaatggcataacccagcaggtgaaggacctgtagggaaataaacgaattgcaatttgaaaagaattgaaattttgttctaatgtaatacaaataccttttgaagatgcgattcggtaaagctgcgactgtaagcatttaaagccctttccataatcaagctgcagatgttgaggaacacagggcactgcaggatgttggccatgggtctagaatagattaggagattagagattgtatggattaagacatgatctctttagactcacgtgaaggctggtgttagttttggcaacattggtggcgggcagcagacaagctgcttcttggcctttcggcgctcccgttgcagttcctcggccttggacttgtcctctttggtgtagtgatagaagtacatgttgaactccttaagcaaatgttcctttagttcgtacacccccttgctgtcggctccaacgggtttcttgaacacggcaaccgtgttgataacttcctcgaaaacgttgtcgctatttccgctattgccatctggcaaggcgcgactcaactccgagtgtgagtatggcttgatacacaacagctggatgatctccttgcgcaggcgatcctcttcggtcaccatcgaaacgccaggcatccaacgttctccaatgatcacgatcagaagttccaggaactcgtcaaagattgacgcctctcgaatgatatcatcgttcatttcattacccgacaatagggaccagtagttttcctgtaaccaggggatcgtgttgaacctattcaacacatggatcaggaactcgttgctctccattagggaggcgcctatctgcaggcaggctatgtccctgtccagcatctccacgcggcaacgtacatttcggtagaagtagagctgatgcagcagggtgtaaccattgcggcgccacagtcctgcgcccacctgggcgatcattgcttgggtgcacaaaaccggttctataatctccctgggcgttagcttaatgctcaacgcttctgtttccgtctgcagcccgtcgtacgttaaatcgtgggcacccaagtgcagatagattccggcgaagaaacgcgacaaaggcaagtggatggataccggctgcactgatatgtcgtaaactagacagttggctacatggtccgccacttttttcggctgcatgaccttctcgccacccacaataaagctgttgctcaccagcgcccgcattgtcatcttgtagagcttacgcagcagcttcacatcgccggacgcccaatcaatcacctgcgagatggtcgtggccagcttgatgtgcaggttgaaggcgcactcccactctggctcgtagtccatatgttggcccgtctgtctggtcatcgactccatgccctgcatcacgtttagaacgcgcatcaaagcccggcagcctgtgtgttacaaatggggtaaatgagcttaaatggcttgcaaattcaatatgttgccggtgcctaccttctaggaaaccgtttcgtaaatcattgctcagcacatccggctttaggctgagcaggtatcgcagatcgtagaggatgtagttagcccgcttgaagaaggtgaggctggcgatgttcttgctaaagtgcagcgtcttgttacgaatgaacttctcgatggcaacgtggtagaacgtgtgcagcagcttgtcaaagatgccctcatgagcgatcagatgatgggctatgctgggcaccgtgaacagctggacactgagcgacacaatcgaaaaggcgtgatcatgatcatcgctgataaagtcctccacaatagtggcgtagcgtcgcgaaaactcctgggctaggatcattttgttgtcgtactccataagcataccagagatcaggaggcggtgccagcaggtgcgcgccgtcttccaaagcttcacgtcgtactcaaggatgtgccggatgcagaatgtctcctgcttgcgctgcaccaactcggagaacgtcttccggaagaggtagtgtcgcaccaggaactcctggaaccagccgagaagctgcagggcaaactgctgacaggccacggccccgatgtgcagcaccgatgtcctgagtgactgattgttgcgtgccgtcgacaccagggaggtcggcagaatcatttggttctcgatggatacctttagtttgttgcactcctgaaaaatgataccgcaataaatgaataatgctcctgcggataagttgtgtctcttagcccacctcaaatgtatcgcatttgaccaccgctcgtccctcgcgatcaattgccgccacgatttccatggcgtcctttgcccgacacttggcaattttggtcagcgtctgaatgacttggtcgaacgtgtgcgactcgtcgttgtagagcacagtgcaatactgcgctccgtccacttggccgccttccacgtttccatccaggcactgtagactggcgtttggctcgatttccagataactcacgcagaaggcgaggattgccccaaagcagatctcaacccgctcaagtactgcgtcggtcaggatcttgctctccagcggattcttgcgatttgcctgcacatatgaaggtatcagaaaaattcggattattagttgcttagttatcctggttttatttattaaagtgaactatgaaagtcttgcaatccaagctactgaccagatgcagctcgcagtactgatccttcttccaggcctcgtcgtctccgcagtcacagcagccgccgccgccggaagtggacatcttgtacttgtgaaagcgatgcgccgagcgcttgaaacagttgacgcaaagcacgcaggtgggatcgacgccgcactcgcggcagctgtaggtgggctccccgttcttaaagaccttgccacagacggtggccgtgttgccctccagtcggagcttctccagtgcggaggaaggattgtcgcccagcataaactccacaacgacatcgatgatctcctccttggccagcgactccttaaacatgcactttactggaagagattacacgcttcattagtcttaatcgaatcaaagtgagctcaatgagttgcgcaatgcggagtatagtaagagcctagctggggttctagatccgcaaaacagcctcttgatctctggctcaatgcgcaggttctccgtgttcgtaggcccttggctccaacaatgctcgtggtgattacacccacactccgaacagtttgtcccaagatagcccacacagttgaaatagtattggattggattggatttgattgatgaatggggaatgagtgggggaggatgaagggttacgattagagcgaccttgtgtggataggtgtctgtggtggctgttcaatcaggactctagtttaaccgtggcttaggtaggtgttcacctaacgttggcaagtcatttctggaacttaacaattgtgctgtactcacgagtaatcacattggtatctgaaaggaaattaatttgttaaagttagtaacatattagaatcttaattgcatcaaggactataaacaggtttcataaagtgcatggaccttgtcttattatccttatttatctagttgagtaattaaagtctaaatttatgtttgaaaacaaatatatatatttaaaaatattgtccgatacttttagaaaattataactttgctgattggctaaaaaaactgtttttcagttggcccacaatcttttagttaaatgcgattaaagacggctcgaagacattagaattactggttataaataaacatgctgactcatgggttagcaaactgtcatcttctggctttattgcttttcaatgccgtgagtaatgcaatagcgatggagtatcgttaaaatgattagaacaggtcggaccacaccgcatgtggataatgaacgtgataatgatcatgatcgcggctatattattgggcctgggcgaccgcaaaagagaaccacagtcgcagacaagagaaaccttcgggctaaacgagttttcgcaaccagagaaaccaaataaaatcaaaatcaaattcaaattcaaatgcaaatacaaatacaaaagccagcaatttacaacaaatgcagttcaaggtcgccacaaacgatgtgaaaactctgcagcgcagaatcgaaaaaaaaaatacaatactaaaaagagagcgataagcttacaatataatctattatcaacgcatctaacgtagggctatcagtgaaaaatgaaatatttgtatgcatatgtacatacatatctactgcctgcaatgcacatacaataaagacaaattgaaagtaactagcagagtacctcctgtacactttaaagttcctttaaataatcttcacgctgcattttgctatatctccaggtaacatggctgcctatataaaaatgcatttaaaactgcgtgtgcgtcagtttactgaggcgtaatagactggaacaaagaaggcgcctggagcggaaaataaaagaaagaaatcgaaatcgaatcgaactgaactgaactgaaatgcactatacagaaatgcctctatactatgccaggaggaagaacgccagagaagaggccacctcatcggttcctgaatcacagtggattattcaggagcggtacactcaattctacaggcacgatcacaaaaagagatcaaatgtgtgtaacaatatgatataaagatcactttttaaacaataattacaaaagtaaatacaatgtttcctaaagtttttagcaaaagtactcaattaaactctcaacaagacgtcatcaaaaggtgactgaatcgaaaatatatgcataatttaaacgatattaaacttgactgcaaacatcatacgtaattacagcttccaatgaattgtgcatatttttcgaaccaataaatcttggtcattcgcccttagcatggaaattaattatggcacccactgttgtactgaaaatttctcgatgaaaagaggaaacaaaatttaaaggctcaaatgcggcaacacgatcgttacaaagagcatttctgatttctgcaagggtaggtggtgggcgatcgagggcatataaatcttgataaatacggacaaccacacccacaccttttgtaaaatattatatatatttatgcccaaaaatgtgtcagctgtttgctccttttgcacaatgaaacgagagcgaaagcggaaaaagaaacaagacatctgtgtgcgcctagaatgaggtggatatccaacaaagataagaaagaaagactaaattcgcagaatgtgcaagcgatttgtacaaaaattttgtgtaataatacatgagtttcccaagtttgaatcatttctattgagacacacgacacgaggcaaatgtcttcgcactttgagaccagaatagcctctataaggcgaaccagccagagatatgtataaacgctgaaaatcgacaaaaactggacacgtcaggcggtcgagaagacctccgcggatgtgcacctggaccagataaacgcaggttgaataaactgcctccaaatacatatttctgtatatttaatatttaactctctggcttatcagtccggcaagcagcgaagtctggcgatgcgattcgtctccgttctctgcgaaatccggctgtccacctcatctgtatctgtggcattcgtcattgtgcatcgggattcgagtatagtagtctacgtacaattagacagcaggcaaatatcagcggaacggatatatgtatgtacagggggtatggtatggtatggtatatgcccatggaaacataacaacattggtacccatgccctccatatgcttagcagctgataaggaacgataagagccatgagatggggtaaaaacccgattagcaaaagcggaaagcaaacattgtttgagtaattggcaaaaatattcgctatgacaagaacggattactcaatgaagccgggaaatgaggagggttcttgaaggagctacactggaaatgatttccattacctactatttgttttacaaattggtcataatatcaatatatttttgtattgtatatttccatccttggcatacaaacaaatagtttctcgcgtggaaaattgcaactcctctcgttttatttctcaatttcctattaaatcaatattttattaacagaaagtcgtcgacaaatttgagaggcttcaagtgctttcctaggaatctagattctcccaatttgtttgtttcaatagtcgcacatttgcccctccagcttcggataatgttcacttctggtggaattaggtgcaaaacgagtttgtttacttaattcatttgttgccaggccgggcttgagccattgttggatcaacttgcaaacactgggccaaaatgagtgcaggtaatttaaaattgccacaaaaaatgtcattcattttgaacttgaatatgaaaatatttgcttatgctagtatttagagatcttctatcttctctgataggaattgaaacattcgattgcccatttgaaaaagagcctgaattaatttttgtgttaattcaatcagaagatttctcacagtgtacgatgagagtgcataaaaggcgagacaggtagaaaaccgagaaggtggcgattttcgagctggcaaacttgaaacttggctggccaattgaaaggaaaacttggcgcagcaaggcacggcgccgaggaaaaacaaattcgcggaaatgtgaaatagacgaaacgtgagaacagcaacaaagtcaacaaaagcgtgcaattgctcaatggcaataaacaaaagacgaaagcagaacaaaaatagtactaaaacacacggcgaataatgataattcaagagcgagagtttttaatgggattcggccaacttttgacgccccatcgatttggcattgtggtagttaccattatttgtttaccattatttttaatcgaaaaagtggtgtatcctatttgaaaactttttttttgaaattaacctttcttggaattgaaaacaatccgattgcactcttttctattggattgatcaatgcctatatatgtatcattaatatctctatacagggtctgcctgcgtaattttgagttctgatgtatggggtcataccagaaactagctgtttcccgagcgcaataaaactagttattagatcttttagcccttcccgcagattcctacgatcaaggattgtgactatgactatgcgatgactgtgcatctcgactcacctttaactgtagcgctagtctggtaatcaaaatacttgggagactcgcgctttaagaactcgatgatatcggagcggtctagtgtgcccgcctggcgcttgaggcgccactccttgagcggcgaactgcactcggcagggggcgccacaacgacgtcctccatgtcgtagcgatccatcgttgctctcgcttgcactcgcactgtctcctctctttttctctttcctggtgaggatgagaaaaacaaaataattgcagcggggctgtgtatgttcgtgtgtgcgatggggacgtctcgctctctatctttcttcctttctctatcgtccgtgtgtccttgctattcctgcgacagtagttgttgttgctgatgttgttgttgcattggttgtcacatgtgttttttgcgaaaagcaaaaaaaacgggattaggttaggatgcgggacaacaaaaatgttcgattgcgctctcgctctcatgtcgtagaagaattttcgattcttgttttggagcacagacacttacttgttaataaagaaattatatttttacaacagtgtcgaaatttacaaaagctgacaattcaatcgaggaaaaatttgtgtacgaatggcgaggaaacacttagtgtgcagctgttgctttgcactttttcctttgtatcagccagttgtgattttttttatttcatttttgacagcaagcaaaagcaaaaaaaaaagagagacggagcgcatggcaaaacgcgagaaacagtaacttcaaacacacgcacacacatgcacggccacgggcactatttttggttttattatatttttataataatcgtttattatctacaattttccttttggttgcctttacgtgcgcttagcaccttaaaaaaatagcttctctttttctttatttttcactttctgacaatcacacacacgaacacgcacaccaacttaaattcactctactgcgtttcgctttcgttttcttattttcccaaacttttgcacgtacctatttctttttttgtttggctcgtggtgtattcacgagcaatttagacctgtgttgttagttaaatctacttatttcaactggcacaacgaagattcgtctgccaatttcgtaacctaaacgcaaaaaaacaagactgtcatcgatataagcaggcgttttatgtctgcgtctatcgggcaatacggtacgtcgatatctggtcgtgctaacatcgatagcatgcgagcggtaatagtgagtgcacactacgaagttgctcatcaatcgctatcgataagaaatccattttccgccattcagttatgtatatggtaattgaaattgttttccatttgtcaaaataaaactaaagatgatttcaaattgtttgcctaatgtacacgctgtatttacgtttagacactaattgcaataagcaatagtacattttaggtaaatgttgtagtgaaaaaaaccaaatatatctaaaagggatacaatcaattaaagacccagattaatttaaaagccccgaatgcaaaaaacaacaaaatatcaaaaccagatttttctatttaatcttacatacacacaaaaatgtctttattgtttcgcttttttggttttttagttgctttggatcgctttgttggtatacttgtgtctgtttgttggaaatacatagttttgttcgttttttcgctatatctatttggattcggttcgatttcggctttgaatactttatgctgagatgttgttttgaaaccaaatcacttcgttcaatactgtccagttttggtcttttttgtgttagatggtgtggtttctgtgctcaactaaataatcaggcatgctccggtagtcgtaattttgtttcgatttcgatttgggaaaaatctttcgatttcgttattaggtgctccggttttgtaaatagcattatttacaaacaacacttttggccatcctctagataagttattgaattctttgatattgtatctgcctgtttcgtttcaccaacaatatggaattcttcccaaaaacacttgtcgatgtacctataactccttgccaaatcgaaactttttgttgccgaaggcaaaattctgtttgaccaatgttgaggtgtggtcagaaataaaatttttataa

SEQ ID NO: 19439 - DNA, 6278 bp, DROSOPHILA
acagtcttgtttttttgcgtttaggttacgaaattggcagacgaatcttcgttgtgccagttgaaataagtagatttaactaacaacacaggtctaaattgctcgtgaatacaccacgagccaaacaaaaaaagaaatagcaacaacaactactgtcgcaggaatagcaaggacacacggacgatagagaaaggaagaaagatagagagcgagacgtccccatcgcacacacgaacatacacagccccgctgcaattattttgtttttctcatcctcaccaggaaagagaaaaagagaggagacagtgcgagtgcaagcgagagcaacgatggatcgctacgacatggaggacgtcgttgtggcgccccctgccgagtgcagttcgccgctcaaggagtggcgcctcaagcgccaggcgggcacactagaccgctccgatatcatcgagttcttaaagcgcgagtctcccaagtattttgattaccagactagcgctacagttaaaggtgcacatccgcggaggtcttctcgaccgcctgacgtgtccagttttttaaagtgcatgtttaaggagtcgctggccaaggaggagatcatcgatgtcgttgtggagtttatgctgggcgacaatccttcctccgcactggagaagctccgactggagggcaacacggccaccgtctgtggcaaggtctttaagaacggggagcccacctacagctgccgcgagtgcggcgtcgatcccacctgcgtgctttgcgtcaactgtttcaagcgctcggcgcatcgctttcacaagtacaagatgtccacttccggcggcggcggctgctgtgactgcggagacgacgaggcctggaagaaggatcagtactgcgagctgcatctggcaaatcgcaagaatccgctggagagcaagatcctgaccgacgcagtacttgagcgggttgagatctgctttggggcaatcctcgccttctgcgtgagttatctggaaatcgagccaaacgccagtctacagtgcctggatggaaacgtggaaggcggccaagtggacggagcgcagtattgcactgtgctctacaacgacgagtcgcacacgttcgaccaagtcattcagacgctgaccaaaattgccaagtgtcgggcaaaggacgccatggaaatcgtggcggcaattgatcgcgagggacgagcggtggtcaaatgcgatacatttgaggagtgcaacaaactaaaggtatccatcgagaaccaaatgattctgccgacctccctggtgtcgacggcacgcaacaatcagtcactcaggacatcggtgctgcacatcggggccgtggcctgtcagcagtttgccctgcagcttctcggctggttccaggagttcctggtgcgacactacctcttccggaagacgttctccgagttggtgcagcgcaagcaggagacattctgcatccggcacatccttgagtacgacgtgaagctttggaagacggcgcgcacctgctggcaccgcctcctgatctctggtatgcttatggagtacgacaacaaaatgatcctagcccaggagttttcgcgacgctacgccactattgtggaggactttatcagcgatgatcatgatcacgccttttcgattgtgtcgctcagtgtccagctgttcacggtgcccagcatagcccatcatctgatcgctcatgagggcatctttgacaagctgctgcacacgttctaccacgttgccatcgagaagttcattcgtaacaagacgctgcactttagcaagaacatcgccagcctcaccttcttcaagcgggctaactacatcctctacgatctgcgatacctgctcagcctaaagccggatgtgctgagcaatgatttacgaaacggtttcctagaaggctgccgggctttgatgcgcgttctaaacgtgatgcagggcatggagtcgatgaccagacagacgggccaacatatggactacgagccagagtgggagtgcgccttcaacctgcacatcaagctggccacgaccatctcgcaggtgattgattgggcgtccggcgatgtgaagctgctgcgtaagctctacaagatgacaatgcgggcgctggtgagcaacagctttattgtgggtggcgagaaggtcatgcagccgaaaaaagtggcggaccatgtagccaactgtctagtttacgacatatcagtgcagccggtatccatccacttgcctttgtcgcgtttcttcgccggaatctatctgcacttgggtgcccacgatttaacgtacgacgggctgcagacggaaacagaagcgttgagcattaagctaacgcccagggagattatagaaccggttttgtgcacccaagcaatgatcgcccaggtgggcgcaggactgtggcgccgcaatggttacaccctgctgcatcagctctacttctaccgaaatgtacgttgccgcgtggagatgctggacagggacatagcctgcctgcagataggcgcctccctaatggagagcaacgagttcctgatccatgtgttgaataggttcaacacgatcccctggttacaggaaaactactggtccctattgtcgggtaatgaaatgaacgatgatatcattcgagaggcgtcaatctttgacgagttcctggaacttctgatcgtgatcattggagaacgttggatgcctggcgtttcgatggtgaccgaagaggatcgcctgcgcaaggagatcatccagctgttgtgtatcaagccatactcacactcggagttgagtcgcgccttgccagatggcaatagcggaaatagcgacaacgttttcgaggaagttatcaacacggttgccgtgttcaagaaacccgttggagccgacagcaagggggtgtacgaactaaaggaacatttgcttaaggagttcaacatgtacttctatcactacaccaaagaggacaagtccaaggccgaggaactgcaacgggagcgccgaaaggccaagaagcagcttgtctgctgcccgccaccaatgttgccaaaactaacaccagccttcacacccatggccaacatcctgcagtgccctgtgttcctcaacatctgcagcttgattatggaaagggctttaaatgcttacagtcgcagctttaccgaatcgcatcttcaaaaggtccttcacctgctgggttatgccattcaggaggagcttagcgagcactatcccttcttgagcttctacgagcgttcccaggagtacggaattctggagaagttggaagagctcgctcgctgcccgaggttggaggctcattatgactttgtgctgtggaccatcgagcgcttcaagcagctgcaggccaagcaggctcccagtgatggtagagcaggacccagttgctctcagcaaggaaccggagggaaattgtcactcagcgctgaggagcaagcgcgagaggagagggagaatcgtgctcgtctagccgccgagcgtcgagcccacattatggcccagatgcagaaagcccaaaagtcgttcataagcagcaatgcagaaatgtttgcggacaccgaaaacgaaacacgcaaggagtcagcatccacgggtccaatggattgggaggatattccccccgaggaagaacagggagcagtggcccttgagtcgaaggtagcctgcttggggccggaccgcaagttttatcacggcaccgatgatacctttaaatgcatcctctgcttcgagaactgtgccattagccgtgggggccggcaattggttagctctgcctttgtccaaacctcgcgtgtgatcttcactacgcccaatttgcgtaatagtcagagcgcactgcacattagttgctgcggtcatgtgatgcactacagctgctggctggagtacttcaccaacgaggagttcaaggagctgcgtcgtccgcaccgcaatcgtgcggccctagcccaggccgccaacgtggagttccaatgtccgtattgccgaaccctaagtaacgctataataccggtaaccgaaacgctgcccgctttttcggcgcctccttcaccgaacgaaagctatttaccattggacagtttcgtggagatcatgagcacactggccatcgaactgggtaacgtgaaggaccacgaattgacaacacttccaagtgtgtccaacattttgcgcttgtccggcgtggtcggtggcttggctcaattcgagcggagcgtgcagctcatcaagaatcctcctagactgcatgctgactacatcgaaggaattgaattccttaaaaaagccctgctaaataccatgaagattcagcagtcacatctaaaggaccatccagccatcgaaagtatcgaaatggtacccatactgtgggacagctgcagctacacgctgcaggcactggagatctatttgtacgcggtcgagaagccattgaaggccgagctgtcaatgcgccaccagagctgtgccaggaacttggtgagggcttgctcacgcagttcggccttggaatgggaaactgatcttccattgcttccgccgatgcgttcccaggcggagttttcctctagactgctggatacaatcttcaatcaaaatgacaccagtgtgctcgagtgggactgcttccgcgtgctagtgccgttccagtttggagtgctcaatctgatggtacccgagaagggatataaaacaatcatacccagcggcagcatgttcgacttttacatcatgcagactatgttcctggcccagctgaccaaggcggtcctctgctttgacgtggagaaggagaaggccaaacgagcggagaaggcgcccaattctgaacttacacagttggattacatagagcagctaccgtcacggattcgggacaacatgatcgacttttatcgtcgctacaatatcccagcgagagtgctgcagaagactaaacagaaacagctggtggaggaagaatcggaagagaatcagggtcatgggcaaacagtggtgataccctgtgaatcgcatcatttggcccttcttctcgagtacgtgcagcgacagatgagctcgttcctgcgctgctcctgtctcttctatcgctttctcaccgatgtggatttcccagacacatttcccacagatcaaccggatcgctttgatctgatgtgccagtacttgggcctggaccccatgctgggtgtctactttgacatggagacggtatacgccaccatgatgcactcgtttgcctcgcatcctcacattgaccgtgaagtggaacagcgttgtcagcctgacgcccgtcgttcccttcaggtggaaccttgcctgcgcccgctgccccgcttgaaggtactgtgtgatgacttcagcgatttgatcaacagcgtctcggacatcttctgtccgaacaacgagcgcgaagagatgaagacaccaacgatgtgtctgatatgcggcttaatcctgtgcggtcagtcgtactgctgccagccagagctgggcaaggtctcggtgggcgcatgcactcatcacgctcacgcttgtggcgccgaagtgggcatctttctgcgcattcgcgactgccaggtggtgtacctgggccgtggcaaggggtgcttcgtcccgccgccatatttggacgagtacggcgagacggatatgggtctgaggcgcggtaatccgctgagactgtcccaggcggcttacagaaagatctacctgcagtggctggggcatgggctgcacggcgagatcgcccgtctgaacgacaacgccaatgtggcagcggcggcgcagtggcatcacatgtagtcctccgcaggcaccgagaaggaagcagaggacaggcagcaaaatggaaatggcggcagtctatgtgattattacatactaacattaggagagcctatttttacgtctaagcattttactacttatccgttttggagaagcgctcactcatccagcgagccaaccatgcacccagccagcacctccatcccacacagtcaacgacaccagccacgaacacgccatcaccacacaatcctgtccagcggcccccaagcggcaactgtaaccattggttgattttcttattaattaatattaattgataacaatattcttattacttttttgagctatcgttagtaaacttgttgatagtttgagcggcccagtgccctcctctagttatatatatgtatgtgtatacatatatgcatatgtatatatatatatatataatcaaat

SEQ ID NO: 19440 - protein, 1829 aa, DROSOPHILA
MEDVVVAPPAECSSPLKEWRLKRQAGTLDRSDIIEFLKRESPKYFDYQTSATVKGAHPRRSSRPPDVSSFLKCMFKESLAKEEIIDVVVEFMLGDNPSSALEKLRLEGNTATVCGKVFKNGEPTYSCRECGVDPTCVLCVNCFKRSAHRFHKYKMSTSGGGGCCDCGDDEAWKKDQYCELHLANRKNPLESKILTDAVLERVEICFGAILAFCVSYLEIEPNASLQCLDGNVEGGQVDGAQYCTVLYNDESHTFDQVIQTLTKIAKCRAKDAMEIVAAIDREGRAVVKCDTFEECNKLKVSIENQMILPTSLVSTARNNQSLRTSVLHIGAVACQQFALQLLGWFQEFLVRHYLFRKTFSELVQRKQETFCIRHILEYDVKLWKTARTCWHRLLISGMLMEYDNKMILAQEFSRRYATIVEDFISDDHDHAFSIVSLSVQLFTVPSIAHHLIAHEGIFDKLLHTFYHVAIEKFIRNKTLHFSKNIASLTFFKRANYILYDLRYLLSLKPDVLSNDLRNGFLEGCRALMRVLNVMQGMESMTRQTGQHMDYEPEWECAFNLHIKLATTISQVIDWASGDVKLLRKLYKMTMRALVSNSFIVGGEKVMQPKKVADHVANCLVYDISVQPVSIHLPLSRFFAGIYLHLGAHDLTYDGLQTETEALSIKLTPREIIEPVLCTQAMIAQVGAGLWRRNGYTLLHQLYFYRNVRCRVEMLDRDIACLQIGASLMESNEFLIHVLNRFNTIPWLQENYWSLLSGNEMNDDIIREASIFDEFLELLIVIIGERWMPGVSMVTEEDRLRKEIIQLLCIKPYSHSELSRALPDGNSGNSDNVFEEVINTVAVFKKPVGADSKGVYELKEHLLKEFNMYFYHYTKEDKSKAEELQRERRKAKKQLVCCPPPMLPKLTPAFTPMANILQCPVFLNICSLIMERALNAYSRSFTESHLQKVLHLLGYAIQEELSEHYPFLSFYERSQEYGILEKLEELARCPRLEAHYDFVLWTIERFKQLQAKQAPSDGRAGPSCSQQGTGGKLSLSAEEQAREERENRARLAAERRAHIMAQMQKAQKSFISSNAEMFADTENETRKESASTGPMDWEDIPPEEEQGAVALESKVACLGPDRKFYHGTDDTFKCILCFENCAISRGGRQLVSSAFVQTSRVIFTTPNLRNSQSALHISCCGHVMHYSCWLEYFTNEEFKELRRPHRNRAALAQAANVEFQCPYCRTLSNAIIPVTETLPAFSAPPSPNESYLPLDSFVEIMSTLAIELGNVKDHELTTLPSVSNILRLSGVVGGLAQFERSVQLIKNPPRLHADYIEGIEFLKKALLNTMKIQQSHLKDHPAIESIEMVPILWDSCSYTLQALEIYLYAVEKPLKAELSMRHQSCARNLVRACSRSSALEWETDLPLLPPMRSQAEFSSRLLDTIFNQNDTSVLEWDCFRVLVPFQFGVLNLMVPEKGYKTIIPSGSMFDFYIMQTMFLAQLTKAVLCFDVEKEKAKRAEKAPNSELTQLDYIEQLPSRIRDNMIDFYRRYNIPARVLQKTKQKQLVEEESEENQGHGQTVVIPCESHHLALLLEYVQRQMSSFLRCSCLFYRFLTDVDFPDTFPTDQPDRFDLMCQYLGLDPMLGVYFDMETVYATMMHSFASHPHIDREVEQRCQPDARRSLQVEPCLRPLPRLKVLCDDFSDLINSVSDIFCPNNEREEMKTPTMCLICGLILCGQSYCCQPELGKVSVGACTHHAHACGAEVGIFLRIRDCQVVYLGRGKGCFVPPPYLDEYGETDMGLRRGNPLRLSQAAYRKIYLQWLGHGLHGEIARLNDNANVAAAAQWHHM

SEQ ID NO: 19441 - DNA, 2523 bp, DROSOPHILA
cattatgtattattttattgaatatatttttctttgtgtgcggcatccagcggctgtatttgaaatcgcttgctcatcgctaggatatttaatttgcgatcgatttttgaaattagttaagccgtcaaagttataaattgtggcagcagcaccgattgcccttttgccagatcccaggcaaatgtcgttgggtgcaagaaatgaattagtatttatcaccccatgaagtacgtaacgaaaaaaaaatcaaacacgatcgttagtatcgtttgccacggaactaccgatgattgaattaatggcgccgcaaatgaatgaaatttaaatgaaattgctgatgcaccccatcgcgattctgaatcgagccatttgtcagcagaagatgttcgctcgatagttatagatatgggtatatagtcagatagatagatagatagatagctagatattcgccctgggccaggggctacacccctagtataaattgcattaaagctgacattttacacatttctgggattggtgtggagtagattgtggtgtaaagtgcgaggtgcgactgattaatcgcgacacctggcgagtgggtgaagccatgtaagttatgcagttgcagaggccgttaatgtggccgccgaatgataatcggtgtcatcaatcgccggcgtcatcgccccgatcccaatgtgactcagatgccgccagcatagtgacatattttcgaaacccagtcgcgaaaactgacccatccgagaccttgacatttggagcgcgacgaaatgaaattattggagctttttgcggacgtaaagtccacataaaacgggatgcaaacatgtttagcatgtttaagcgaaagagccaaaagagctagatgtggtcgaaatactgatggaggagtgtgtggctataaaagccaactggccgatccactttgtgatcacacgcgctttaactctcgctttctacgctcccccccaaaaaaaaaaacgcaaccaaaatgtgcaagatcgtaagtggactcaaaagagactatcctttgaacatacatattataagctaaagtggaatgtgaaatatatgtggacatgcaaacacgaagacaggataatatgtgcttctaatatgatctcctgcagcttcctcttttcgtcctggcggtcatggtggcctgtggtcaagctcttcccgtagatcccgaacgtgaacccgtggctatcctgaagtccgagatcatcaagacagaggagggctacaccagcgcctacgtgggagcagatggtatatctcgcaacgaggaggcttttttggtggacaagggtaccgacgaggaggctctggaggtgaagggatcctacaagtacataaacgaagacggccaggaggtggaggtgttctatacggcgggaaagaacggatttgttccctacggcagcattatcaatccggaaatcacggccgttgccgaagcagccaaggatctgccaaaggtggagaaggtggagaaggcgggtaggccttagaaagtgtttcctgaataagatctcgtagaagtgaataagtaaagaagcgataagaccagagtattgtctctgggcaaactaaaataaaagtcaacgcgactgcgaaagagttgttttaatctatctgtgtattcttccaatttgcacattttacttagcgtgcgaaggtgcacagagaaaaatgggagcaaagtaaaaccatcgaacttagaaataaatcatttcatacattttttttagaaaatttcacctgtctgactttcacttttcttaaaacaaccactttagtcgcgttaattttcccagtgcacaaggaatacatacatatacccggcttaagagaccttgaaaacatacccaaactggccacagtatcaaagtctgggacgtcggatgattgagcacacgtttggccactttgcggtacagtgagccctgggggcatcaaacgagagagacacctgtttcaatacatcattacacgcttaaacatcgtccattagctcgaatcaaagacgaaatgaagatctaacgaacagggaaacataagaatggaattggttatataatgaggcataaatcatctcgcaatttgcataagttatgggtttcagactcccagtataggctgtcttcctgtttacacgccgtatgcatggattacgcccttctccagcagaattagaactcccacgaagaaaatgtagtaggaaacgagtagaaagccacaagctcgtcgcagcttaaagtttgtggttagtacggaaagcatggagaagcccattccaacctccaagaagatgcaaaccgtctccccaaatccaccttccgttggctgctggcagatcccttaacaaaactttatattgcaacatttactgtactacaacttacgaatatgttaccgggcgcgtttacaaacgagttcaccaccaatggcagggccaagaaaacaaaggatgcttttggggaatgtaaatcttatatatagccttcgata

SEQ ID NO: 19442 - DNA, 396 bp, DROSOPHILA
atgtgcaagatccttcctcttttcgtcctggcggtcatggtggcctgtggtcaagctcttcccgtagatcccgaacgtgaacccgtggctatcctgaagtccgagatcatcaagacagaggagggctacaccagcgcctacgtgggagcagatggtatatctcgcaacgaggaggcttttttggtggacaagggtaccgacgaggaggctctggaggtgaagggatcctacaagtacataaacgaagacggccaggaggtggaggtgttctatacggcgggaaagaacggatttgttccctacggcagcattatcaatccggaaatcacggccgttgccgaagcagccaaggatctgccaaaggtggagaaggtggagaaggcgggtaggccttag

SEQ ID NO: 19443 - protein, 131 aa, DROSOPHILA
MCKILPLFVLAVMVACGQALPVDPEREPVAILKSEIIKTEEGYTSAYVGADGISRNEEAFLVDKGTDEEALEVKGSYKYINEDGQEVEVFYTAGKNGFVPYGSIINPEITAVAEAAKDLPKVEKVEKAGRP

SEQ ID NO: 19444 - DNA, 3797 bp, DROSOPHILA
atatatctgaaaatatatataaaaaatataactatttttttgttagctggctctggatgttaaccacaaataaagcccagcacccatatatatatatatatacatacctctttagccgtgtatatatgtatatgatcgattgtatttttcaaagttcaaagcgagaaataaaaaaaaataaaaacaatatggcaatgttgtaagtgataagaaatgggcccccagctgggcctttcaaactgcgtcactacgctggaaatgttgttcattgttcactatatcgttagcttaacctaatctagacatgatggtgccctaaaaaaaaaaaaactagaaatcatattgagataatggctttatgctgtcgttccgttctcatcccgtggcaagatccgaagtcgaatgccatttccacttttagtcaccaattcggccaacggctttggctgatgatccttgtcgggcaggaagcgatagcttctcaggagcatcgctagcgacgtcttcaactccaacatggcaaacttttgacctgaaagcaaacaaacaagttaaactagagtcatatgaacaaacaactaagtaagtaataaaatccccataaagcctttgctgacgtcatttagtttttgggcgcttctttaaaataatctttagctgcattgtgttttcataaatgttcagctcatgtttatgaactttagtctgtgagtgatgtgcattgtgaaataatcttggcattatcaacaattaatttataaatatattttcagttctctaataataaatgaacctattttaaagtgtgtgatcttcttgtgaacaaggcaaccgaaagcttttcgttcttatcaattgtttaaattaagaaatttttttttggaaagcaattcgaatgaccttcggtccttatatattacaaatatgaaatcgcaatttctaataagtattttcgggttctgtgacctcaaggatgtgattttatctgctgattgttatatttcggttatactctttaaagttttaagaagatcgcaggttaatttggattcaatttcaattttaaaacaaactttttaagttagataatagataactgggtaagtgcctagatgatcttacctatgcaatttctgggtcccgcactgaaagcggcgaaggcaaacggatgcatttgcttctcgttgaccaggaagcgatcgggatcgaatcgctccggatcggggaagttcttgggatcacgatggagcatgtagatgaggcagcttatcgaggcgcccttgggcaccgtcaatttgcccacctccagatcctcgagaactttcctcgagaagaacggcaccgaggggtagatgcgcagcgtctccttgatcaccgcctccagatacggcatcgattccttctccctgccctccagttcgctggcctcctcgaaggcgcgctgctgtacatccggatttttagacagcaaactcagtgcaaaagcgatggccgaactggtggtgtcgtgaccctcgaacatgaaggtgtccacttcttcgcgaatatcggtatcgctcagctccgcaccgccctccatttgggtgagcagcagcatgtcgaggaaggccagtcgccgcttggcgcccacatcgtcctgctccgcttctggtttccattcgttgcgctcctggatgagctgctcacgacgcagccggatcacccgattggtctcgtcgtggagcacctttagagctgcctcccgttcctttccgggctttgtgtgcttaaagaacacgttgagtcgctgccagaaggagaagctctgcttgtgcatcacacggcaaatactgtggttgggagttaaataaaaaatatgatttttaatgaaatcatgtaacagtttttaatacttacgattgaacagcctgcacatattcggagtcgctctgcagctgggcgtgcttcttgatgcccatggccgtttcgcagatggcgtccagggcgaatagggtaatataaggatagatgtcgaaggattcgccattggccttggtcctcagacgacgcaccaggatgcggcaattctcctccattggctccttgaactcgctaaggatgcggaaatggaagcccggagtgaggagctttcggcgacgatgccaggactcgccgccattcgtgagcagacccttgcccagccagggctcgagcagctcgtagtttcgcgacttggtcagcaactgattgttgccgagcagctgcttaatgtcctccggatccgtgaacataaccatcagatccttgccaaaccagatgcggaataccggaccatgcttctccctcagttcctttagccagttaaggatctctgggtaacgaaaaaaggtaagtgactttagttattagttattaaatgaaaactgaaatgagcagcagttaaaaaagtcattaatttaacttctaattgttgttagctaaatcataaagcacacataatattacgaaagatacgattacaaaaagatagcacgaccttataagttatgccaattgcatgcgagtagaattataccagcgagggcaacgctgcgtatgcgtgataaaatgtagaaccatttcatgggtattaaattcacttaatcaattctctttgcacaaactcaccgcctttcttaacattggcaatcagttcgccaatcgtgggacccggcagagttttcgcaaatctctgaagtctcagaaaattcagaatcttgggtaggtagcgtagaaaagctgcccaaaggacgaaagccaccagtgccaatgtgctcatttcgccaccgattttagtccactactggctcaacgaccccaaaaaaacgatggctatataaatcaagtgaaagcttggtaaaatgtgatgagctcgcgatattggacgacttgctggcgaacttaaagtttgtgcgaactgctcgacgtcgcggctcgtttacaactaattcgcactcggaacgcagctgtctgatttgtgcggtgtatgtggtatatggtctgagctctgggtctcaacagatagcagatcgccaaggtggggcactctggatgccctccgattggcgataggcggataggcggccaccaggtttatgagaacggaattatgaatcgaacggatcgtgattccgaaaatatgtagcatcacttgggcctgtagcatttatagattaatagtttataattattcctactatcttaattgaaccggtattaatttagttttcttcgaataccattttgcaagttctcttttcttctcttttaggcattctttttcttttctcagatcagaccactttttgacctacaaacagctacaaaatattgcgtaggcaatctgattaattgttcaaagtacgcccaaaaccactttggtcataaacaaaaacttacgtgctcgaaactatatgatgacatattaagcggggaattttagagtgaaaaaaaggtacattttaaatatgtgctaaaatgataaatattactgtttactattaagtttacgttggtatacgagtatgtagcctaaacccttcaaatgcatatttcaatttaataaaaagtattcaaaggtatgcatacgatcgaacaggtgtagcgaaccgctcgccaaattgaggatcctatggcggtggacgacggaacgtgtcaggggctatcattgcatcagtgcagtgtcagacccaaaaacgagttctattacagcgaatcatcgtacgaacggcagatatgtgataggcgttgacccacttagaacatgtggatttctttta

SEQ ID NO: 19445 - DNA, 1488 bp, DROSOPHILA
atgagcacattggcactggtggctttcgtcctttgggcagcttttctacgctacctacccaagattctgaattttctgagacttcagagatttgcgaaaactctgccgggtcccacgattggcgaactgattgccaatgttaagaaaggcgagatccttaactggctaaaggaactgagggagaagcatggtccggtattccgcatctggtttggcaaggatctgatggttatgttcacggatccggaggacattaagcagctgctcggcaacaatcagttgctgaccaagtcgcgaaactacgagctgctcgagccctggctgggcaagggtctgctcacgaatggcggcgagtcctggcatcgtcgccgaaagctcctcactccgggcttccatttccgcatccttagcgagttcaaggagccaatggaggagaattgccgcatcctggtgcgtcgtctgaggaccaaggccaatggcgaatccttcgacatctatccttatattaccctattcgccctggacgccatctgcgaaacggccatgggcatcaagaagcacgcccagctgcagagcgactccgaatatgtgcaggctgttcaatctatttgccgtgtgatgcacaagcagagcttctccttctggcagcgactcaacgtgttctttaagcacacaaagcccggaaaggaacgggaggcagctctaaaggtgctccacgacgagaccaatcgggtgatccggctgcgtcgtgagcagctcatccaggagcgcaacgaatggaaaccagaagcggagcaggacgatgtgggcgccaagcggcgactggccttcctcgacatgctgctgctcacccaaatggagggcggtgcggagctgagcgataccgatattcgcgaagaagtggacaccttcatgttcgagggtcacgacaccaccagttcggccatcgcttttgcactgagtttgctgtctaaaaatccggatgtacagcagcgcgccttcgaggaggccagcgaactggagggcagggagaaggaatcgatgccgtatctggaggcggtgatcaaggagacgctgcgcatctacccctcggtgccgttcttctcgaggaaagttctcgaggatctggaggtgggcaaattgacggtgcccaagggcgcctcgataagctgcctcatctacatgctccatcgtgatcccaagaacttccccgatccggagcgattcgatcccgatcgcttcctggtcaacgagaagcaaatgcatccgtttgccttcgccgctttcagtgcgggacccagaaattgcataggtcaaaagtttgccatgttggagttgaagacgtcgctagcgatgctcctgagaagctatcgcttcctgcccgacaaggatcatcagccaaagccgttggccgaattggtgactaaaagtggaaatggcattcgacttcggatcttgccacgggatgagaacggaacgacagcataa

SEQ ID NO: 19446 - protein, 495 aa, DROSOPHILA
MSTLALVAFVLWAAFLRYLPKILNFLRLQRFAKTLPGPTIGELIANVKKGEILNWLKELREKHGPVFRIWFGKDLMVMFTDPEDIKQLLGNNQLLTKSRNYELLEPWLGKGLLTNGGESWHRRRKLLTPGFHFRILSEFKEPMEENCRILVRRLRTKANGESFDIYPYITLFALDAICETAMGIKKHAQLQSDSEYVQAVQSICRVMHKQSFSFWQRLNVFFKHTKPGKEREAALKVLHDETNRVIRLRREQLIQERNEWKPEAEQDDVGAKRRLAFLDMLLLTQMEGGAELSDTDIREEVDTFMFEGHDTTSSAIAFALSLLSKNPDVQQRAFEEASELEGREKESMPYLEAVIKETLRIYPSVPFFSRKVLEDLEVGKLTVPKGASISCLIYMLHRDPKNFPDPERFDPDRFLVNEKQMHPFAFAAFSAGPRNCIGQKFAMLELKTSLAMLLRSYRFLPDKDHQPKPLAELVTKSGNGIRLRILPRDENGTTA

SEQ ID NO: 19447 - DNA, 3806 bp, DROSOPHILA
cagagcagcaacatcttcagcagcggcgcagcagcagtaacatcagcagcagcggaagcggcagcaacaccaccaccaattgccgattagccggaacccctctgtatccatttagttctctgtgtatcatcaattttaaaactgcgttgtcaaccagcaacaacaaatatatacaaatatataaaaaaaaaaaaacaaaacttaaaacaacatttgcatctatctaaaaaaagtaatatctgaaaccaggtacaagataccacttgctaagaagagcgaggaactaaacgcaaaagccacaatatcagaacacctttttgccgcacctttgttttagctttttctagaactattgataaaaatatattaaaacaaaacaaaatacatatgtacacattatgtttaaatataccactcctaaaaaacagctgacaaccgaagcaacattttacgctaaacacgaacacacagcgaatccacccagatctataaatgtattaacatatagctatatatctttcggggtatggccaaaaaatatatggttgccgctattgggtgtatagcatgagttgatatagctgtggatatatacaattgggtggtattgtagattatgtttaacaaagcggaagtaaattccttatctcaaaacagtagaacgaaaatggctgtttttgaaaagtttttatgtatctgttacgtacgggttgggttaacctcatattaacccaaacctttttagccaatttcataagctttcgctttaaaaccagctctctaagcaagatgagttccaaaagttaaactaattttttaaaactttcaacaccactccactgcatatacttttaaaacgaaagcgcagtgggtaagttgcatttcgttaagccttcacatcaacttatcggttgaaattctgataacaagctatcgataatctatcgattcgactcgcagccctatcacgtcaggtcatattaatttttcaatccgcccagttggatgtttggacagtttccttcctcgcgccggtcgataatgttggccaactaacaccgacctgtagcacgtcacccgtaataacccataaccgcaaccagtccaagcatccaagatgggacagaaagtttcgcgcaccgacttcgagtgggtgtacacggaggagccgcacgcctcgcggcgcaagatcatactggagaagtacccgcagatcaagaagctctttggccacgacccgaatttcaagtgggtggccggcgcaatggtgctcacacagatcctggcgctgttcgtcgtgaaggacctgtcgtggtcgtggctcatcgtggccgcctattgcttcggcggcatcatcaaccactcgttgatgctggccgttcacgagatctcgcacaacctggcctttggacacagcagacctatgcacaaccggatcttgggcttcatctgcaacctgcccatcgggttgcccatgagcatttccttcaaaaagtaccatctggaacatcaccggtacgtgccaatcggttcgaattcataccctaaaccgcaccctcacgcacacatgggcattaacacttttctctgggcaatagggcgtagtcacacagtaaacagcgaaaacatcatcccattccgcatttatccatttaaaagccggcttgtgttgttcaacactgattgctctccattgggtttcatgtgaattttcaccccgcaaacttgtgaatcagttttcatgttgttcccttttgccgggcatcgagtgcgtcttaattgcgccgattagataaggttgtagttatatgtgtatccgaataggcgctcaattggtcacgtagctcagtgatttgccactcgacttctcggctgcaagtcgcgttcagttgagtcactgcttcgccttccgcaaaaagttcccgaaatattattcaaactaattttatgagtgttgtttatgtttacagttacagtcattcactatgtttctagtcgtagatagtgtttatcttatcgcccaggtgcaccattgggcggatcattgattgtcgttcaacaacgtcccaatcccaaatgttcgcttctcagtcccaactaagtctaaaataagtcatgtacgtaaatcatcacaaactatctgcattctaaaaaaattatattgctaactacatgctatgcatacattgttcaccgttcaccagctcaataaactgtaacgtttatttgtcctttcagttaccaaggtgatgaggcaattgacactgacatacccacactgctggaggcgcgcctgtttgacaccacatttggaaaatttctgtgggtgtgcctgcagccttttttttacattttccgtccactgattattaacccgaagccacctacacgcctggagattattaacaccgtggtgcagctaactttcaacgccctgatcgtttactttctgggctggaagccactggcctatctgttgatcggcagtattctagcaatgggactgcacccggtggccggacactttatctcggagcactacatgttcgccaagggctttgagacgtactcctactacggtccgctcaactggatcaccttcaatgtgggctaccacaacgagcatcacgactttccggcggtgcccggctccaggctgccagaggttaagcgcatcgctaaggaattctacgacacaatgccacagcacaccagctggacccgggttctgtacgacttcatcatggacccagcagtgggaccttacgcacgcgtgaagcgacgccagcgcggcctggcctcctaagccatcgatgctattcaaggtttcctgccatgaatgtaatctcagcgttagacctaaaacggcttttttatgtatatatacaccgtagagacatttacagcggatgcagaagaaataaggggaacaaccacacacatagcaccagctaatctctgtgattagataaggggcattcggacacttgcagcggctgatatgaacaattacgtggatatagtttttggtattattgctagagtgtgagcttagttaggttcgttggcctaactgagaggcactttcgagcgctttaattaattgttacctcataaattggaaagcctgttaaatctagtgtgtaatacttgtcctattatactattgtcttagtattttcgatacatatttatattgctttcagatcatttatgtgcagacacgatttggtgtgatcaatcttaatccttatcgccgccaccctggccgatagcaagccactaatcaagcaaccaactactatttttgatagactcttgaaactgttacctaagaataaagtctaaataatttgaccggggtggctgcatgtacagaatacactataaaatttgtaagcaaactaatgaaataaataacaacatcgtattgtaacgactctgtgaccaattaaactttttgaagcttgcaaagttattgcttacgccgattgcatgtcgcacgtcagtcatgtgggcacagtgctatcaactgataatgataatttcgataagcacctgtggaacgacaaggtaggcaatgcggttatatgaattgcttgccagataactcacaccttggagaatgtgcacctaggagatcgaggatgtttttctgctttgcagccaactggattggattaatcatggcttagttacttaatctatatgtctattgtattgtcgtattgtattctacgccatctggaatgcgatgtattatcaacatgttcctcttttaaggtgctctttaaaagagctttgat

SEQ ID NO: 19448 - DNA, 1083 bp, DROSOPHILA
gttggatgtttggacagtttccttcctcgcgccggtcgataatgttggccaactaacaccgacctgtagcacgtcacccgtaataacccataaccgcaaccagtccaagcatccaagatgggacagaaagtttcgcgcaccgacttcgagtgggtgtacacggaggagccgcacgcctcgcggcgcaagatcatactggagaagtacccgcagatcaagaagctctttggccacgacccgaatttcaagtgggtggccggcgcaatggtgctcacacagatcctggcgctgttcgtcgtgaaggacctgtcgtggtcgtggctcatcgtggccgcctattgcttcggcggcatcatcaaccactcgttgatgctggccgttcacgagatctcgcacaacctggcctttggacacagcagacctatgcacaaccggatcttgggcttcatctgcaacctgcccatcgggttgcccatgagcatttccttcaaaaagtaccatctggaacatcaccgttaccaaggtgatgaggcaattgacactgacatacccacactgctggaggcgcgcctgtttgacaccacatttggaaaatttctgtgggtgtgcctgcagccttttttttacattttccgtccactgattattaacccgaagccacctacacgcctggagattattaacaccgtggtgcagctaactttcaacgccctgatcgtttactttctgggctggaagccactggcctatctgttgatcggcagtattctagcaatgggactgcacccggtggccggacactttatctcggagcactacatgttcgccaagggctttgagacgtactcctactacggtccgctcaactggatcaccttcaatgtgggctaccacaacgagcatcacgactttccggcggtgcccggctccaggctgccagaggttaagcgcatcgctaaggaattctacgacacaatgccacagcacaccagctggacccgggttctgtacgacttcatcatggacccagcagtgggaccttacgcacgcgtgaagcgacgccagcgcggcctggcctcctaa

SEQ ID NO: 19449 - protein, 321 aa, DROSOPHILA
MGQKVSRTDFEWVYTEEPHASRRKIILEKYPQIKKLFGHDPNFKWVAGAMVLTQILALFVVKDLSWSWLIVAAYCFGGIINHSLMLAVHEISHNLAFGHSRPMHNRILGFICNLPIGLPMSISFKKYHLEHHRYQGDEAIDTDIPTLLEARLFDTTFGKFLWVCLQPFFYIFRPLIINPKPPTRLEIINTVVQLTFNALIVYFLGWKPLAYLLIGSILAMGLHPVAGHFISEHYMFAKGFETYSYYGPLNWITFNVGYHNEHHDFPAVPGSRLPEVKRIAKEFYDTMPQHTSWTRVLYDFIMDPAVGPYARVKRRQRGLAS

SEQ ID NO: 19450 - DNA, 2435 bp, DROSOPHILA
acggcctagccggaacttttaactacaatatttattgccaagttagactgtaataaaatattgtaatttaagaaggagtgccttttaagtatgtttcttacgccacgaaccagtctatgaagatgatatatgatttgttttgttagaaactgttacgtttatttcgtttttcccgctcatctgtagatcattgttgttcgcttatttttggactgactcgaatgctggtcaccaaacgggtttaagattctcacagaacctttagatatttacgcctgagaatttactgtgcttccccaggtcgacaaatttagatagtaaagtaaacccaatcctctggtaacatgcagttaataaagtgcgcaaaatcaatcttgggtcactgatcacttaaaatgtgttgactggtctgcattcaaccgtaggagaagtaaatccccattccgggggctggtctcaaaatgtgatggtaaagatatacacggagaaaaataaatcttacatttctagctgcttacaaatattcaacgtcattgaaaaagaatatcgatgaataatttgaagtagcttctttaatgaagaatgttgagttttaccaaaatgtgaaataattacttaaaattttgttttttcgaagacttccaactgacgactaagtttaaaaatcaatatattattaccttattaagattgagctctaaatataatttaatacaaatgtactattattactcggtttttaatttttataattttttgtaatttctggaagaattggggggtttgttttcgacacgtctgggatttccgttgacctcaagttttggtgaaatcatcggcgtcatataataattgccctacgggtttaactaatgatacttggaaagcatatataatgcgctatagaacacttgctcttcacacgggacatccccgggttatttgcctatttatataaaagttggagcccagggtgtttcgattgcagaaagtgtttgatcgtccaatatgaaacagtacctggtgcttgccctcgtctttgcggccattctggccatgatcagcggccatcctctggaggaacaaaagatcacgctggaagatgctgaagcacagccgggaatcgatgatggcactggagttagggccgctcgtcactttggcggcggctttggccgcggaggatattgctgtggaggaggcggtggcttccggcgcggtggtttcggtggcggtggttacggtggcggtggttacggtggcggtggctatccaggtggcggctttggcggatatcccagaggtggatttggcggcggcagtgcatcagcatcggcgtcagcttcagccagttccagttggggacgtaaataaaaatagttaatcactgtaattgaggcgaaaatagaaaaaagtcaaaaaatgaaaacaaaaacatgggacttttcattgggtggcaattgagggactttcggtgtaaagggcgtgtcggtttgcttacgcacttaatcgcaaaaaatacaacgtaatcaaatggaaccggtccgtaaacgctaatcaatgaatacgatccaaacacgatcgatattctactttttccacaaatgaaaaatcttccaaagattaaaattccgatagttctaagccatttaattaaaaatagcacatctggaccataaatttgttggtttttgtttataacattgatcgctagatatgataactgttgcgaaatgcttgcacaactgaaaggaatcgccaaaactgggataatgtaacctgttttcgaacaacacactaattgccaagtcaataaaaagctagttcgattaatttccagatatgtggggttgagacagggtttttgcggttttgttttgatgcacccccgaccagccttgcgatcgatttcttaatggaaaattacccccaagttcctggcacaacatttcaccagaggagttgaactccaggtggcttttgattcatgctgacttacgacgaatttccgactgaatcacacgacatctaattgatgaacgtaaatattttgcactctcgattgtggaatttgcttccttggtaacaggcaagttgtcaacatgattcatgtttatttctaagttttcaatagtgcactcaattagcgcctcccccacaaaacaatttccgacaacaaattggcattgtttcatgcaatatgggaacaaatattttgaagtccgtgaaatcgttgtacgcgtatatgcatgcacctcccatatattaagcggaattgaattattctaaaattgtcggctttttaaaaataacttaaaatatttcccaaaataaacacgcaaagtattcaatcacgctgttgactaattgcggtacagtgatattgtggtttatcacttccaaaagatcctacaacagcaaaaaagtcagaaaac

SEQ ID NO: 19451 - DNA, 435 bp, DROSOPHILA
cgtccaatatgaaacagtacctggtgcttgccctcgtctttgcggccattctggccatgatcagcggccatcctctggaggaacaaaagatcacgctggaagatgctgaagcacagccgggaatcgatgatggcactggagttagggccgctcgtcactttggcggcggctttggccgcggaggatattgctgtggaggaggcggtggcttccggcgcggtggtttcggtggcggtggttacggtggcggtggttacggtggcggtggctatccaggtggcggctttggcggatatcccagaggtggatttggcggcggcagtgcatcagcatcggcgtcagcttcagccagttccagttggggacgtaaataaaaatagttaatcactgtaattgaggcgaaaatagaaaaaagtcaaaaaatgaaaacaaaaa

SEQ ID NO: 19452 - protein, 121 aa, DROSOPHILA
MKQYLVLALVFAAILAMISGHPLEEQKITLEDAEAQPGIDDGTGVRAARHFGGGFGRGGYCCGGGGGFRRGGFGGGGYGGGGYGGGGYPGGGFGGYPRGGFGGGSASASASASASSSWGRK

SEQ ID NO: 19453 - DNA, 2765 bp, DROSOPHILA
atggccaattcatcaaatcgaaaccaattgcaacatctgtaatcttttaattaatatttgacttaacgaattattgcatccagtcgagcatccagcgggggcactaatcaaatgaagttcgcattgctaattcacataaattacaccgcggagaactgtgagctgtaagctgcatacgcggcgtatgcgcaacgcccatttgcatttgaaactcgttgcgcatacgctacgtggtgcactggcagcgacggcagctcttccgattctgttgctgtcaggcagacaaacactgtttgtttcgaatcccgctcggcctccgctcgtcgtcggctcctcctgcccttccagccgccaaatctgcaaatctgggctgctgcactgcatctggctgcggatgctgcttctgccgctgctctgctgtgagctgcagtgaatgcgatttcggtataaaaacgtttgtggcaactgcagccaagtcaaagcacttttgacgagcctcccagcgcagtacccgctatcaagtcgcgaatccgaagtgagtttaagttctagttgcggtggtgactccttgaagacaggatcacacacagatacatagatcagacacataagctacaacttgcgagcgagtgcagagacaagtggagttgatcctgcataaaggataaccaaagtttaaattcaaaagatcacagtcatctcctggatttcaagccccttttggatatttttcccacgacctccaccatcataatcatcataatttcgcagaactttcaaatcgcaaaagccaatcggagtatatcacatactaattgccatgcaacgagtttgacattcaaagacaacgccggcggcatctcaatcgagcgccaaacactgaaaaccatacgccaaacaccaaacaccgcacctcatctgcagtacttacttatgactctatttaaccaccgtaccaccgcgcggttccccccatcttctcttttgcccactaaaggtcatgtcgctcacccacgcctccgccgcagccctcgtcttggccctctgctgcctcagtttcattcaggcgcagccacaacgcggacttcccccaccacgcggcaactccttcgacgcgaacgcggtgattctcaagcagaacttcgacctgaatcccgatggctcctatcagtacaagtaagttggatccagggatggtaggatcaatttcaggatttggaatggataaaaacaaatcgaacaatctgaaattaagttcaattaggatcatatagagaatcctacaaaacattgcattttaatagctttaaaattttttaatatcttcatatgtgagaagctctttggaatcaaaaaaaatcaaggattttaaatttaaatccatgtgtttttttttcttttttaagtgtttctaatgagtattattataaatttttaaaacttgtagctacgagacaagcaacggaatccgagcggatgaggctggctatttgaagaacccgggcagtcagatcgaggctcaggttagtgtgcttttcagtgcagcattcagcatattgtagcctatttttcggtggtgctgaaactctttatttccctgcacttacaggtgatgcagggctcctactcgtacaccggacccgatggcgtggtctacaccatcacctacattgctgatgagaacggataccgcgccgaaggagcccacatacccacaccgccaccagttcgcgccgccgccgctcccggaagattcttcaagtaatccgctccgctgtagaatcgtgttttaattcttcatcgttatgatcaagttggcaatcatttcgttgtgggtcagtgccgaactggccgaaagtgaaccagaaacagacaggagagagagagagagagagagagcagctgctcgttggagatcctttatcccacccataatcatttccattttattcctgcccctgaaaaatctcactaccttcgtgcttcatctgtgcatttctacagccaattcaaattctacattctacttagtgcttaacgaacaatatgtgagattatcatatgtaaattacgtaagatcgattgttaaatgtcgtacggcaacgcatgctcagcaataaaacaaaaattgcacaaaaatcaatccaaagccttgtggtcaaaccacatttaggagaatgatctcagcattgtgatgtaggacatcgccgtgcgaacaatctaaaaacggaaagttagaaaagagtattcatgtaaatccatgtattgtacaatggaaatgattcacccaccgatgagaaggcctccatgtttgcctcgaaaaagtatcccgtaatgcggaatccccgatgagcccgcatcatgctgatcagcaaggatcggcagatcgaggtagaggctccaccagcacccaaactctcgtgccacggactgtcgtagatggcccactcgaagctggcactctccgtcttcaggttctccccgcagtagcagtagatataggcttgtataatgattgtggctatgaatgaggcatagtagacgccctctgtctgggcaaaagtaatggagaacagatatcccagcatgcagagttgcagagatgaaatgaagaactgggcgcagataatcggttggtagcactgattcagatcgttgcacatatccaagctggtctggtacagggcaaagactttgttcaatgtggcctgtgattctttaagggatccgcccttaaatctaaccaccttgtactgcgcaatttt

SEQ ID NO: 19454 - DNA, 408 bp, DROSOPHILA
atgtcgctcacccacgcctccgccgcagccctcgtcttggccctctgctgcctcagtttcattcaggcgcagccacaacgcggacttcccccaccacgcggcaactccttcgacgcgaacgcggtgattctcaagcagaacttcgacctgaatcccgatggctcctatcagtacaactacgagacaagcaacggaatccgagcggatgaggctggctatttgaagaacccgggcagtcagatcgaggctcaggtgatgcagggctcctactcgtacaccggacccgatggcgtggtctacaccatcacctacattgctgatgagaacggataccgcgccgaaggagcccacatacccacaccgccaccagttcgcgccgccgccgctcccggaagattcttcaagtaa

SEQ ID NO: 19455 - protein, 135 aa, DROSOPHILA
MSLTHASAAALVLALCCLSFIQAQPQRGLPPPRGNSFDANAVILKQNFDLNPDGSYQYNYETSNGIRADEAGYLKNPGSQIEAQVMQGSYSYTGPDGVVYTITYIADENGYRAEGAHIPTPPPVRAAAAPGRFFK

SEQ ID NO: 19456 - DNA, 3254 bp, DROSOPHILA
cgcgttggtaaacaaaattatattgataatttccggcactggtacggccatcaatgggttaatgactagcgacagtgagcagccagcgggcagcagccaacccggccaacccttggccaatcgttatgcaagtctggaccaacaataaggaattgccaataggaagttcgtcgtatctacataaaaatccataaacatgaacgtcaacaaaatacctaacggttaacaaccagcatcggcgatgtgataaagtagcaatagcaacgagctctgggccaaaactggaactggtcaagttgcatattaccacagtttgagtttcggttttagctattttcggccgccagcccacgaagcttagggccactcagattttctctcgaaagaaagtagagcacagaagcgaatgctcctcgagagagtgtgttagtgcactgggagaatccgtgtattacaattacaaaataaaagtcttagatttagaaaaacatttttatgcagtatccaagctgctttcgtaaaatatgattttcttacgtaaatatagcaaaaggaatttaagatatcttttagcgatcttaaattggtctacgaaaccggttttgtttatcatgtaaaatattgaaaatggaaaaccaaagatgattgatacacttaagttggcatcacaccatgggatttaaaataattttgagtcacagacccttttttacgttatccgtgtggtattgcaattgggcacatgctggggatgatgatgtgaaaggtcaacactctcgcgatcttcagaaagggagagtgaagactggatggccgagaagaagacgaagacgaagacgcggccagttggccttcaatgggtcgcggtcgtgaagtctccagtggtctggctccacttcattcagctcgtcgtcggcgaaagagattatctctgcacttgctcagcggcaagcgatcgcttatataaccgcatggctcccgagtggagaagagggctataaaacggcgtgtgcccatgtttgccgaatcatttccagtcggtccagaggcgagcaatcattcgagagtccttcgtaacgaatccagagaaatggcagcccgtttcatagtgagtttggcacgacaccacgtcagttcaggtggatcctaacacagattccctcctcccactcccagatcagtgcgcttctgctggctagcccagcggtatggggaaagcccaccttcggacgagagcatgtccacatccgtattcacctgccagagagcggtggggatcacggcggccacggaggcggtgattttggcggccacggaggcggtgattttggcggccatggaggtggaggctatgagattcactcccacgatggcggatacagcggcggtggaggaggcggtggtcatgtgaacacctatgctgttatcaccgagaaccacggatacagttccgggggtggcggaggcggtggaggtggccacggatacagctccggcggatatagttccggtcatgatgatgccaagattgctgccatcgctgctgctgctggctcgtcctccgatcacggacatggcggacatggaggcagcggcggacacggcggaggttatggtggccatgccatcgccaacattgcagccatcgccgccagctcagactcctctgatcatggtggcagcggaggatacggcggctacagcggtggcggtcacagcggaggaggtcatgacacccaggtgattgtggctgctgctgcggctggagattcacatggctcttccggcggatacggcggcggatcctccggtggatacagtggtggctcctccgggggctacgatggtggatattctggtggatcctcttacagcggagcctcctcctacagcagcggctcgtcctacagctctggaggatacagcagtggacatggcggtggctatagcagtggcggcggatccagctatgatacacaagtggtggctgcagccgctgcttcaggcagcggtggctcctacggcgggtcttccggcggcggtggcgacggatacagctactcagcgccggcctcaggcggctgggcaggatccagttcaaactggaagtagacggcaatgtccgtcgttggccatctggtcgtctagtctactgttcacgtttaacttatatttgacatgttcgctcatccatattccacacattctcccaagatactggtgtacaaaataaaccatgttagtgtaataatttaagccagccgcccagtatgtgatttacctaatgcttgcccagtttttgccgatttttctccgcctctttcatcggagctatatagtggcgcttaaacatgtcatagatggagaagtacacggcactcatcagtcctgccttgagtagagtaggcaacattcccttatagaagcctccgattccttcctcccgaaacgtggtggtgatgcagcccaggatcgtagggcactcggggttgcgaccaaaggtcttacgttcctgtttgaaggccatcagctggatgcgctttttaagcaggtccgccgggtacacgatcatcttggccaacacccctgacagcgccccattgagaaacagaaatgcgccgtggatttcctggcgctggtcgggaggcttggccatcaagacagccgcgttgaggtacttgtagaagagaaagtttgcccctaccagcggaaacacctgcacaagcgtgaagggtagtcctcgggaaagtcccatccacccctccatcttatagacctttcgaagtccggtaaaagtgttcatctgactgcggcgcgaggaggggtctgcggccaccatctgtgttcttaccacgtcgaacggctgggcggccacggctcccagacatccggctatgccgccgcagatgaaaaacatgagaaagggtcgctccctccagtagtcaaactggtgggccatggagcgaagctgttcgtaggaccagaactgtaccagagcgtacgaaatgctcagaacctggccggagttgtgaccacggaacataccgcgcattccctcctcggcgtacaccgacttgaaagcgtggatgactccacggtatttggaccccttatggtttgtcaccggctccacttgcatctggaatcggatcttcagaacgtccagcggctgggttatggtccgcgtcgcagctccggcgattccgccgccgacggcctgcattaactggactaccaccgagttttcgggcatc

SEQ ID NO: 19457 - DNA, 1186 bp, DROSOPHILA
aaacggcgtgtgcccatgtttgccgaatcatttccagtcggtccagaggcgagcaatcattcgagagtccttcgtaacgaatccagagaaatggcagcccgtttcataatcagtgcgcttctgctggctagcccagcggtatggggaaagcccaccttcggacgagagcatgtccacatccgtattcacctgccagagagcggtggggatcacggcggccacggaggcggtgattttggcggccacggaggcggtgattttggcggccatggaggtggaggctatgagattcactcccacgatggcggatacagcggcggtggaggaggcggtggtcatgtgaacacctatgctgttatcaccgagaaccacggatacagttccgggggtggcggaggcggtggaggtggccacggatacagctccggcggatatagttccggtcatgatgatgccaagattgctgccatcgctgctgctgctggctcgtcctccgatcacggacatggcggacatggaggcagcggcggacacggcggaggttatggtggccatgccatcgccaacattgcagccatcgccgccagctcagactcctctgatcatggtggcagcggaggatacggcggctacagcggtggcggtcacagcggaggaggtcatgacacccaggtgattgtggctgctgctgcggctggagattcacatggctcttccggcggatacggcggcggatcctccggtggatacagtggtggctcctccgggggctacgatggtggatattctggtggatcctcttacagcggagcctcctcctacagcagcggctcgtcctacagctctggaggatacagcagtggacatggcggtggctatagcagtggcggcggatccagctatgatacacaagtggtggctgcagccgctgcttcaggcagcggtggctcctacggcgggtcttccggcggcggtggcgacggatacagctactcagcgccggcctcaggcggctgggcaggatccagttcaaactggaagtagacggcaatgtccgtcgttggccatctggtcgtctagtctactgttcacgtttaacttatatttgacatgttcgctcatccatattccacacattctcccaagatactggtgtacaaaataaaccatgttagtgtaataattt

SEQ ID NO: 19458 - protein, 317 aa, DROSOPHILA
MAARFIISALLLASPAVWGKPTFGREHVHIRIHLPESGGDHGGHGGGDFGGHGGGDFGGHGGGGYEIHSHDGGYSGGGGGGGHVNTYAVITENHGYSSGGGGGGGGGHGYSSGGYSSGHDDAKIAAIAAAAGSSSDHGHGGHGGSGGHGGGYGGHAIANIAAIAASSDSSDHGGSGGYGGYSGGGHSGGGHDTQVIVAAAAAGDSHGSSGGYGGGSSGGYSGGSSGGYDGGYSGGSSYSGASSYSSGSSYSSGGYSSGHGGGYSSGGGSSYDTQVVAAAAASGSGGSYGGSSGGGGDGYSYSAPASGGWAGSSSNWK

SEQ ID NO: 19459 - DNA, 3636 bp, DROSOPHILA
acttcgtgggagttacatcaaaaggcaagcaaatggggagcaaatttttgctttcaatccgttctatatagcaggaatttcacaatcgactgggttttatctttcgcctagcagcgatgtttgaacagcacgtttattgattattgcacttggacccgctccgccgcttatcgctcgatttcttgtggattccgccgacttagctggttccaccgatggcccagagaacactgtcgctatttgcgctccagagattaagcccccaccgagaaccactaccccactggcatttgtttacgccgctcccgctccagcggctgcgcactttggttccttgattaccaaccccttgactaaccgatttgaaaacaacccgaattttggccaaaaaattccacaacaacaaatcgtcggccaaatggccagcactgttgcaattttcatcgctcgctcacctgctgctcgtctccacgtcatttagcaaacttcggtccgagaacacggtgacggactttaatttcaagttcacacgagacaaattctgataaataaatttaagtaaaggttttatttctgttttgctgctagcaaaataaaccgtaaggcttagtatgacccaagtgcgatagcacgtttatcccgcgataatttagtatatatcgcaagtgcagaaaatacgttactaaacagtttgaatcaggtggcagctctggatttgaatatatatttatccacattcagcttgagcagcataaacgaatattttgaaaacctgcaacattcgcatgaattaaagtttacaaaatagcactataaataagctattattactatttcacatgagaacgttcgtaatagagtattaaaatcatctgagtcaggaagtgtgaccaggcgaggggcacaaagcacttaacttccgttgtgctactgccccactgaccaccgttatcaatttcatttagaccgccgtcaaataagtttgaaaagtgctggcgaaatgttgcaaaacaacgcggtgcgcactttgcaatacgacagtgagatccgtgtggcccagcagccaagtctctcagaaccgagaggtaatttagggcatatggctttagaaaacgaataaaaacagcgagtgaatcaccctggcaaaagggtaaccgaattgttaccaactgataagcagtgcaccggattaattattgttgcgagcgagtgtgtcacacagttcgacgcaaaaatgcggccacaagttggctatatcttatcggccagcgttttgttatggtctgcgactcctcaagtgcctttgtttgggacgatcgaacccagcgatcaatccgatagtaaaaccgtacccatgatattagctgtatcctataccaacattttcctattccaagaaaagtaataaaatatttatgtgacaagattatgaaaaaatcgaaaaactactaaagttttaatctaaacgatttgttataaccacaaaatattttcaataatattgctattactcagagctattattagcagaatgttcaacaaccatttttatttaattcaaattcactgtaaaattatgatcttaaaactacaactttaaatgaaatttaaatttaattaaaatattaaaaactttcaaaattcaatctatggaaaagtttgtaataccctaaagatatggaaaaggtttataaaatcttagttcaaagataacaatatggacaaccttacgattctgctcgtattggaaaatggtctatatacgatttgtttgtttttcttcagtttatgactcccatatcagcattacctcacaacccaggccggaggctccacgcatcccgctgccagtgccaattgccacggttacgggaagccggacgcttatcccactttccggatacgattgcctagcagatctgccgtccgtacatattgaacagacctttgagcttaacgatggtaagtacaagcccaaaaattagctaaaatcgcttctaatagttcgtcttccctttgcagccctaacaggcgtctcctcggagaatcgatatgtggtgcgatctccactgggtgatgccattttcgcggccaacgagagttccacagaaaaaaatcgactactttggggagctggtcgaccctttcagatgcacctgctggataaaacgcaccaggaagctctggtttttcgcaaaaaactagcgatgggatccatgtgctgccaggcaaaaagtctagaaatttggataccacctggtaatttgctgggtaaagtggtgcagtcgcccaccttcatgcagccggagttctttatcgaagacgaaagcacaggacaactaacattctgtgtagagggtcctgtcggtttaggattctgctgcttcagtttgcccaaagattgttattttaaggttggtagtagctttaacattcggaacagaatattcaattatagtgtttttgttcccttacagatccattcgggaggcaatatgagggcttccatagaccacaaatggctcgccagcaagtctcagtacaccacaaatatatactttagtgacgccaagctaaccgccaaggagcgggctttgatactgggatcagcctttctactggtactgtgctcctagtttatatacatatatcatttgccacaataatgttttgtattcgtttttcaggaatatctattcttccaaacccgcttttgacgtgattaatcaataaaaaaaaacattgtatattcacattgatttctttattttttgtcatttttttgtataagattttatgtttgtttgtgttttgttttttttttttctcagttttttgatatattttacaataatgtaatagatcacttcattttcttgttgtttaaccacatacacacattcaaatatatagatatatatctatgtgtatatatagattttgctgcagcgcttgccatagcagtttgtacaatatttcatttatatctatcaactttgtgtagtttgtttatctaacctaccgcttaatgcatatatgacaacatattgattatttacagttagcgttttttttcatcatttcgtttctcttctgtcaaatacaaaattaaaagaaacaattaaatgagtctcgtggtctcgttgtttaaagaattaaaacaaaactaggggcgcaagtcatttctcattcaccgttaatagttgcgcttcaaaacttggtgtgataacaatttgaaataaggaagaactacgtgattttcaaagggcaaaacttggatttggacatagaaaaccaatatacttagtgtgcgggtgtgttctggttcggtttggaggttcattttcggggctaggccttaaaaataacacacttctctcgctctcggatctttacatttgtagatagactcacagcacttcaggagtttttgcatttatgcatttcgaaaacaaattatggttaagtgtatacaatatagatagatttataagtgtgctcgttggttggcttataactagggctagctgatgacgattccttaacctaaatacttaagaggcagatcgaaacgatctgtgtggggtgactgccttttaaaaccgtaaaaggctttgtatatgattattttagcgc

SEQ ID NO: 19460 - DNA, 762 bp, DROSOPHILA
atgttgcaaaacaacgcggtgcgcactttgcaatacgacagtgagatccgtgtggcccagcagccaagtctctcagaaccgagagtttatgactcccatatcagcattacctcacaacccaggccggaggctccacgcatcccgctgccagtgccaattgccacggttacgggaagccggacgcttatcccactttccggatacgattgcctagcagatctgccgtccgtacatattgaacagacctttgagcttaacgatgccctaacaggcgtctcctcggagaatcgatatgtggtgcgatctccactgggtgatgccattttcgcggccaacgagagttccacagaaaaaaatcgactactttggggagctggtcgaccctttcagatgcacctgctggataaaacgcaccaggaagctctggtttttcgcaaaaaactagcgatgggatccatgtgctgccaggcaaaaagtctagaaatttggataccacctggtaatttgctgggtaaagtggtgcagtcgcccaccttcatgcagccggagttctttatcgaagacgaaagcacaggacaactaacattctgtgtagagggtcctatccattcgggaggcaatatgagggcttccatagaccacaaatggctcgccagcaagtctcagtacaccacaaatatatactttagtgacgccaagctaaccgccaaggagcgggctttgatactgggatcagcctttctactggtactgtgctcctag

SEQ ID NO: 19461 - protein, 253 aa, DROSOPHILA
MLQNNAVRTLQYDSEIRVAQQPSLSEPRVYDSHISITSQPRPEAPRIPLPVPIATVTGSRTLIPLSGYDCLADLPSVHIEQTFELNDALTGVSSENRYVVRSPLGDAIFAANESSTEKNRLLWGAGRPFQMHLLDKTHQEALVFRKKLAMGSMCCQAKSLEIWIPPGNLLGKVVQSPTFMQPEFFIEDESTGQLTFCVEGPIHSGGNMRASIDHKWLASKSQYTTNIYFSDAKLTAKERALILGSAFLLVLCS

SEQ ID NO: 19462 - DNA, 8377 bp, DROSOPHILA
gataagtgctgtgtgtgccaccaaaaagcaaaggcggaggaaaatgaaaatgaactaaaaacaacacctggtgagtggcactggaatcgtcagtcttccgcaggagtttccaccgctcggactggaaatgatcggccgccagcaagggctagatagctagacctcgagccagagctagagaaaagaagagcgttacctgttaattattagtgtacattagataaggcctatgtgaagcactcgccgcttatcgctgccattcccatacccgaacgcgctcccgctcccattccattcggtttagttccgtgctccagtgagaagccaccatgtatccgtattacgagcaggactggagcgttctgccgccggagaacaatcgcaggtgagatgaaatcccgcccggtgctcgttcatacccttaaagattcgccagtcgatctttagaaaatgagacttttgaaagtgtttttcaaaaatgacgttatcgcagtgtgaccgtccattgaccgctctgcatagcggtattttttttttatttgtgctgtggtgtggcaaaagaaaatcgttgaatcaccctgtgtaaatgcaatttattgtccccctattatctcttttattttggtaaaactgccccttctctactggcattccatgtgagttgttgcggttcgaatgcaatgccatggaaatataattaagtgcatcttttactttgataaggcaatcaaattaactgaacgaatattaaactcaaactgttacttatctctcagataaacacaattaatttgtaatgatttatgcctcagtcttgatattttccgtataactatttgtttggttgataaatcattgaatacctacccactgtgccatcaaatgcgctaacgcctatcagcgcgaggcgttaatgccttttgcgcacactgcttgtaaatatcgcgctctcgctcgcacccactaccactgttgcgctcatcatcaacatattctcgacgaaacatttttttttacttgttacgttgattttgtggcgtttaaaatagcgattaaccagcgccaagttggcccagcgaacatgtgctaaagcgtaaatgcagtgctagaataggcatttattcaattgcagaatcattccagttaaaagcgaaggtgtgtgcgtgtacttgcgacgacgggccgtgtgtgttgaaattttttttttagtttttgtcgcgttgttaaattttatagttgaaaaaagctaacgtgtttcctgattattcattaacaaaaaaaacgtaacgccgccaagtgcgcgaatgcatccaatttgttaaaacggaaatgcccgttgaaaagtgtgccatagattttcctgcccttttcttgttggcccaaaaggcatgcatgagtgtatatatgtgtgtgtgtgcgtgagcaagtgtgtgtaggccttccagcgaatcgcataaattagcaggcgaaaaatcacattgaaaacaaacgaggaaagctcgcaagaaaaaaaccctacgtgttaaatatatactatagggtatataggagtgaccgttatttcatgactttttaatgcaatcgatatgtatgtatgtatgtcagttatgctatcgctggcagctgttttcgttttttgcccagttcacttaataaaatattaagtggacatcagtaaacaagttggatttttcgggcttactgcttctccttttccaattggaaaccctttgcgcgcgtatgaatgtctctattaatgtgtgtgcgtgtgtgtgcattaatcatttaatcaatttgcattgcgctccaaactaaagtgaataaagcacagtaatttgttgttgccttggccagaaagagagatcaaacgtatttgtttgagccaactcacacacacccacacccatgcacgcatctgagatgtcagtttcataacaacagcgatctactttatgtcagcggtaattgtacctgcttttatttaaactattcagcttattttttccaattccattagcttggaaagagagcaagcgagagaaggatagagagtaggagagcaagtgcaacaaaatagcggccggctgttattccctgtgtgtgtgtgtgcgcgcgtgtgtgtgcgtttgtgtgggagtgcaggtgtgtgtgcgcggaagatctgcagaggaaaaaccgttatttcgtttcgctaatttgtgttgttgccccgccgcaacagcaacaaaaagaaaacagaagagcacataagccggcaaatagttaacaaaaccagacgtaatagaatataataataataacaaaaatataaataaaaatacgaaccagtaaaagaaggagcaaaaaaaaggctgccacacaagtgattcaacgtttctcgtcgccacaatgaactccgagcatgggtaggatcctaaacagcagtgcaaacatccctagaattatgcccatataaacccatttaacctcttcctccggcagatttaatccagccttcaatatggccaccatacggcaagcattcacagaggcggtggagagaggtaagtccaagacagtgaacaccacttggtagattgctccaataagaagatgatcgtgtgcttgtgatcacccaaaaggtggctacaagtacgctgcactccttattcattcagatatatagttatagttctattaatgacctgaaacgaaggatacaggcaggggttaagagagaaagatcagcggccagacagacaaaaacccgattaattaacatattcacatccacttctcgcccacagtcagaatgcctacgcccacacgcctgcgcgacctcatccgacagattcgcgccgccagaaccgccgccgaggagcgggcggtggtcaacaaagagtgcgcctacatacggagcacgttccgcgaggaggactccgtctggcggtgagtcatctacacccggttgcaatatacatatgtatatactatatatatatatatattcgcccacagctgtcgcaacattgccaagctgctgtacatacacatgctcggctatccggctcactttggccaactggagtgccttaagctgacggccagcacgcggttcacagacaagcggatcggctacctgggcgccatgctgctgctggatgagcggcaggatgtccacctgcttatcaccaactgcttgaagaagtaagctttagtgggcggtctaattttgcacttaatgcactaacttataacacaatctcaattgcagcgacttgaacagctcgacgcagttcgtcgtgggcctagccctatgcactctgggtgcgatcgcctcaccggagatggcccgagatctggccagcgaggtggagcgtctgatgaagtccccgaacacgtacattcgcaagaaggcgacgctgtgcgcctttcgcgtcattcgccgtgtgcccgagctaatggagatcttcttgccggccacgcgttccctgctcagcgagaagaatcatggtaagcatacctacagtaaaatgagtttatcgacgatgatcaaactaattcgtaatattatctgctacaggaattttgatcactggcgttacgctgatcacggagatgtgcgagaacagttcggacacgctgatgcatttcaagaaggtaagttgacatggtgccggcggcggcggcggagtcatgtcctcggaatcagtggccttctacttcatcaactgccactgctgctgctccagctgcatctggttttaatactcctcattaatgtggcgctcgataaaatgaaagaaagaaaaaaaaggcaaacgcccccaaaaagcgggttccaaaccaaagcaatttttgtgtacaattatcgcgcccatttgccatttgccattttagccgtagtcgatataccataattatcaatcatatttttatcccgctatcacccattttgcccgtttatatattatatgtatatataaaaccttaaaattaaaaaacgtatcttttcgtttactttgccgatttttgaaacacaccccacccacactccttatcgtttcgatcgacctgtatacttacgattttttaacgcttgtttgtttttgatcgaattcgaataccgcgcaaaacacaaaatgaaatttgttgtaatttgcttgccaggatagcggaaatcgagaggtatgattgttgcgcctaactagaaaatatacctgtaacgccttctatatttacctaataccctacactatgtataattacgtaaaaaaaaacaatgtctaattttgtaagagtttcttgctgtgttgcctatgtatatgtctaagccagcgatatctagtactagtactagtactaacatttaaaatataatcaaaaataatttaaaaagcttggttatctagcttatgataactataactataaactatttctgataacaagatgctgatagtaataatttatcttatcggtcgcagcttgttcggttatcttagacattacaaaatgtcatttgaaaagcgtttgctttaaagaccattcaatttgaatatgaatgtatcatatacatatgcgtatatatgccttgctttgatcagctgcatctgatcgtatataatatcctgctttttctataaatcctgtgatccatacaaccatttcgcttgcacagacatatgcataatcatggccggcggaaattcacttttggccaagagttttcgatctacactaaattttttgctaggattccctccacacacacacacacacacacacacatgacctgtacataaagggtttttttttccgtagatggccatgtctcaagagttttttgttttgagccgggccttagaactttctcgtttcatttgcacacttgcagttcttaaagttctttgtccttcacacgaaacaacgcacactgaacaaaatttgcacaccctttattatacgctcactgtcacaaacttttccgtatttcccgcattaaattagaggcttttagcattctgcattgtgtaatggctttgtttgaatgatcccaccagattgtgccgaacttggtgcgcatcctgaagaatctgatcctgggcggctattcgccggagcacgatgtcagcggcgtgagcgatccgttcctgcaggtgaagatactgcgactgctgcgcatactgggccacaacgatccggacgcctcggaggcgatgaacgatatactggcccaggtggccaccaacacggagacgagcaagaatgtgggcaataccatcctctacgagaccgtgctctccatcatggacatacggtgagtggcttgattctttttcatttcgggcttttttttttttttgcgaactgagtgaatttattttgccgacagctcggagggtggactgcgcgtcctggccgtcaatatactgggacgattcctgctcaactcggacaagaacatacggtatgtggcactgaacacgctgctgcgaacggtgcatgcggacacgtcggcggtgcagcggcatcgcaccaccattctggagtgcctcaaggatccggacgtctcgatccgtcggcgggcgatggagctatcgtttgcgctgatcaatgcacaaaacatacgtacaatgaccaaggagctgctgctcttcctcgagaaggcggacgccgagttcaaggcgcagtgcagctcgggcatgatactggccgccgagcgttactccccgacaacgcgctggcatctggatacgcagctgagcgtgctgattgcagcgggaaactatgtgcgcgacgacgtcgtctcctccaccatccagctggtgtccagcagtcccgtcccggagcagacgtacatcacgaaccgtttctgggagtcgctgcaggtggccaatcattgcgaggacaagcagccgctgctgcaggttgccgtctgggccataggcgagtacggcgatctctttatgtacggcgccaacgaggatggtatgttatctcgctaatctccttgcctcaatccaattgttaatcatcgtgtccaaattatagagtttgaacggcccactgagagtgatctgatcgctgtgtattataagtttttaacctctgctcaagtctcgaccacaagcaagcaatatgctctggtctccctagccaagctaagcacacgtttgcaacagtgcgtggagtaagtaccatcactttccacatccacgatgataggccaactgatgcaatctcttttcatcacagggaaattcaggcactgatcacgtcttttggtagccatctgaatgtggatctgcagcagcgaggcgtggagttcacacagctctttggccattacaagcatctgcgtccaccgctgctggaaaagatgccggccatgcagatcagcaggattagctcgcagaatggcgagagcggcggtggctccttcgacgacaacagtcccgatgtcatcgaaaatggcgtggaaggaggcggcggtggcggacactcacttatcgaaagcaatatgaacacccttggtgacaatacggtatgttgcgttatgcatcctatcgaactgattttcatagacactccccccctcccccatctcttacagaacattttgctagatctgctgggcagcacggatctctctgcgggaggagctggtgatttggtggcagccacggatctctcgaatgccgtgcataaaaagaactcgcgcaatgccaacgatgtggtggcgcccgtttccaataaccaggatctgttggatctgctcgatctggatctatcggcgccctcgtccacgacgacgggtgcgccagcgggcggaggaggaggcggtggcattgtggctctggtgggcgataataaccagagcagtgcggcaaacatgaataacatgctcggtggcctggacttgggcggctttggatctggtctggacagctctgccagcatacccacaaacggcaacgatttggccagcatgctgggtggcctgggtgccccgccggctgcatcaccgtctctggcggcatcagctcccgttggcaaccttatcgatggccatgccggcagtctgctggccgatctgaatcccacggctgcctccaacaatgtagtagtggttggtgtacccatttccattcgctaatcatttgttaatcactatttttgcagcctccacagggtcccaggctgacggcgctggacaaggatgggttactcgtgcaactggtttcggtcaggggcagcgactgcatgcgcatctatatgacgaccacgaataactcagacaataccctggatcagtacttgctgcaggtaaaaaggcttgcaatatctatgtgtatatcaatcgattgacacttttgaatggatttcaggcggctgtgcaaaggagtttccagctgcagatgctgacgccatctggttccgtgctgccgcccggcggagttataacgcaggagatgcgcgtggtggccacgtcgaatgtgagtagtgattattctagtgatatcttctacttcaatcaattgcaaattgtcgcataattttcaggcgacactgcggatgcgtttgcgcatacagtacgtgctcgatggccagcagcaggtggaacagacggaggtcagtggattccccgagcagcagccggcgccggcggccgcagagtagaactgcgattgtattaaagcgaaaccagattagcctaatatcggaaataattcaatacacggagcagcagcaacaagaacagcagcaacactaaggaaacacacacacacacactgtggttgtcacacatttattgtaaaataagttatcacacacacacacacacacacggtgaaacacagagacacccacgcaatcgcatctagatcagagcattttccaaatcggcgcacagcgttgttcagactcagactgtttgttttttttttttttagccgggttagtctccagtgggagctgggtagctgagaaaaaatgagggcggtggggtggttgcgacccgcccaaaagcagttaacttatatattttcactaatttatatctatacatatatatatatataaacatactacttgtcaaatcaatcttaacgttcgccttgttttattattaataattctctcagtttaaatggtgtgtaaactcttgtgtgtaaaagacaactttcagttttaagttaagacaataaaagtcaaccccactattccccatattatatggcaaataacaaaggcaaagaaaggaaaggaaaggaaaatttaagatatgtattaaaaccgattgtgaaattatgtagcagaagcatttaaaaagcttagcattttaatagcatcgaaatggagagcgagttgaacgattttgtttgatgccatt

SEQ ID NO: 19463 - DNA, 3214 bp, DROSOPHILA
gaaacatttttttttacttgttacgttgattttgtggcgtttaaaatagcgattaaccagcgccaagttggcccagcgaacatgtgctaaagcgtaaatgcagtgctagaataggcatttattcaattgcagaatcattccagttaaaagcgaagcaacaaaaagaaaacagaagagcacataagccggcaaatagttaacaaaaccagacgtaatagaatataataataataacaaaaatataaataaaaatacgaaccagtaaaagaaggagcaaaaaaaaggctgccacacaagtgattcaacgtttctcgtcgccacaatgaactccgagcatggatttaatccagccttcaatatggccaccatacggcaagcattcacagaggcggtggagagagtcagaatgcctacgcccacacgcctgcgcgacctcatccgacagattcgcgccgccagaaccgccgccgaggagcgggcggtggtcaacaaagagtgcgcctacatacggagcacgttccgcgaggaggactccgtctggcgctgtcgcaacattgccaagctgctgtacatacacatgctcggctatccggctcactttggccaactggagtgccttaagctgacggccagcacgcggttcacagacaagcggatcggctacctgggcgccatgctgctgctggatgagcggcaggatgtccacctgcttatcaccaactgcttgaagaacgacttgaacagctcgacgcagttcgtcgtgggcctagccctatgcactctgggtgcgatcgcctcaccggagatggcccgagatctggccagcgaggtggagcgtctgatgaagtccccgaacacgtacattcgcaagaaggcgacgctgtgcgcctttcgcgtcattcgccgtgtgcccgagctaatggagatcttcttgccggccacgcgttccctgctcagcgagaagaatcatggaattttgatcactggcgttacgctgatcacggagatgtgcgagaacagttcggacacgctgatgcatttcaagaagattgtgccgaacttggtgcgcatcctgaagaatctgatcctgggcggctattcgccggagcacgatgtcagcggcgtgagcgatccgttcctgcaggtgaagatactgcgactgctgcgcatactgggccacaacgatccggacgcctcggaggcgatgaacgatatactggcccaggtggccaccaacacggagacgagcaagaatgtgggcaataccatcctctacgagaccgtgctctccatcatggacatacgctcggagggtggactgcgcgtcctggccgtcaatatactgggacgattcctgctcaactcggacaagaacatacggtatgtggcactgaacacgctgctgcgaacggtgcatgcggacacgtcggcggtgcagcggcatcgcaccaccattctggagtgcctcaaggatccggacgtctcgatccgtcggcgggcgatggagctatcgtttgcgctgatcaatgcacaaaacatacgtacaatgaccaaggagctgctgctcttcctcgagaaggcggacgccgagttcaaggcgcagtgcagctcgggcatgatactggccgccgagcgttactccccgacaacgcgctggcatctggatacgcagctgagcgtgctgattgcagcgggaaactatgtgcgcgacgacgtcgtctcctccaccatccagctggtgtccagcagtcccgtcccggagcagacgtacatcacgaaccgtttctgggagtcgctgcaggtggccaatcattgcgaggacaagcagccgctgctgcaggttgccgtctgggccataggcgagtacggcgatctctttatgtacggcgccaacgaggatgagtttgaacggcccactgagagtgatctgatcgctgtgtattataagtttttaacctctgctcaagtctcgaccacaagcaagcaatatgctctggtctccctagccaagctaagcacacgtttgcaacagtgcgtggaggaaattcaggcactgatcacgtcttttggtagccatctgaatgtggatctgcagcagcgaggcgtggagttcacacagctctttggccattacaagcatctgcgtccaccgctgctggaaaagatgccggccatgcagatcagcaggattagctcgcagaatggcgagagcggcggtggctccttcgacgacaacagtcccgatgtcatcgaaaatggcgtggaaggaggcggcggtggcggacactcacttatcgaaagcaatatgaacacccttggtgacaatacgaacattttgctagatctgctgggcagcacggatctctctgcgggaggagctggtgatttggtggcagccacggatctctcgaatgccgtgcataaaaagaactcgcgcaatgccaacgatgtggtggcgcccgtttccaataaccaggatctgttggatctgctcgatctggatctatcggcgccctcgtccacgacgacgggtgcgccagcgggcggaggaggaggcggtggcattgtggctctggtgggcgataataaccagagcagtgcggcaaacatgaataacatgctcggtggcctggacttgggcggctttggatctggtctggacagctctgccagcatacccacaaacggcaacgatttggccagcatgctgggtggcctgggtgccccgccggctgcatcaccgtctctggcggcatcagctcccgttggcaaccttatcgatggccatgccggcagtctgctggccgatctgaatcccacggctgcctccaacaatgtagtagtgcctccacagggtcccaggctgacggcgctggacaaggatgggttactcgtgcaactggtttcggtcaggggcagcgactgcatgcgcatctatatgacgaccacgaataactcagacaataccctggatcagtacttgctgcaggcggctgtgcaaaggagtttccagctgcagatgctgacgccatctggttccgtgctgccgcccggcggagttataacgcaggagatgcgcgtggtggccacgtcgaatgcgacactgcggatgcgtttgcgcatacagtacgtgctcgatggccagcagcaggtggaacagacggaggtcagtggattccccgagcagcagccggcgccggcggccgcagagtag

SEQ ID NO: 19464 - protein, 951 aa, DROSOPHILA
MATIRQAFTEAVERVRMPTPTRLRDLIRQIRAARTAAEERAVVNKECAYIRSTFREEDSVWRCRNIAKLLYIHMLGYPAHFGQLECLKLTASTRFTDKRIGYLGAMLLLDERQDVHLLITNCLKNDLNSSTQFVVGLALCTLGAIASPEMARDLASEVERLMKSPNTYIRKKATLCAFRVIRRVPELMEIFLPATRSLLSEKNHGILITGVTLITEMCENSSDTLMHFKKIVPNLVRILKNLILGGYSPEHDVSGVSDPFLQVKILRLLRILGHNDPDASEAMNDILAQVATNTETSKNVGNTILYETVLSIMDIRSEGGLRVLAVNILGRFLLNSDKNIRYVALNTLLRTVHADTSAVQRHRTTILECLKDPDVSIRRRAMELSFALINAQNIRTMTKELLLFLEKADAEFKAQCSSGMILAAERYSPTTRWHLDTQLSVLIAAGNYVRDDVVSSTIQLVSSSPVPEQTYITNRFWESLQVANHCEDKQPLLQVAVWAIGEYGDLFMYGANEDEFERPTESDLIAVYYKFLTSAQVSTTSKQYALVSLAKLSTRLQQCVEEIQALITSFGSHLNVDLQQRGVEFTQLFGHYKHLRPPLLEKMPAMQISRISSQNGESGGGSFDDNSPDVIENGVEGGGGGGHSLIESNMNTLGDNTNILLDLLGSTDLSAGGAGDLVAATDLSNAVHKKNSRNANDVVAPVSNNQDLLDLLDLDLSAPSSTTTGAPAGGGGGGGIVALVGDNNQSSAANMNNMLGGLDLGGFGSGLDSSASIPTNGNDLASMLGGLGAPPAASPSLAASAPVGNLIDGHAGSLLADLNPTAASNNVVVPPQGPRLTALDKDGLLVQLVSVRGSDCMRIYMTTTNNSDNTLDQYLLQAAVQRSFQLQMLTPSGSVLPPGGVITQEMRVVATSNATLRMRLRIQYVLDGQQQVEQTEVSGFPEQQPAPAAAE

SEQ ID NO: 19465 - DNA, 11046 bp, DROSOPHILA
tttaaattatagaattatatatcttgttgggggaaggtatcgtgagggaaaatgtttttatatttttggatcattcattgaaatcaatcgtacattactgcttaatgaaataaaagtgttatccttaatatgtttagggctctgttttgtttccgttaacgtttatcttgggttgcttgcaattagaacctgcacatttgtcagcttgagtttttatacacatttaaaaaatgattttacaaagtgtttttcgtttttttgtctgctttttcaattgcataattctaagcactgtgtttattgttgtacgttaatattaccaagatgttttgcaatttttttgtttcgttttttttttgtaatttgtttttacttccacgtttgttggatttctagtcaacttactaattataaattaaaaattatacacttttcattgtattttaaatgtaaacttaaatgtatactgaattttagtttttgtatgatcgttttattaacaggattttgttttcgtttttttttttgtttcttttttatatattttaatttggggcaataaacaagaacatacaaagaaagggagagtctacaaggcgccacgcgtaaaagtggaagattcttaatgtttgagggtttttgctcgcaaccttaagtaaacaaaaatgtacaaaagtaaaacgagagtcgccttcgcctttgattaaaggaaaaagtcaaataaaacgtaagaaaactttgcgtgcgcactgaaccaaaactcgagaggcgaacacaaaaagtgaattaaattaacaaaaactaagaatagcaggtaatggtaaaatatattataaaattaaaagaacgtttaacgaacgtaaaaatgggctgaattgtacaaaaacaaatagttgtgttgctttgtttgcatttcatatcttttgcttaattattaatccctattctcgattcttatttttcttctgttttcttttttgtagttcttttcttttttttttctgacgttttctttcaaatgtgttttacgttgttaatgcgtaaatatagcgataattggtaaatatgtactacaaaaactctcaagtgactttactaaacttagtaaataccggtagacggcctttatcgggtatttagtagtacatcatgcgtaaaacacaatcggctgttactgcacctcctggactctatatacgttactctaccgcgccgattgcaccgcccgctgcttgcccggcgtcgtcgtggacgccacgctcatactgtgaccggagccctgtgttccgatggcaactgtctttgtgcatcgaatgcagatatagtcgtcgtcgggctttatctggctgcgattgaggcccacacagtacatgtggaaccattcgttgcagccgccgtcgcactgcacccagtccacctctcgcccggttggcttgtggcagttctccgcccggcactcctcctcgtcgtcctcctgcgccgcctgttgagaccgttgcgcgtgcttcttctgaccgccagtcgcattattgcctccagtagctgctccctggccgctggtggtgttgctgttcaaattggtactgctgttgctattgttcgtgctgttattattattgttgttgttattattggtggctgtggttgaggtgcgctttcgctttttgtgcgtcgagccgggtgtgggcgtcgtcgtcgcagaattgccaccacctgatcctgtactggagttcgtattaccgccgttggcctgcttattctcggcatcggcatccgcacccggagtggtggatgctgctggcgatgccttggcatcgctcttgcgtgccgctgccgctgatcccttcttgcccggtgtctgcttcggtgtgctctgcttcttgcgcggcactgccgagttgccgccggtgtcgttggagcgcctcttcttgttgcgtccgctgttgctcgcagaacccgttgccccgccactattgctgttgctattgggactattttgtaccatcagactatcgttagagtcttcggcgccggatgttggcagcggatttgtatgctgttgccgctgacgctgcatgtactggacaacacgctccatggcctccgcctgcagcaacgtgggcggcatcgtttctagaatgcgccacagctcctgcgtttcatctaaggatacctctagcaggtcgccctccatcatcaggtcaagcaaattttcaatttcactgtcggacagcagcttgaggagatcggagttgacggtggaggtcgcgggggcggtacgaggctcatcttcatcgttactaaagttgtcttcgacgattcgaagacgacattcgtcctcgtcgtcatcgtcgtcggcatcggactctgttgaaccacttgcctctttcgtcaggctcccccgtcgacgtggcttccgtggactgctgatatttcccacccctgctccaccctcggagcgccgcttctgctgctgctgcgccataatcgcttcttgagccgcactgacgtcaggactgctaagagctttcctggcccgatcctgccagttcatcgcacgctccgccaggcaacgcaacgcttcgtcctcgggcagacggatgggcagttgctgcagctggacaagtagcggaaggatggtttctaggcgcggtctcttcgagcgcacacagctcggacatagccacttgggtcgattggtacctggtcctgatccgccgttaacaattccattttgatttgtggctgatggcggtgggacgcaatcctcgtgaaaccaatcgcggcacaactgacaattgaacattaagtttcggaactcggacttgcacaagcagaacatatcgcgcatgggattcttgttcatattttgccgccgaagttcgcgcatatcgagcagctcctgctcctcagcgtgcttgaagctggccacaatctccgccggatttttctctttcagaaaatcatcctgcaacaataaatagaaagatattagtgaacggatgggtttggaattttagtgtcatatttacctggaagcgcggcttgagatccgagtctatgttgatggcgtccgaccggggcatgagaacctccaagagcgtatagaaggtgcccttcttgaggaaggcgcacgctgtattgtccttccattgatgtgcactatttaggtgtccctgcattcggctcagctcctccagctggatgggtatgttcaagccgcgctcgatcattgcctccagtgtgtggcaatatgtgacgtggttgttttgctgtagctgctcaacggcccgtagccactcacgcgcctttcgtagtgcatccttcagcagtccatgcgaaggcacttgaccgttgatgtcggaggccgatttcaagaactgctcaatttcgcccagttcgtgctgttgggtcagtcgccggaaatacttggccgcctgcgactcccaggcttcgatatctgcaccgatctgttgcaattttcgcatctccttgtcgacatacggatccgtgggatcaaggtcagcagccgcaatgtgtaacaggttcttcacgtcttggtaggtcagcttcgagctggtctccctcaatccctgcgagcgcttgtaccacttgcactgcttcagtcgcttttgcagtaggtcgagctgttgcagttcgatgcgtaaggagctgccttcgtttattaacgtttccagctcactctcctccagagactccagcgataattgcagctggctctcggaccgctccacaaactgttttcccaaaacaagcagctctcgcaccgaagcgccctcgtcaatgatgcagcagagattatcgatttcttgaacgaacaactctagctcctccatggttagcttgtactgagcagcctcctggttgtggtccgagcgagttcgcacctagtgattggatatggaattagaggcatataactttcggtaagcttggatgacgatttaaacggatatttggtttagaatgaaagatagattctcaaagataatgagtagaaaatggaaacttaccttattgatacccagttgctgtatgactgtgacacatttctctgcctcaacggccgcagcattaaggcgatcgatgagcagcgaggagggaaactttttcgtctcggcctccttgcacaattcctgcagctcctgcagggtcaccgaggtgggtgtatgtgcatcgactatgtcacggcaacgtgaaagccatcgctcgaagctgtgcgccttcaccttaagtttctgcagcatcagcggcatctcgtccagtgtataacgatatatcagagtgtgcttctcaggagcacagccgcagagtaccgtatagtggcgcaaacagacaatcaacttgtcgttgcactcgcaggccaccgccgacaggaagcacgtggtgttgcactcttggcaatggcgctcatcgtcgtttactagctcgaaggcgcgacgctctgcgcgggtaacgccccactccaaaagcgatttgcgcagtttcttctccgtgtcgaccatttcggccatgtcgatgtagcaggcagtagcgatgccaaatgtgagtttcgctggctccagggccatcttgcaaacgagctcgtcgtgcgaaaagacacagaaacgtcgcagcatggaatagtggttaacacactcgcgccccatcttcagccaatcggcaggtgcaaaattgacggcctccgcgaagttatagccttggttaaagcctgcgtgataggccctgggaaaggtgatcacaaactcgcctgcatgctgatcggttcggaataccggtacacgattgttcatcaaaatgttcgggttcataatggtcaccagctggtgaagcagatcgggctgtgatgaaaaaagttctggagctgcctgcttcatggtctcttcaaactgctcagcacaggaccccggaacaccgtaccaggttttaggttctccccagtgaagatagttgatggagtagctccagtggtcctcgttgtgccagcagaaggctgcgaagcacatgcccacatacatccacggagcgttcatgccgctaatgtcggcattgatgtgaccaagaatggaatcctccagcaacggcaagttgttaaggttccagcttgactctgcatactcttggtcgcccggcaacaaatataacgagctcttagtgggaaaaccagagccgtgatccattgtgtgcaagtccgccccatactcaacggtaacgtcttcatcgatagatgacacgatgcgccaaaactcgcgctccaccatctcagtgggcaccaagtgcaccggcttgcggaagtattcttgcttgaactggtcagccatttgtccaaattgttgcagagtgtattccctctctgcctgttcaaaaccaaacgcctcctgcggtttgcttacttcctcgacgacgcagcgcgggcaaagccattcgcctagaacgattaaaaagaaaaggtttattcgcattagtgcatgagacacggttgtaacttcctaatcgacgtaatgtaaaattgagttgttttaagttttaaaacggtttttttgttagaaactttttgataagaattttacctttgggtatgctggtcagaggcggcaacaggcaaaaggtgtggtagctgtcgtcgcagccatcgcaaagcagcattgactcctcgacgtcgccgcgattgcagatgtggcaaatgtacttcatcagtgggtctacgataagtgctggaggctctcctcccttcttctggctggctccgcgagtgtttgccgtagtacctgtggctaatggcgatccgccgctgttgacagcattgaaactgctgagaagatccctcttaaattcttccttggtctccgtcttgacaaatacgcccgctgatggctttgttgtgggtgtaacaccactcaggccgcagctggcattggaatttccgaaacgcttggagcgacgtgtgtttgtctcgttgggcggcgcaatctgctgccgtgtgggaatttcatgggctttgtaatcggttccacctccgtcctccaatttgacgggtgtgctaccagatccagacgacgttggtgtgggtcctagaacctttcccgaagtgtatacctcaaaggggtgcaagatgcgttcgtagtgtgccttcagggttgcgccaacacttttgcttgaggggtactgcatccggttggccaccttggcccacttgcgatcctttgtggtttgctccatgcccccctcctcctgaacgatgcggtgcagtgtgtacaagtcgagagcctttcgctccaccattgggatctttagtgaagagccttgcagctcccagaactttgcgatctgatcaaggaagttgagtttgacgcgcgtctttgcctcgagctcattcagccgctggacacgtggcacaaagcgtagcttgtccacgtccactgcaaacggcggcgaccaggttgccggcggcaggatctttgcgattccacacttctcagctatggagcggatcttgctgatgtaggccagtggattcttgaactcctcagttgtgggccggaacacagggcactctggcggcgtgtcaaagtggaactcctcgttctttccctggtcaaacttgttgctgctgtgcggctgcgtgtggaccgacttcttgtgcccagtgggcgcaggcgtgggcgtgggatgaggacaactattatggtactttttgctggctgacacactgctgctggcgtgattcatgggaacactgggcataggccgttccattaccgccggagaaatgcctggcggagcatgggtgtgagatcctgttgctcctgccggggtgactggggtcgagggctcgtcgttagcattggatttctttacggactcacttccactattagtcccgttgcccgttgagtttcgggtacgcagacgacgtgccggagttgctgttccattcgcggatgcgcccccgccggatgaggtgccgctcccgactcctccgccgccggagttggcggccgtcgtgttgtccgcctcagttttggcggacatagctttaagatgagttcagattaaatttattccgctcggttctgaaatagagaataaaagttacggatgagttcacaacttggtaatattaaattcgctccggaaaggttgttttcgttattagggttgaaagacctgtcccggttatttaattattgtggcagacacacttcttggcagtttagctactttgtatttcagcttcaactacagtactcattacctaaagttgctagtaagaaacggcttattggcagtttgtttattctactttaaacggcataatataccaattaaattctccctaattacaacgttatttaaatttgacttttaagccaatgaaagtttatctaaggtttgtttgcaataactcaataataattgtagttactgcagtttatatatgtatatatataaatatttcaacaactaggggttacttgttgttggtagagctattatggtggcttttcagatacacacactcccgccccgcgccccttgcattaattaacgattcgttgccccgtcgacagatttaaattggttaatatccacaagagaactgtcgtcttagttggactttcctaccgctcctattgatcggagagggaacccctgcggcccactgtatctacatcaaatcgccgcacacctgtgtgtgtgtgtatatgtgttgtggtgcctgcactcaaccctcgcaggtaaacaaacaacatttacagaggtgaaaactcgactttgcgacggtgcaagtgcagttaccaaacgattacttcggttgtgaggttgtatccagtgccgccggcgggatcgcaggatgggcaactgcactggacctaggcgaagtaatgcctttctcgcatgtttccctccagggggatgtggcttctcccgaggagtaatagagagagagagagagagtgcagcggcgattagccagcagcactgaatttgttgcatacaaaagtggagcacgccaatacaggcacaaccccggacacgaacacgggggatttcctggccgtgtgtatgtataacatagcgaccaataaacttacaaattcgatagcgaacatgtatacaccaagtgtgcaaaaggggattatacttatacgcattgtattcaaaacattcagcacacaggaccttcatgcacacacacacacacactaacacaagcacatacactgagcaaaaggtgaaagctgttatctacgaattcagctgacgaaatcgagaagcggaaacgaagccatgttgaaaaccactgtcaactccaacttccggctggagttcccaacagatttttcgcgtttgtcagctagacacaaggaagccgccgcgacagagctttgctttggtggttgttgtgacgcacacacactctcgcacgaatgtggggcgccactgccactgctgccaccaccgaaaagggagtagaagtgggtgggcaatgtgtgcctgcctgactgactggcggtgcgtgcgtatgtgtgtgtgtgtatagtttcccgtgtgcttgatcaggaagagcccgctctcgcctagagagagcgagatgagcgacgacgagtaccgtttttgtgtatcaagtgagcaaagtacatcgtcgacagcgacgccggcagaggcatgctacgtttgctgctctgctcgggataatgggatattatttccctgcgaatccgttccaaatcaaaatcggtggattgcgatttcggattattgattgggcagcacggcgtcgtgacaagtgccattttccaaactgcagccagctgttcgctgttagtgttggacgggggaaactgattttccgttctgcggccgccgatcgctcggaaaagcagcctaagccgaaagcttcttttatataatttccattttcagccgcgcacacacacccgcacgcagcttacacgggcacaaacaaacagcttacacggacacggggcacgacagacacaggtacgcgaatacaggcacacacattcgcaccgagcatgtacataaatatggatggatttggcgaaattagcactggatattggttactttccagcaggagcgcaaaatttacgcatttgccctgccatattgcacatttccaacggtggggggagtggcggtgagcggaaacagaaaagctgaactgatttttttttttggaaggtgactgcagcactgtacttttcgaatagtaactccccgcgaacagctcgactggagctatatattcactatatacttgaaagtcactaaactcagtggcatatattggctttccaggcgtgggatcacaatatttttcgctatgatggcgaccgggcagcgacgcaacgcactttgcagcgctgtcgctgctctgctggcgtgtgcaattggtgcgcgattttccgtccgcggttttccaccgtaatccgttcatccgcgacgtggttcctaacctagccgcgacctggcgttgtcttctggccgcattttcacaattattacggattttcggaatcccgattgcgctgccagcagagggaacacacatacaaacattttccacgactagtgcggggggttgttttcgctgttggccaacgcagaggctgcaatccgcacttttcctgatctatatgcaccgacttggccaggtgggcgtctgcgttttgctagtttgttcgcttttcgctgctaattaaacgttttcagccatcagaagtgcccctaaactcacacactggcacgcacacaatcgcactgggttcgggcactgggaactgggcaccctacactgggcaaaaactcactgtcgtcataggaagtcgttggaagacgcgcacgctcggtatgtgatcgaaatgagtgttccataaaaccaccgagcacggcactggcgaggtggctttaatgcgaatttacttttctgatttctttctccgatgtctgcgttttttcctgctacatgtgtccagtgtgacccgtcgtcgaagtgccggaaacgtcgatctgccccacaaaagttcgggaaaataccagccaccgtccgcgttgtgcagcactggccttcaaatcaaacacagtttcttatcggcggaggtcgacgaatcggatctcgtcttatcgccgaccccccgtttattgtttcgtttctgtattagattcaaaatcagttcggtcataggcgttactcagtctagccggcgccgcgtttaacactatgccggttcagggacaggacttgaaacatccataggatccatcgagcatatacgcaaggtttcctaagtacgcttttttaattaattttatgaaatgtgtttcaatacagtggtaagctaaaaaaagaaagtttggcattctacaagagtgaattatattctaagttattaatataagtaagtgagctcttttattgtttttagaatactgtgtgttaatttaagccttggctttaagaatttgaatttgtataatatatttaaaataaccagtagacataagtatttagttaacggtaatgcctatgaaattgttgttgctcaactcaacaaatcagcagaaaatgaaataaatacgcaaactggtttctgtaaaatacattgtttatgcaagatcaataaaaaaaaaacaaacatccaagttttaaagttcgtaagattgaacaaaatggcggttttcttgggaaacggtattctttgcaacgtatttggagccgtcgcactgcgtgataaaaaaagtgcagtcacggtcacactggcgagcagaatttcatacgtttttgtttccttttggccatatttattattgttaaaattggagcaatgccagctgctgtgcgcaagttccgccgcgagaccagtgaaatcagctgctgtctgaagtaccttttgttcgccagcaatgtgatcctgtggctctcggccctgctggtcctctccgttggcatctgggcctggagcgagaagggcatgttccgcaacattgcgcggctgc

SEQ ID NO: 19466 - DNA, 5948 bp, DROSOPHILA
gcacttcgacgacgggtcacactggacacatgtagcaggaaaaaacgcagacatcggagaaagaaatcagaaaagtaaattcgcattaaagccacctcgccagtgccgtgctcggtggttttatggaacactcatttcgatcacataccgagcgtgcgcgtcttccaacgacttcctatgacgacaaaccgagcggaataaatttaatctgaactcatcttaaagctatgtccgccaaaactgaggcggacaacacgacggccgccaactccggcggcggaggagtcgggagcggcacctcatccggcgggggcgcatccgcgaatggaacagcaactccggcacgtcgtctgcgtacccgaaactcaacgggcaacgggactaatagtggaagtgagtccgtaaagaaatccaatgctaacgacgagccctcgaccccagtcaccccggcaggagcaacaggatctcacacccatgctccgccaggcatttctccggcggtaatggaacggcctatgcccagtgttcccatgaatcacgccagcagcagtgtgtcagccagcaaaaagtaccataatagttgtcctcatcccacgcccacgcctgcgcccactgggcacaagaagtcggtccacacgcagccgcacagcagcaacaagtttgaccagggaaagaacgaggagttccactttgacacgccgccagagtgccctgtgttccggcccacaactgaggagttcaagaatccactggcctacatcagcaagatccgctccatagctgagaagtgtggaatcgcaaagatcctgccgccggcaacctggtcgccgccgtttgcagtggacgtggacaagctacgctttgtgccacgtgtccagcggctgaatgagctcgaggcaaagacgcgcgtcaaactcaacttccttgatcagatcgcaaagttctgggagctgcaaggctcttcactaaagatcccaatggtggagcgaaaggctctcgacttgtacacactgcaccgcatcgttcaggaggaggggggcatggagcaaaccacaaaggatcgcaagtgggccaaggtggccaaccggatgcagtacccctcaagcaaaagtgttggcgcaaccctgaaggcacactacgaacgcatcttgcacccctttgaggtatacacttcgggaaaggttctaggacccacaccaacgtcgtctggatctggtagcacacccgtcaaattggaggacggaggtggaaccgattacaaagcccatgaaattcccacacggcagcagattgcgccgcccaacgagacaaacacacgtcgctccaagcgtttcggaaattccaatgccagctgcggcctgagtggtgttacacccacaacaaagccatcagcgggcgtatttgtcaagacggagaccaaggaagaatttaagagggatcttctcagcagtttcaatgctgtcaacagcggcggatcgccattagccacaggtactacggcaaacactcgcggagccagccagaagaagggaggagagcctccagcacttatcgtagacccactgatgaagtacatttgccacatctgcaatcgcggcgacgtcgaggagtcaatgctgctttgcgatggctgcgacgacagctaccacaccttttgcctgttgccgcctctgaccagcatacccaaaggcgaatggctttgcccgcgctgcgtcgtcgaggaagtaagcaaaccgcaggaggcgtttggttttgaacaggcagagagggaatacactctgcaacaatttggacaaatggctgaccagttcaagcaagaatacttccgcaagccggtgcacttggtgcccactgagatggtggagcgcgagttttggcgcatcgtgtcatctatcgatgaagacgttaccgttgagtatggggcggacttgcacacaatggatcacggctctggttttcccactaagagctcgttatatttgttgccgggcgaccaagagtatgcagagtcaagctggaaccttaacaacttgccgttgctggaggattccattcttggtcacatcaatgccgacattagcggcatgaacgctccgtggatgtatgtgggcatgtgcttcgcagccttctgctggcacaacgaggaccactggagctactccatcaactatcttcactggggagaacctaaaacctggtacggtgttccggggtcctgtgctgagcagtttgaagagaccatgaagcaggcagctccagaacttttttcatcacagcccgatctgcttcaccagctggtgaccattatgaacccgaacattttgatgaacaatcgtgtaccggtattccgaaccgatcagcatgcaggcgagtttgtgatcacctttcccagggcctatcacgcaggctttaaccaaggctataacttcgcggaggccgtcaattttgcacctgccgattggctgaagatggggcgcgagtgtgttaaccactattccatgctgcgacgtttctgtgtcttttcgcacgacgagctcgtttgcaagatggccctggagccagcgaaactcacatttggcatcgctactgcctgctacatcgacatggccgaaatggtcgacacggagaagaaactgcgcaaatcgcttttggagtggggcgttacccgcgcagagcgtcgcgccttcgagctagtaaacgacgatgagcgccattgccaagagtgcaacaccacgtgcttcctgtcggcggtggcctgcgagtgcaacgacaagttgattgtctgtttgcgccactatacggtactctgcggctgtgctcctgagaagcacactctgatatatcgttatacactggacgagatgccgctgatgctgcagaaacttaaggtgaaggcgcacagcttcgagcgatggctttcacgttgccgtgacatagtcgatgcacatacacccacctcggtgaccctgcaggagctgcaggaattgtgcaaggaggccgagacgaaaaagtttccctcctcgctgctcatcgatcgccttaatgctgcggccgttgaggcagagaaatgtgtcacagtcatacagcaactgggtatcaataaggtgcgaactcgctcggaccacaaccaggaggctgctcagtacaagctaaccatggaggagctagagttgttcgttcaagaaatcgataatctctgctgcatcattgacgagggcgcttcggtgcgagagctgcttgttttgggaaaacagtttgtggagcggtccgagagccagctgcaattatcgctggagtctctggaggagagtgagctggaaacgttaataaacgaaggcagctccttacgcatcgaactgcaacagctcgacctactgcaaaagcgactgaagcagtgcaagtggtacaagcgctcgcagggattgagggagaccagctcgaagctgacctaccaagacgtgaagaacctgttacacattgcggctgctgaccttgatcccacggatccgtatgtcgacaaggagatgcgaaaattgcaacagatcggtgcagatatcgaagcctgggagtcgcaggcggccaagtatttccggcgactgacccaacagcacgaactgggcgaaattgagcagttcttgaaatcggcctccgacatcaacggtcaagtgccttcgcatggactgctgaaggatgcactacgaaaggcgcgtgagtggctacgggccgttgagcagctacagcaaaacaaccacgtcacatattgccacacactggaggcaatgatcgagcgcggcttgaacatacccatccagctggaggagctgagccgaatgcagggacacctaaatagtgcacatcaatggaaggacaatacagcgtgcgccttcctcaagaagggcaccttctatacgctcttggaggttctcatgccccggtcggacgccatcaacatagactcggatctcaagccgcgcttccaggatgattttctgaaagagaaaaatccggcggagattgtggccagcttcaagcacgctgaggagcaggagctgctcgatatgcgcgaacttcggcggcaaaatatgaacaagaatcccatgcgcgatatgttctgcttgtgcaagtccgagttccgaaacttaatgttcaattgtcagttgtgccgcgattggtttcacgaggattgcgtcccaccgccatcagccacaaatcaaaatggaattgttaacggcggatcaggaccaggtaccaatcgacccaagtggctatgtccgagctgtgtgcgctcgaagagaccgcgcctagaaaccatccttccgctacttgtccagctgcagcaactgcccatccgtctgcccgaggacgaagcgttgcgttgcctggcggagcgtgcgatgaactggcaggatcgggccaggaaagctcttagcagtcctgacgtcagtgcggctcaagaagcgattatggcgcagcagcagcagaagcggcgctccgagggtggagcaggggtgggaaatatcagcagtccacggaagccacgtcgacgggggagcctgacgaaagaggcaagtggttcaacagagtccgatgccgacgacgatgacgacgaggacgaatgtcgtcttcgaatcgtcgaagacaactttagtaacgatgaagatgagcctcgtaccgcccccgcgacctccaccgtcaactccgatctcctcaagctgctgtccgacagtgaaattgaaaatttgcttgacctgatgatggagggcgacctgctagaggtatccttagatgaaacgcaggagctgtggcgcattctagaaacgatgccgcccacgttgctgcaggcggaggccatggagcgtgttgtccagtacatgcagcgtcagcggcaacagcatacaaatccgctgccaacatccggcgccgaagactctaacgatagtctgatggtacaaaatagtcccaatagcaacagcaatagtggcggggcaacgggttctgcgagcaacagcggacgcaacaagaagaggcgctccaacgacaccggcggcaactcggcagtgccgcgcaagaagcagagcacaccgaagcagacaccgggcaagaagggatcagcggcagcggcacgcaagagcgatgccaaggcatcgccagcagcatccaccactccgggtgcggatgccgatgccgagaataagcaggccaacggcggtaatacgaactccagtacaggatcaggtggtggcaattctgcgacgacgacgcccacacccggctcgacgcacaaaaagcgaaagcgcacctcaaccacagccaccaataataacaacaacaataataataacagcacgaacaatagcaacagcagtaccaatttgaacagcaacaccaccagcggccagggagcagctactggaggcaataatgcgactggcggtcagaagaagcacgcgcaacggtctcaacaggcggcgcaggaggacgacgaggaggagtgccgggcggagaactgccacaagccaaccgggcgagaggtggactgggtgcagtgcgacggcggctgcaacgaatggttccacatgtactgtgtgggcctcaatcgcagccagataaagcccgacgacgactatatctgcattcgatgcacaaagacagttgccatcggaacacagggctccggtcacagtatgagcgtggcgtccacgacgacgccgggcaagcagcgggcggtgcaatcggcgcggtagagtaacgtatatagagtccaggaggtgcagtaacagccgattgtgttttacgcatgatgtactactaaatacccgataaaggccgtctaccggtatttactaagtttagtaaagtcacttgagagtttttgtagtacatatttaccaattatcgctatatttacgcattaacaacgtaaaacacatttgaaagaaaacgtcaga

SEQ ID NO: 19467 - protein, 1838 aa, DROSOPHILA [sequence omitted]

SEQ ID NO: 19468 - DNA, 3617 bp, DROSOPHILA
agggtgtgcatgtgtgtgtgtaagcgtgtgtgttggtacttgtaaatacgacaacgtttattgtcattggaattattactgccatatgcgatgcgagtggcaggcaatcccaggcccaggcccaggttcaggctcaagcccatagcccctccgcgggtccccgacatgtcgtaggtaggaatcacaatggttgtcaggggaaacctgttccttggcttttcctcgcctgcagcctgctgggtgggtgggtgctgggggcttatcttgggtattttttttgcgtatgcgaaaatttaacgaatcatgaaatacgataattgaaccatgcacaagagttcgtcgttgccgttgtcgctagcggtggcatctccactcaagctggagctccagctctatcttcatcttcgtcgtcgtctttccattgtttgcttgtgtacgctcagcgtatgtgtgtggcataataaaattttattgtagccaaaagttggctaccactttttccatggcacccgggcagtagttttccccaccccattcccgctcacccgtaattgtgtgtacccacccgcggagaaagtgggttcctgtggggggaggtggcctaaacgcccacatagttggaaattagcgagatgtgtgggcggactcttctaccgcacgcgcaacaatgtcgcttagtcatcatggcggttctttgatttcgattcgccagttacttttggctggcaatttaatggcatacttttgggcagggaaatggcatcgaagttcgaacttcgaacttcttagatctgtatagtaaataagctacctacatgcccagccatgaaacgagttcctcactcacatatgacaccacgcttttactttcaagtgcactttattttgaagccttgcagtactagaactaatagcctactctaaggccccacatggacccacctagcggcattccaagagcgcccgacactaggcaacgacctgtgagattaggctatcctcagcggatccggttgcgggaactttggatgttcttcagctgcttttccacttcccgcaagtacttctccggtaggcaattgtcgcgcatagccgcgatcttggcgttaatcacctgctggatgttaacgtcccgctgcttctcatggtcgagccacttctgcacccttccggcttccagctcggccagacggcgacgctccgcctgtttgtctgtcatctgttggcgcaagtcctggcggtaagcctgccgctgagcgtcccgctgacgatccatgaccttctgcttctcctcctcctcgcgcatgcgatccatgaccttggcgaactcctccccggcgtgggcgatctccagagcaaggcgctgcttcatctcctgggcctgctgcgcccgtgcctcgagcaggtcccgctctgcctcccgccgcgctatggctgcttccttctcccgctggcgatactcgcgctccacgcggtctcgctcctttagatacttcagctcgtcgttggtctggcgcgtctccatggcttcggcagctaccgtaaagatgcgctgctggcggcgctcgaactcctttttggccagtcgtttcatttccttaagctggcgctccttctcctgcttatcgcgcatgtaggcggttacccgcaggtcagccaatcgctcctgttcgctgaacatcgtcttgaagacgttggacatgtcccggatgcgctggagctcctcccggagcctttgcttgcgcagttgggcaaaggcccgctgctgctcctcctggctgcgcaggagctcggtggcgcgacgaatatccttggcctcgtcggccacccgcttggcttccaagtagcgcacgttctcgcgctctgagagctgctgccggatctcctgggcatagcggttccgcttctccacctccagtcgctcgcgctcatcctcttcggtcagcgctttctgggcccgttcgttgaccatacgtgccagtcgctcatcgtcctcgcgcagcgccttggataagaggtgcttctcatggatctgcgcttcccgcacagctttgcattttgcgtcgagaatcatgcggttgatctgcttcacctcctgttcctgctcttgacgggcaagaaaggcgcgacttaacacggactccttttcctcgaggatctcgctgagcagggtgcttctgctttcggaagcgccaacccccttggcttcatcgatggccttgaatcgttgtcgcgtctcctcaaccatttgcagctgcttgcggtgctcctcttcgtgctgctcaatcctctgcagcttctcgctcacggtttctagttttccctgatccttgagacggcgaagctccccggctcggagcaccacttgttttgtgccctgattgcgttttcgatcgcgttcattgcgctttagttgcttctggtcataggccgccgactggtcacaaagtggtctcctgaaggacccgaaagatgtggcggttgggtggaagccacaagcaggcgggcgataggctgccgtttgggctcgtgccctggctcttagctcattgcactttttctgcacctgagattctgcactgacgaatcgcacattggaggcggaaaagcagggcatcctttttaaagtaagcttgttaataaggcctaaaaaaccgggactgggaagtatatcctggagcagaatttgagcttcattgagtgataccaagattggaaactttattcgattcgcgttgctgggacaatttgtttgggtagcaagcggtggtaaccttggaggccaccaagtaaccatgcaacaacctataacgtgcgaaactatccaaaaaacacattgttggctctgtaggtagagttcagtgccaaaatacagatagctgtgtgtaggcatccgtctgctcagaattgaaatacgcttttgccggaagcttttctcttgatttgttctgacggttacagcgcacccaaccactcttatcttccctgcccactgggcgagcatttaaacagtccccatcctcgtcctcgtgctaggacccggacatcaaaaatgcaaccaagcataaatttcggggctctgcggcggcccccattgatttatgcgccttgtccaaggacaaacatgcttagtcccacccaaatcggtcccttcctgaccagtccggtacaacccagtccatcccgcttcaatgatgtgtgcgaatgtgtgaaagaagtcagcaattatgcgacatagaaaagcaataagccaacaaaattcacacattttggtcggaacccagaactggacatttgagatactgggggaactctccggcccgcacccaactgtccaaatctccgtggcggcagcatccatccattcatccatctatcctcaccgcccactggccagtgcgttggaaagtctaagctggcaaaactttacggccacacatacaaattaacttgaccaaagcaacagacagagccgagaaccacgcccacattgtcaaacacacacacccggacattaggagtaggggacgtggaaagaggatggctgagggaacgtggaggactagggctagtttctgggagcattgaaattcgaaaccgaaacgagttccacccat

SEQ ID NO: 19469 - DNA, 1617 bp, DROSOPHILA
atgccctgcttttccgcctccaatgtgcgattcgtcagtgcagaatctcaggtgcagaaaaagtgcaatgagctaagagccagggcacgagcccaaacggcagcctatcgcccgcctgcttgtggcttccacccaaccgccacatctttcgggtccttcaggagaccactttgtgaccagtcggcggcctatgaccagaagcaactaaagcgcaatgaacgcgatcgaaaacgcaatcagggcacaaaacaagtggtgctccgagccggggagcttcgccgtctcaaggatcagggaaaactagaaaccgtgagcgagaagctgcagaggattgagcagcacgaagaggagcaccgcaagcagctgcaaatggttgaggagacgcgacaacgattcaaggccatcgatgaagccaagggggttggcgcttccgaaagcagaagcaccctgctcagcgagatcctcgaggaaaaggagtccgtgttaagtcgcgcctttcttgcccgtcaagagcaggaacaggaggtgaagcagatcaaccgcatgattctcgacgcaaaatgcaaagctgtgcgggaagcgcagatccatgagaagcacctcttatccaaggcgctgcgcgaggacgatgagcgactggcacgtatggtcaacgaacgggcccagaaagcgctgaccgaagaggatgagcgcgagcgactggaggtggagaagcggaaccgctatgcccaggagatccggcagcagctctcagagcgcgagaacgtgcgctacttggaagccaagcgggtggccgacgaggccaaggatattcgtcgcgccaccgagctcctgcgcagccaggaggagcagcagcgggcctttgcccaactgcgcaagcaaaggctccgggaggagctccagcgcatccgggacatgtccaacgtcttcaagacgatgttcagcgaacaggagcgattggctgacctgcgggtaaccgcctacatgcgcgataagcaggagaaggagcgccagcttaaggaaatgaaacgactggccaaaaaggagttcgagcgccgccagcagcgcatctttacggtagctgccgaagccatggagacgcgccagaccaacgacgagctgaagtatctaaaggagcgagaccgcgtggagcgcgagtatcgccagcgggagaaggaagcagccatagcgcggcgggaggcagagcgggacctgctcgaggcacgggcgcagcaggcccaggagatgaagcagcgccttgctctggagatcgcccacgccggggaggagttcgccaaggtcatggatcgcatgcgcgaggaggaggagaagcagaaggtcatggatcgtcagcgggacgctcagcggcaggcttaccgccaggacttgcgccaacagatgacagacaaacaggcggagcgtcgccgtctggccgagctggaagccggaagggtgcagaagtggctcgaccatgagaagcagcgggacgttaacatccagcaggtgattaacgccaagatcgcggctatgcgcgacaattgcctaccggagaagtacttgcgggaagtggaaaagcagctgaagaacatccaaagttcccgcaaccggatccgctga

SEQ ID NO: 19470 - protein, 538 aa, DROSOPHILA
MPCFSASNVRFVSAESQVQKKCNELRARARAQTAAYRPPACGFHPTATSFGSFRRPLCDQSAAYDQKQLKRNERDRKRNQGTKQVVLRAGELRRLKDQGKLETVSEKLQRIEQHEEEHRKQLQMVEETRQRFKAIDEAKGVGASESRSTLLSEILEEKESVLSRAFLARQEQEQEVKQINRMILDAKCKAVREAQIHEKHLLSKALREDDERLARMVNERAQKALTEEDERERLEVEKRNRYAQEIRQQLSERENVRYLEAKRVADEAKDIRRATELLRSQEEQQRAFAQLRKQRLREELQRIRDMSNVFKTMFSEQERLADLRVTAYMRDKQEKERQLKEMKRLAKKEFERRQQRIFTVAAEAMETRQTNDELKYLKERDRVEREYRQREKEAAIARREAERDLLEARAQQAQEMKQRLALEIAHAGEEFAKVMDRMREEEEKQKVMDRQRDAQRQAYRQDLRQQMTDKQAERRRLAELEAGRVQKWLDHEKQRDVNIQQVINAKIAAMRDNCLPEKYLREVEKQLKNIQSSRNRIR

SEQ ID NO: 19471 - DNA, 6372 bp, DROSOPHILA
cgccacatacgaataggaatacgaatacgagtacgtacgtacttacatacatatgtacatatatgagcagcatctattgtagcagacgcacactcttgggctcccagataaacatacactggcattccgcattccacattataagcataaatccagagggcaacccacaaaaactataaaaggactcttttagggtgggtgcgactgcgagagcgcgcatttgatgattaattgcagcccagatgataaatgattgagggtaataggagtagcaaacgtggtagctgctgcttagtcggattttgggatgtgttgcggaagggggggggtggggggataggggatagagcgtggtgggtagggggaattttagggggagtgccgcatggtggcaagtatttaaggctcacggacgcctggcccgcacgttcgtcttgcccctcacgtcgagcatattttcagcaattgcacgtatttcggatttccccattcccagtcccatcgtcgtctccattgcccaaatcttccacttccttcgctggcttcttgtgactctctctttctttttttttttttgctggctctgctaaaataactgttttcctcatcccggctagactaagatttggctatgcactgaacgaaaaagaatgctcgtaggtggcaacaaatgattatcatacatagtgatttgtaaatcacgcaaatcattacgctactagttaattagctgatttctgagagctggtatttggcatttctctcagtgtagtcaatgaagtggatgtgtgtgagtgtgtcactccgcctttggcttattaggtgtaagtctctgcgtgtttgtgcatctgtcttcatgaatttcccaatggcagcatcgttttcgggggcatttcttttattttttctttttgccattccctcatttttgccacactttttttgcgcgtgtgtgtacgtgccattttgggttttgttacgtttttgcgtgtgctaaatgttaactgctgattgcatattgtccgctgggggcggcaaggtggttgtcgccgctgatttcggcacttgtgcggcgtttctggccgggaaaaacaattggcagtgaaataatgtaatatacgaatgcatctttttttatgttgcacatacatacatatgtatctacatacatacaaagcggcttaattcgaaatattttaaacacattaaatggcaaccgcagttgggtaatcacttcaaaatgcggcaaatgtggcactggtgataaagccacatcaatggacactgataactaagcgaaaatccaatcgaatccgcttagacgcttgaattaaaaccaatattctataacaacatgcaaatcgccaaattctataaatgaaatgaaattaatcgcaaatagattggcaagagctgaatggcattcgccacattttcaaccgttttcacacgcatggaaacaaaaggaatatccattgaatttgggatttggttgtgctgtttaaacagaaatgaaagaataacgtgccgagcaaatcgaaatcaatctgcagcatatgaaataaattaagagtaaaaaccaaataccatacccacgattttatttatttttgttcgcatatttctgctttctctgcgctttcaaatttgttttgagtgtgcagcataatttcccagcttagataaacatgcccgcagagctcaagaaatagatacagatacggatacagatacaagtacgtatatgggaatgctggaatacagctcccagatgcgtatgtaaattcataaataatacatatgcagatgcggaatggtgttgtttgcttttgccactgccatcagcggagcaattgtgatccaccagctgttcaaacgagaaggcacaagtgttcgaccgactgactgagtgactgaatgactggcaaaccgaattacgcatcataaccataacataacataacatagcaaaacagtcccctcttcaaaacaattacaataaaacaataagcaacagcaaaacgcagccgccgcatcggaagctggcggaagtcaacggaaataaacaaaacatccgcaagttctaattacaaaaggcaccaaaacagatacagatacagatacagatacagatacagatacgagtgcagatacagatacaatggggggcgaaaggtcggggtagagaaagtttcaattcggattgcgtctcctttctttacccaccacccaactacccaacccctcccacctgccagtctcgacgaaaacttatattaaatgctgcaattcaaagtttttaaccccgaatcaaatttaaccgaagaaataaaacgtctaaatgactctggcatgctgcaatctgattgcgaaatgctcttactgaaatttaatgtatcatattataatttgatatcaatataattgataatggcaaaataatatgattaatttgaaaatataccgatgaaaatcggtgtgtcaaataaaataataaggttgagatttaaaacaacatagcttataatcagtcacataaactgaaatttaaacgcattaagcacttcaatcatattggttaaacaaaataaataaaactgattcatagtaaaattcaattgtgtccaacaatttaaaactttgaacttacgaaacaagtttttaactaaccattttaaccatttaaaataactcatagttcagtgaatttgattccgtttttagggtatccgaaagcactcgaattcaacgagcgggcaaaaaccaaaaaacgtcaaccccccgacgagtgtcggcaatacaaaatacgaaaagttatgcaaaaatgtgtactcgagttcaattaaaagtttttaagttgtgcaaatggaacgagtgcattgcgtcttcaactgcgacttccaattcagacggcgaattcagagctcagacttgtgagtagcaactttggcttaattgccgtgtgcctgcctggccgaaaggaatttaaatacgtcgaaattcgtgtagaacagagctctgaatttagcagacgataagattagtacgagtatggtctctttttatttctttatttggcctgcatgcggtaataatactcaagatattcgttcggcagcaagctgttaaggtttgaaggccagctggaaatcgaagcgaatcgctaattttagttaaacattcacacaggggcgggcatacatttgaatactttgaattggcaaatctattttttggcacattccgcgaattgctggctggcactagttgaggtttcaattgaggcatgcagcaaatgaataaaataaatcaaacagccacacactggtgttgtgcgtgtgtatgtgcgtgtatactaaacaaataaactgaaggtgtgaaaagtatctttaaattggtgcgagcatcaagcggtagccgagtgggtatggatggactcgaatgagatacaagatacgagctacaaagtgggaggtttgaagaagcagcctctggcagcgaagaaccctctgccttatcgcagatttccctcgccgaatgaattacgactttgcgtttgatgggcaaacaaaaaataaataaaaatacaaaataatataagtaaaagaaagagagcagagaaactgaaagcgacaccgaatccgaaacacaatcttcttatgcgtcaggtttttgataacaccagaccaacgagaatatgccaacggcatttcttaacaataatacaacgccgagcaaaacaacggccaacaaagctgtctgcaatcagctggcggcggcttcgattcgttttatcagagcggccaaaaaagccaaaagaaaataataaataaaatacaagccaaacagaaagcagaaaagctcacaaacagcgctacgcgcacacacacacacacatatagacatatgcatattaagtgtgcgaaaaaaaattcgcaaaaagcacaagtatttgtgccatgtatttagtatatatattatgcatgccctcagatgataaccgcctctggtcgccgactgctggcgaattttacttatttatgggccggcatctatttactcggctcttcctcttgttcgctttttgcacacatatgtatatgtatgtatgtatgcatatgtattaagtatagcatacatatgtatatttggctatatggcatacacacagtttcgcttatcaagagttttataatttttagcaatttaattttagcccacgctcgttcaggtaaattcaagagagtgtgggaccttgaaacgatttcttttcattcactttttattgggcagagaaacaaacaaaagatcacgggccccaaaagcgaattttcatgagtttaataaattcccgatcgcatacatacatatatatgtatgtagtatgtattacgcaacgcctttcaaggaagtccgcctaaagtcgctttaatgcttcgataaaataccagcgactggcctaagaagttgagtctatgataaatgcctaaatgctaaataaataacaaataaactaacagggggatgacgtcagctgggggaaaattatagaggaaagtggaaagggtagaaatttgatttatgtttatagacttaaaagccacaaatacaataggaatgcccaaaaaaaaattatgaaatcgaatagggcgcactacttatttttagatgaatccaaagagtatgagtgaatattaaatgaataggaaagtatacaatgaataaaataaaatgctttaagctttagttttcagctgagctttgagcaaacaccttttgattaaacttaaggttctagaaattccttcaagacattgttcattttagaggacaaaggattgttggctaacttaacttccataatttattcacttctattcaattcaattcaaatcaactcacctgttgccattgatcctcaatcgacggctgcgacgagtagtagccggtggtgcagatccgctccagctcgctgaagatgttgccactcggtaggatatccatcttgatatcctcttcctcgcaacgcagaaactctagggactccgttttgaggccgtttttgaatgtttcacgaacaggaacagtgggggccgaaatgaatgtgcactcaaactgttggtggggcaacaatttgagttggcttttgatgcaattttgatttgattggctacgacgattgattacttagagcgacaaatatatatattttgatttcttttcttaattttgatttcagatcgatttctgcatcccgacgatgagcgatgctgcggaggacagcattttagcactcgcgattgaatattgccctatatatgaataagatacaactaatatgtaattatctacactctgcaaacgctcgtcatttatgtgtggtatttttcggtttcttattcacttaaaaatttatttaacttcagcactttcattcagatttgttacattccaattatttttgtggcctcttgcgtgttggtttctgcaaataaaaaaaaaaagtgcgaatatatacattaatcatactgttttccatagctgtgtagcttaaccccaattattttctaggcaattcgctccattttcgtagtccgccttttcccaaacattttcgccgactcatcgagatcgagaattaataattctctttcatttttatgttgtttttttggaactatgcaaagcttattttcccacctagctgctggctgactatccagcttgctcacattttcatatcggtctcggatcgttttagccaagctcaacactttttcactatcaaagcacagttttgggtcagtaaccccgattcgaaacacacacacacacatatacatatacacttttgtatgtatgtatgtataccctgtatgctctatggccatgcaatcgacggtgttgggttcgaattttattattatgatagtcaacaggggctcggttttgagccacgaaccagggtttcggcctcagccagtgtttttctttaatttctaagcgttgtccctcactcctcgcactcttcctgccacaaatacatacaaataattacgtgtatgtgtgtgtgtgtgtacgttcatgtgacggtgtaaacccggtctgttgtcgatttttactacctgtttcttgttgttgttgttgtttgagccgggctctttcacaacgttttcgtgttaactgaaaaagaaccaccagagccgaacccaaattcgttgaccgtccgtctgcgctttggacttctttttcccccgtattatgtttttcaacttgtttttttctgttttttttttttttcattggtacagttttgtttttgttgctgcatgcggcattcggcagcggtttccctctctttttttttctggc

SEQ ID NO: 19472 - DNA, 548 bp, DROSOPHILA
atgacgagcgtttgcagagtgtagataattacatattagttgtatcttattcatatatagggcaatattcaatcgcgagtgctaaaatgctgtcctccgcagcatcgctcatcgtcgggatgcagaaatcgatctgaaatcaaaattaagaaaagaaatcaaaatatatatatttgtcgctctaagtaatcaatcgtcgtagccaatcaaatcaaaattgcatcaaaagccaactcaaattgttgccccaccaacagtttgagtgcacattcatttcggcccccactgttcctgttcgtgaaacattcaaaaacggcctcaaaacggagtccctagagtttctgcgttgcgaggaagaggatatcaagatggatatcctaccgagtggcaacatcttcagcgagctggagcggatctgcaccaccggctactactcgtcgcagccgtcgattgaggatcaatggcaacagaaacgccgcacaagtgccgaaatcagcggcgacaaccaccttgccgcccccagcggacaatatgcaatcagcagttaa

SEQ ID NO: 19473 - protein, 59 aa, DROSOPHILA
MDILPSGNIFSELERICTTGYYSSQPSIEDQWQQKRRTSAEISGDNHLAAPSGQYAISS

SEQ ID NO: 19474 - DNA, 3221 bp, DROSOPHILA
atattcgatggatcagtgcaaaaatggaaaaacaaacaaaacgaaaagcaattaattaatatataaaaatatctttaaacaaaaaagcaaaaaatctagtaggcaaaatgttatatacacattttttgctcagtattatgttttaaactaaaattaagcgagttattgtttcctgtttatatattttttttcgtaaaccctatttttacgattttttgtttttccgattccgatttcgagtttgattttttcttcttcttcaacaaactcgctgcgatggcaattaatactaaagtgaaatctaatgatatataccataaacacatctacaaaacgatatatatacattttttatcgttttatttaaacgttttacttaaatattaatggaaaaaatacacgcacataacaaatttgtgagaaaaaaaattacaataaatatttttctttttttttttttgcttagtcttgtaagtagttcattatattatgtaaaatatataaaataaataaatgaatataaatctaattaaaatgaattctttcactgagaaagggaaacgtgatttggtaatgttgtgccggtcacgcggtaattagttaaaggtattttcttaacggacgaaacgtaagcgcagctaattttctattttttctactcgcgtcgacgaacagttcagtcgatttaaccgactaataagatacccagtataaggaaattttcgattagcatttggtgttttgaatgaattttggggtgctttaatatttttaaacacagtcttgacaataaacaacgcagatttatggtaataaatacatgtggaaacagatacagctaaaaacaccattaggtaattaatatgaataacatttagagaattcgcaatatgtgctatagcagcatttaggtactattgctttaagtaagtaatcgcatttaaagaatcttacttcctagtcgttataaatacttagactagatggaggaaagcgccgctcaaaggacgatggcctcctcctcctggtactgtttgttcttgcgccgccggttggacttgatcttgctgagcacactgtacgcctgctggatttcgataaagcgctggtgggcctgggcccgcaagccctcgtccttgaccttgtcgggatggtactccttggagagcttcctgtacgcagcggtgatctctgcctgcgaagcggtggcacttacgcccaagaccttgtacgaatttcgttcgccatccacatccatgctttcgaacacctccttccaggtctcgtaccagccgtgatgctgcgcatagttataggtgtccagcagggcttgcttcagatctgtccaccaggcggaggccaagaagttatggatggcctcgtgaatgggcacctcgccgccgtcctcgtccgaaatggtgccgttgaaatacaggaagctgccccagaaggcgcagtagatgatcacggcggtggttagcttaaaggtcctttcaccggggcttcccctgcgcggcggagtcctgcgccactgcttggacaagccgtcgaaggtcagtgccgccacgagaccagtgagcagcagggagtaggtctcgtcatatatcaaatacctggccggatacgccagataggcggccaccaggcagtgccaccatacaccctgctcccggccaatgttgcccaccagccaaacgcccagcgaaacaaacagcggaatcgtccagtgtaggaagctcagatcccagccaccgaccagggtctccggaatggccatggagcacacctggccgaacagatggccgatcatcacctggcccacgaatctcttcgaggagtacggcggtttcggatacgcctgcagcttggccacgaacatcttgacgaacttgggatcctcgttggcatcccgtacatattcgggtatcaggaagagctcgcccatccagccaatgcccatgtagccacccagggtgcaccaccaaatgaaggcgtggcggtcacggtgcaagtacagatgatgcaggccgaagattccgccgaaaagccagcatagataggcaatgaccaccgatttctggggcggcagagcgttcatctccttgcttttggtcttgccttgcgcgtggccattggacttagccttcgagggagatcctttggaggtatcgttggtcttatcctttccagccactggagatactgtctgcgtggtgcccatggtgttccaatcggattactgcaagggaagggggcaaaattgttatgataaacggaataattcggaagtagttttactaacaatattatggaaagaggacaacttttaaaaaacaacataacataataaacatatgtatattggtagtacaacattaacgattattcaaaaaattgcaattatgaaataattaattagcttaatatattagcgtaatatatgttgaaatagtggcacgctgagcaataacataacaagcatatctaatatacaacacataacaatatattaaaatatatatgaatattttaagtaaagtaacacgatttgatgtagcacatttaactgattgaagataagctttacgtattttaaatcaacgaataaagaacggtggcctataaagaaaactcttatgaagactacatacagcaaagagtttcgaggatatataattaatttattgttattattttagttccagtctttaaacatcactttttgggccactttccgtgaaagatacttacccacttgcgatcgacctcgatttcttgtgaaattgtcgctgcgcaggcgcaacttcttggccacgactgtgcgaagaattggagaaagagaggcggagaaagacgcggcgcagaactttctcttttcacaaattctacgcacgcagcgacaacaagaacaaaaacgacaaactgatccacaaaaacaaaaaaaaaaaagaaaaccaagtgcactgatgcgttcaatttgaactggttgttgctatgtttcactaaaattgcaattgaaacaatttgaaacaatacgaatttgttgttttgcgggctggattaaaaaattgaataaaaatccgaactttttgctcggcttaagctaggtgtgaccaagtgcagggacaggccaaaataccatggatctaaattttagtacgttgtatatctacaatactctttagttcacaaacgatgtatggcaaatgtaaaatgtataa

SEQ ID NO: 19475 - DNA, 1221 bp, DROSOPHILA
atgggcaccacgcagacagtatctccagtggctggaaaggataagaccaacgatacctccaaaggatctccctcgaaggctaagtccaatggccacgcgcaaggcaagaccaaaagcaaggagatgaacgctctgccgccccagaaatcggtggtcattgcctatctatgctggcttttcggcggaatcttcggcctgcatcatctgtacttgcaccgtgaccgccacgccttcatttggtggtgcaccctgggtggctacatgggcattggctggatgggcgagctcttcctgatacccgaatatgtacgggatgccaacgaggatcccaagttcgtcaagatgttcgtggccaagctgcaggcgtatccgaaaccgccgtactcctcgaagagattcgtgggccaggtgatgatcggccatctgttcggccaggtgtgctccatggccattccggagaccctggtcggtggctgggatctgagcttcctacactggacgattccgctgtttgtttcgctgggcgtttggctggtgggcaacattggccgggagcagggtgtatggtggcactgcctggtggccgcctatctggcgtatccggccaggtatttgatatatgacgagacctactccctgctgctcactggtctcgtggcggcactgaccttcgacggcttgtccaagcagtggcgcaggactccgccgcgcaggggaagccccggtgaaaggacctttaagctaaccaccgccgtgatcatctactgcgccttctggggcagcttcctgtatttcaacggcaccatttcggacgaggacggcggcgaggtgcccattcacgaggccatccataacttcttggcctccgcctggtggacagatctgaagcaagccctgctggacacctataactatgcgcagcatcacggctggtacgagacctggaaggaggtgttcgaaagcatggatgtggatggcgaacgaaattcgtacaaggtcttgggcgtaagtgccaccgcttcgcaggcagagatcaccgctgcgtacaggaagctctccaaggagtaccatcccgacaaggtcaaggacgagggcttgcgggcccaggcccaccagcgctttatcgaaatccagcaggcgtacagtgtgctcagcaagatcaagtccaaccggcggcgcaagaacaaacagtaccaggaggaggaggccatcgtcctttga

SEQ ID NO: 19476 - protein, 406 aa, DROSOPHILA
MGTTQTVSPVAGKDKTNDTSKGSPSKAKSNGHAQGKTKSKEMNALPPQKSVVIAYLCWLFGGIFGLHHLYLHRDRHAFIWWCTLGGYMGIGWMGELFLIPEYVRDANEDPKFVKMFVAKLQAYPKPPYSSKRFVGQVMIGHLFGQVCSMAIPETLVGGWDLSFLHWTIPLFVSLGVWLVGNIGREQGVWWHCLVAAYLAYPARYLIYDETYSLLLTGLVAALTFDGLSKQWRRTPPRRGSPGERTFKLTTAVIIYCAFWGSFLYFNGTISDEDGGEVPIHEAIHNFLASAWWTDLKQALLDTYNYAQHHGWYETWKEVFESMDVDGERNSYKVLGVSATASQAEITAAYRKLSKEYHPDKVKDEGLRAQAHQRFIEIQQAYSVLSKIKSNRRRKNKQYQEEEAIVL

SEQ ID NO: 19477 - DNA, 5030 bp, DROSOPHILA
agtaagccaattgctggtttaactgcttgatatcgcacttgtaacatgattcacaaggaaaacattgattcgctcttgtacctttttaaatctatattgcaaagagacgtagtattggaaaactccaatgttagtattatttatactatttcgcaaacattctaatcaaaagcaatggagattataaacaacactgccccgaacagagtattacgtttttgtgttcaccaaatagctgaaaggtccaattaactgacaattggataactaaagaatttgccaatcttagtcagtttaaaacgataactaattcaactaacagtatccaaacgttttcctaaactgtcttaaactttaagaactcagtctgcaaacttgtatttataaaacagttcatacttttattgctgttcaatattaaacgtgaatagaagtcgaaactcaacgcctacattgctgcaatgctcaaaaagacgatagttataataaaatgcttttaccttaaaaaccataagtacatagaatgttattaatgatacaaaatatgcccaaaaatcttgtatgtacacttgcaactgagcaattggccagatgtggcagctaatacactttttggatatgtaaaaagttaactttatggcagctattgggtgtatatcctctttagagttttccatataaacatctggccaaattttcatgtgcaatgttaaattactaagccaataaaatcacgaacatagtacgattaataatgtgtaaaagcaaaaaagttaacattctgctataatggtaacgaaaaaaagtcaattgaaaataagctggagatcgataagagtcagtcaagcacagatcaacagcatttattaaggcgtatataaacatagatttataagagttagaaaatttataataaagcttaacgaaggttgttgacacaagtatcaatcaaaaacgcttctaataaagaaatacggaataacaatgcatacaaggctcatcatttaagtggaacatcaccagactctccgtccagctgagcaactgcgtcgaactgcactgcaggtagatcctcgccagttgctgtcttattcgctcgttggtactcaaggatcaccagagagttttcacccactttcagtatctcgttgggcacatataaggtgacctgtggacctgccacaggccagtagcgtcccaaattaaaaccgttcacataggccacgcccttgccccaaccggccatgttcaaataggtgtcgcccacctccgtcactgtcaggctgccagtgtagagtattggtccgtttcgaagaatgcgttgccttgccagcaacgggtccaaggccttctcgtcagtgtgttcgcgccgccagagctcgacggcggattgctccagcgggaaagcggtgctccgccagttctccagcgggaggtaaccaccattgtgcagctgcaggctcacctcaccaaagatgcccttcgtgtcgttggagatgtagaagttgacgcgtccttggttctccaccagcagctgcagtgtgctgccccaacccttgctaagcggcagcgagtagatctgtgcctcgcgggagagtgtgcccaccagttcctggtctacgaatacgtgtgctcgatcgttaatttgatctattttcagcaaggctgggtctagatccatgctgggcagctcggtctcgtacaggacgaggcccgagtacaagtctagttcctcgaaggttttcggcttgatcgattcgacgggatcacccttggagagcgcagcacgtccttccgtcgagagcagtgtcagcttgggtgtcagctccacccttccgtaggccagacgcttagcgggattcaaggtgatttccggcagcggaaggaattctccaatcacagccttgacaaggttgtacttagtggtgacgccaccggcctcgtccatcactgcatcgtagtcgtagctggttatgtctgccgcatatccgatgccaccgtccagattatagttggcaccagcagtgaacccaaagtttgtgccgccaaagaacatatagaggttaacactagcgttgtagctcagaattgtcctggaaatgtgaaaatgctcataaatctgggtaagaaaaatctctctctatgttaagattacaagataatctcttcaaacttctcaggtagaaccgatatcataccgaaaccggttttgaagaaaccttataccccgtatttccaacataccttagtgcattggctacctcctggccatcacgcctttggttctgctcctgccaatgcgttagccagccgggatagaactccgagttgaccagtgggccagtcggctgcagggcacgcagcattgcccagattttgtcaatctcattgactgcaatgcgggtttggtgtatactttctgtttttataacaaccacttggcatactcactgcgatcgatgccgaagtcagtggtggcgaacacgttctcgatctttccacagctcatcttctcgttgggtatgtccaccgtgaagagcagcgccttgccggacacatacttctccgtctcgtctcgcagccagttgaggtagtcgtgatcgcaggcatagtcaccgtactcgttctccacctgcaccattatgatcttgccgccgttgcctacgaacaggtgctggaggcgtggcatcagctccgcataccacttgcccacctctgagatgtagttggggtcattggtccgcatcttgatggacgggtatttggtaaacaaccagtgaggaagaccaccctgaaaagaggcaatattagtcaaaattatgaataataatactaatttcgaacgaaaaccagttagagccaaaaacgtttgtagtagagaaagtatttaagcacattcagcaacaaaatcattttatacttgcattatctcgctcagcacaaatgtagggacctgggcggagaatgatgtagaagtcttcctcctgagcaatctccagaaacttgacaacatccgcaatgccctcccagttgtattctccatcgtgcggattgtggagcgaccattcaacatagctggataaagtaatctcgagttattaatatgttttccatacattaatttagaaataatatagcttacgtatccagagcattaagaccagatgctcgcatggtgcgcaaccgacttcgccaggactcgggtacagcgcggaaatagtgaaacgatccagagacgtaccggaagggctggccatccagcatgaaggtgttggcctcatggtcgatcgtaaaccttggctgttcctgtaaaaaatgcgcatttaaatcaggcacggatttagcaatcgccttatagttgcacgcaaggaaaaaccatttggttgggcaactgcaactcacctcgaggagatcggtgttaccacccatcactgcacttaacctgtcacttgaataattatagagattgccaatcttagtcagactaaaaaatgtttaacccagtctgctaacttgtatttataaaacagttactacttttattgttgtttaatattgaacgatgtgaatataaatcgaaactcaatgcctacattgctgtaatgctcaaaaaaagatatatgagttgcttttactttaaatatcattataagcccaaaagccttgtaaatacagctaaggtactttttgtatatctaacaaatattaatttttatggcagctatgctataaagtaatcctgtaaatgtaagttgacctgacccaattgcccaggttgtatgttcgtgtaaattattattctcacctcgggggcgtcggtgtcaccgctcagtcccacacaaagcccaacggtgagggccatcacagcaattatcagacatccacttacggccatcgtcagctttcgattgcgacgacaaccgctcatattgaagagccgacttgggagcttggagaaacaccacaaatgtatcgctagcgatataagcttgcttgaaagctcgctccactcggatgggtggaccagaatacacaaccgatcgccagtgccgacgggagcacaatgtcagggtaatggctggtgggcagtggacagtgagtttgagttatggtttggatggccagccttgggaactttggacgcgcctttcctggtggcccgataaggcctgttggtcgccgctggagtggctgatagtgctgtacatttcgccggctaatcggtattcgttttgaattcctcgttgagatattttccatccgcacaagtgcttttccagcttataagtactccagagtgccgtaatgttaatcgacgtgtttgctgattgggctaattaggctaagatttggttgacattgctttttctataagctatttacggtccccctaagtgatgtccaatttttgaaagtcattacgaaagttaaaaatataagaatcttaaaaatacccgtaggggtcttttacttgattttaatacttaataataataataataatcataacctttgtgttgaaaatatgaatttaatgcgaagtaaagtctgcaagcattgtaaaccagaggtcggaaacctctaaagagataacattcatttgggtttaagtagtttctttattgttatcattatctttacatatacaaaattgcaaaaattatgcattcattgcgttatgcctatatcattttgtgagagagtatgtttgcttacgatgttttttgttttttttttttttttgattaatgtatattgtctcttctatagtcgagtaagttattgcatagaataaataatgggattggtaagtaaatacaagactttggtagtacatcagagtgaggtggctcttaaagagtttttccataaaaatatgataactagttcgttttgcatacgcgtacaatactaaatttaacttaactaaggattaaacggtatttgaactgtaacataaagtgcttttgtgtttctgctgaaatgatatatgtatactcaggctgaggtagagacagcacgaaatttaa

SEQ ID NO: 19478 - DNA, 2166 bp, DROSOPHILA
attctggtccacccatccgagtggagcgagctttcaagcaagcttatatcgctagcgatacatttgtggtgtttctccaagctcccaagtcggctcttcaatatgagcggttgtcgtcgcaatcgaaagctgacgatggccgtaagtggatgtctgataattgctgtgatggccctcaccgttgggctttgtgtgggactgagcggtgacaccgacgcccccgaggaacagccaaggtttacgatcgaccatgaggccaacaccttcatgctggatggccagcccttccggtacgtctctggatcgtttcactatttccgcgctgtacccgagtcctggcgaagtcggttgcgcaccatgcgagcatctggtcttaatgctctggatacctatgttgaatggtcgctccacaatccgcacgatggagaatacaactgggagggcattgcggatgttgtcaagtttctggagattgctcaggaggaagacttctacatcattctccgcccaggtccctacatttgtgctgagcgagataatgcaatattattattcataattttgactaatattgcctcttttcagggtggtcttcctcactggttgtttaccaaatacccgtccatcaagatgcggaccaatgaccccaactacatctcagaggtgggcaagtggtatgcggagctgatgccacgcctccagcacctgttcgtaggcaacggcggcaagatcataatggtgcaggtggagaacgagtacggtgactatgcctgcgatcacgactacctcaactggctgcgagacgagacggagaagtatgtgtccggcaaggcgctgctcttcacggtggacatacccaacgagaagatgagctgtggaaagatcgagaacgtgttcgccaccactgacttcggcatcgatcgcatcaatgagattgacaaaatctgggcaatgctgcgtgccctgcagccgactggcccactggtcaactcggagttctatcccggctggctaacgcattggcaggagcagaaccaaaggcgtgatggccaggaggtagccaatgcactaaggacaattctgagctacaacgctagtgttaacctctatatgttctttggcggcacaaactttgggttcactgctggtgccaactataatctggacggtggcatcggatatgcggcagacataaccagctacgactacgatgcagtgatggacgaggccggtggcgtcaccactaagtacaaccttgtcaaggctgtgattggagaattccttccgctgccggaaatcaccttgaatcccgctaagcgtctggcctacggaagggtggagctgacacccaagctgacactgctctcgacggaaggacgtgctgcgctctccaagggtgatcccgtcgaatcgatcaagccgaaaaccttcgaggaactagacttgtactcgggcctcgtcctgtacgagaccgagctgcccagcatggatctagacccagccttgctgaaaatagatcaaattaacgatcgagcacacgtattcgtagaccaggaactggtgggcacactctcccgcgaggcacagatctactcgctgccgcttagcaagggttggggcagcacactgcagctgctggtggagaaccaaggacgcgtcaacttctacatctccaacgacacgaagggcatctttggtgaggtgagcctgcagctgcacaatggtggttacctcccgctggagaactggcggagcaccgctttcccgctggagcaatccgccgtcgagctctggcggcgcgaacacactgacgagaaggccttggacccgttgctggcaaggcaacgcattcttcgaaacggaccaatactctacactggcagcctgacagtgacggaggtgggcgacacctatttgaacatggccggttggggcaagggcgtggcctatgtgaacggttttaatttgggacgctactggcctgtggcaggtccacaggtcaccttatatgtgcccaacgagatactgaaagtgggtgaaaactctctggtgatccttgagtaccaacgagcgaataagacagcaactggcgaggatctacctgcagtgcagttcgacgcagttgctcagctggacggagagtctggtgatgttccacttaaatga

SEQ ID NO: 19479 - protein, 687 aa, DROSOPHILA
MSGCRRNRKLTMAVSGCLIIAVMALTVGLCVGLSGDTDAPEEQPRFTIDHEANTFMLDGQPFRYVSGSFHYFRAVPESWRSRLRTMRASGLNALDTYVEWSLHNPHDGEYNWEGIADVVKFLEIAQEEDFYIILRPGPYICAERDNAILLFIILTNIASFQGGLPHWLFTKYPSIKMRTNDPNYISEVGKWYAELMPRLQHLFVGNGGKIIMVQVENEYGDYACDHDYLNWLRDETEKYVSGKALLFTVDIPNEKMSCGKIENVFATTDFGIDRINEIDKIWAMLRALQPTGPLVNSEFYPGWLTHWQEQNQRRDGQEVANALRTILSYNASVNLYMFFGGTNFGFTAGANYNLDGGIGYAADITSYDYDAVMDEAGGVTTKYNLVKAVIGEFLPLPEITLNPAKRLAYGRVELTPKLTLLSTEGRAALSKGDPVESIKPKTFEELDLYSGLVLYETELPSMDLDPALLKIDQINDRAHVFVDQELVGTLSREAQIYSLPLSKGWGSTLQLLVENQGRVNFYISNDTKGIFGEVSLQLHNGGYLPLENWRSTAFPLEQSAVELWRREHTDEKALDPLLARQRILRNGPILYTGSLTVTEVGDTYLNMAGWGKGVAYVNGFNLGRYWPVAGPQVTLYVPNEILKVGENSLVILEYQRANKTATGEDLPAVQFDAVAQLDGESGDVPLK

SEQ ID NO: 19480 - DNA, 2825 bp, DROSOPHILA
aaacttatttcaattctaatactaataaattctatacctttaccgtagtgttggtggcaaagcaaaacagcttctgtaaaaaatcctatgctttctgtgtaattcagtactaggtgtgctatatggaaaattgcttgttgcagacaattgttgttttatgcttctatttgatgcacataagaaaaccaaaatgagccccaattaaataaatattaatttctgcgtgctacctaagccgattgtaactagaatttgtttaaagcaagtggcaggtaaaaggttttgatcttaaatcgttaggaaatgtaaacggaaataaatatttataaatatcaaatgtatatttctaagacagattgtcaatattttggccattgtttgctgttttgcttctgttgaatcttgtcagatatatatttcatttttagaatggcaatttaaagtgttttttatgaattattgtagaataactgctcgtgtactaactgcaaccatttcaattgctacaaatcgaagcaaggcacatatagttaataatttttgttgtgtctgcagttctatcatatgttttaccatatatggggctacgtttaaaaacaaagaattacaattcatagtaaacagaaactatcatcttatggcgagaacacgtttttcgcaactttgaacgatttatatggttcttaatctgtttttggaaacgatatattctaattagaagtttttatagcacagaaagcgattttcatttacatttgagctgtggtatgaattgccatgcttttggtttagttaccgaagctcttggattttatagctgactatactgcgtttattaaagcgttcttttttagttttcaataaaagctacgtggatagcctgccctggaaaagtattcgactaccagcgaacactaacaatttttgcgaaaaccacgaggaaatcagccctacaagcatttggttatggatcttggccatttacacgctatcttttgatcgcttttcggtcacatttcacttttgttgcacaaacaataaaaaaatattcaccagtttcacttaataaaaaaaaacgttcatttattagcgctcgagcgatttattagccatgttgaggggccattttcagtggattttagatggtgtgtacacgttgatcaactggaggctgtcgttatctgcggttaagggagcagctgctatctccgtccatatagcccggtgtgggatatacatcttgggacacacagagcctcctacttgctggccacggccttcttgggcttggcctgggtgccctcgcggaatccgttgcggaaacggcggcgcacaaccttcaggtgctgcatgcgaccggtgccggtggtcttcctcctcttggccttcacggaccagttgtctagtgtgcggagaatacaattattaacctggttactgggcggggattggggcatcttgacttacaggaacgcaacttggcggcggggtagccgcactgggcgcaagtggacttctggatgtggtaggaggagcggccacagcgacggcacagggtgtgcgtcttattgtggcgcttaccaaagctggaggtacccttcgtctgtaatggaaacacgcagggtattagcagttcggcttgcacggcacactcaaaaaaatataagggaaaacactcgaaataggctgcctggctggcagggcaagtgtatttcggtttaacgagcacattgtacgcaccatctctcgtggcgaacggtttaagaatcgaacgaaacttgcaagctacaaatttagcacgtggcttctagcaaagacgacttctccggaagcgcagcaaaaagaaaagggaagaagaagagacgctggtggtgagcagagattagtgtggccgcgttgcgcgagtatcgatagtttttgtccgcagggttgcttaaataccgaaagttggtatttatggtgtagccatttggtggcctagcagccgcagagttgccagacggatagaaaatttaattatatactgaactacaaaaacactgcattaatgtacagccactttacgtaattgtagaacacataatgtatccgatttaatgaacctattattgtttctattacaacagttatcaaaattaacagcctcgtatcaaaaaataccaattacataaatttctcataacagcggacttgcgcctaacagcactactatcggctgccatttcgatagcacaacagcacttggcaagttggcattttaacagcgacaccatatgttaaatcagctgttccttcaaaaggccaatagatggcgcttattattgcccgccaattttgaagtatgatttgtatttcgttcatttacaaacttcgtttattggaaataataaaaccaaccagaaaggtaaaaatccaaatcttgtttagtaaaaatattcattgttttatttatgaaataaattattattatttacattggaaataatgcacgaaattcaaataatattgcatactgagcgacattttagcactggaccgctcgacgatacacacgcgaaaacaaaatctacaaattacaagactctagaaatacaaatacagggcgatatataatgggtaggtacaaaaacataatgaaatggtgtagcttggtgagttggggctaataataatatatatactctttcgatcctgtgcagatatttatacactatgttcggtgtggcacgcgtactacgatattatttgctgttgctgctgctgccgattggagttttgtgatttgtttttgaatttttttttatggattttttcttgtggaatgg

SEQ ID NO: 19481 - DNA, 623 bp, DROSOPHILA
agaagtcgtctttgctagaagccacgtgctaaatttgtagcttgcaagtttcgttcgattcttaaaccgttcgccacgagagatgacgaagggtacctccagctttggtaagcgccacaataagacgcacaccctgtgccgtcgctgtggccgctcctcctaccacatccagaagtccacttgcgcccagtgcggctaccccgccgccaagttgcgttcctacaactggtccgtgaaggccaagaggaggaagaccaccggcaccggtcgcatgcagcacctgaaggttgtgcgccgccgtttccgcaacggattccgcgagggcacccaggccaagcccaagaaggccgtggccagcaagtaggaggctctgtgtgtcccaagatgtatatcccacaccgggctatatggacggagatagcagctgctcccttaaccgcagataacgacagcctccagttgatcaacgtgtacacaccatctaaaatccactgaaaatggcccctcaacatggctaataaatcgctcgagcgctaataaatgaacgtttttttttattaagtgaaactggtgaatatttttttattgtttgtgcaacaaaagtgaaatgtgaccgaaaagcg

SEQ ID NO: 19482 - protein, 93 aa, DROSOPHILA
MTKGTSSFGKRHNKTHTLCRRCGRSSYHIQKSTCAQCGYPAAKLRSYNWSVKAKRRKTTGTGRMQHLKVVRRRFRNGFREGTQAKPKKAVASK

SEQ ID NO: 19483 - DNA, 7340 bp, DROSOPHILA
gcttcttgtcgttcagctcatggtgctgccagtgcgtgagcagacagggagcttcgttgcttccgatctttaatcgcgcccagcttacactggtcactccgatgcgcacccctacagcagatacaatacgtgaacgctgtccctcgtccatggccggtgttataaagggcgcgactcgtgcagtctttggtctattttcccctacttgtgcgctcccactgctcggcggcgcaagcagactcttaaagaacttggtggtcaccttcagtccgaatccctccacatacaggatgtcgctgagttcctgcagcggtccgtgacggttcttccagttttgcagcttggttgcccttgccttggttatgtcgtagctgggcgggataatcagtatttgtgcaaggcaaagtgcaggagtggctacctacttggctatctgattcatgctgctttcattaatcgtcttcaagatcttcaaacgatctgcatccgagtaggcgggcaagaggccgatggcttggtcacattccggctgacccgatctgtgttgctgcgtggacgaaagtcttaggcattttgtcgttacgcccaacaatgatcgccggcacaacatattttccagtatatgatttatatttgttgttacttaatttgatatcgtctatacagctgttcggttagtgggaccaagctcattttttcagtttttctaattaatcgatatacaatgctacaccatcgacggctacaaacaatttatagcaactaattgttaagtgaaaaagatgagagaaaaggcatgtatttcacacagcaatcattatacattttaggtaaaactacaaaggaaataatttataaatataatataaatcacattattaattaatttttaaagaagaagaaactggagcagtccgtatagtatggctaaagaaaaatgctaaaatcgcagcactgcacgctctctgtcctctcacattctctttcactctcgctgcgggaactcgaagttccagtcggaacgtcaacgtcgagtgggcagtcgtacgtcgattgttgagcggctgtggcacatatataaacaataaatacaattcgtaattttaattgaattaagacaataacaacaacggtttctgggactcggttgccttgccatatgtgacacaaagcacacacatgcgaccgtaaactcagaactctgtatttgcgcgaatgtgggtgcataaaagtgaaatttcacagcgacaagtggaaaagaaaacggagaaaggcagagctgtggccaaaagaaaatcctggtcatgtcatgcaacaataacaacaactataaaaacaaaaccacgtacggctattcgaacaacaatgataccaactgcatcatgcagaagccagtgcccgcctccaccgcacccgccttccctcagctgatccaggccagctgttccaacgccgtggaggtggatccaccagacagcattgtgggggctgccggcaactccgaagctctcttcgccgcccagcgcacaccggacacgtcggaggacagcgaatgtgacccgtttctagccagtcggagagctacccgctcctccgccaccacctctgtgctacacaaccggaagcgcaactcgtgttggggacgagcccacagctttctcacccgcaactggtacctgggctgcttagtgcccgccaccattctaggcgccctcgtcttcatcggatgggcgacgcgggactatgctcgccaattgctcttttggatcgaaatgcagaacgcctggataacatttgccgtctacatggggctcttcgctcttgtcagcttccccgtggtggtgggctacttcgttctgctcatcaccgccggttacctgttcggctgcctgcgcggttgggtcaccgtgatcctgggcgccaatatcggcatagccgtggcccatgccaccattcgcagctgccggcaccgcattcccgtccaaaggtgagttgcgcgtctggtgacacttcatcgacttcttaaaatcatatatttatgcgtctttagtttaaaactgcttcgatattccagaaactaatttgtgcacttttacacgtcataagcggcataaagcgtaaaatttaaaaagctaaaaatcgaagctccgttgaaaatacagagtttatttatctgttcgttgagtagtgttaaatactacgcatacaaatccccaactgttgaaaattaggtgtactatcttctaaagtcatgcgctttgctcttgtaggtacactccgttgaaaataattaattgtgtctatgtatccttgataaagatctccaaccgattccatttgtccgtttgtctgttgtgatttaacaaactaatccgcgcaatttggttttaagtcattgccgcgatcacaaacgcagtaacctgttctacacttcttaaaaaatatttcagtttttaaataataaattcatctctccaataatcaagaaacagtggtcacgcacaaaacgttaatatttttaatacttttaagcggaaaactgatctttgtattgacaagtgctacagagtccatatgcccattttacgagtagtacatatttaaatttattgcgatcagggaaccctatcttccataagtctcgctttcttgtatctagcccttatattacccattgctctgtgtgctttttgtattctccaatgctgcggtttcttcgaaattttaagtattatgcctggcaagaggtgcgtcgcggttgttccgtagtggccccaccggataggagtgatgtgcttctggtgctgccaacggtctggccctccgagcttaccaagaggatccgcccgctctcagtgcccgacctgatcgagaagttctcctgcgatgcccctggcggacagttcgccacaatgtccgagtacctgcgcagcgatccacggcccgacggagttctcctgccggatgaaattgatctgcaccgaaaaatgtccctggacgaccttaattcttatatgcacgcgaaggacgcattcaaagagccgcacaggaaaaaccgcatattttcgcacgttcttgtggtggccggagctgactcagctcggagttacccctttcggcagaggcctgacttcctctatctttgcgactgcttgagaccaggggcagcattggttctcacccgcagccgaaagcgaaatactggcgcgttgctctttctttcccaggatgtggactcccagctgtccaccatttttagccatatgcactacgtggacgacgttctgcccctcgcaatgcttaagaaaagtttactctggctgttaagggatcactcgcccgagctatggcacttctacgacccatcgagtcctgtcagttgtatagtgcaagaggtggctaatgaagccaagattcctatgggcaatccccgatacatcctccagtacacacgcaccgtcaagacctcgcgggagctgagagccctgcgtcgggctaacgccaccgctgcggactccatggcggaggtaatcgcacagcatcatcagattcctcaggagctggccgcttcatttgactacaagtgccgtttgcgccacgctcgtcccgacgtgacaaaaacttcgtgcggattggatggcaatgggctgtggcagatggacgctggatgtcagtacggaggctacgaggggggactggccagatgctggcccagctcggggcgattcacgccgccccagaaaatgatttatggtgcgctgttggacatgcgtcgggatctgtgctcgttgatacagtacgcaggatgtgagggtgccgtccgcacacctctggaactgcacgccgcctatttaatccttctggctcggcacctaagggagctccgcgtgttgcctaagggtgtcagcagtgcagccgagacagtggagttggctcgcaagtacaactgctccccagtcgtggtctcgcacgtgggtctgggaaagcgagacaccagtcgcagactccttgactatcccttcgctcccggaaacgtgatgtcgctgcggctgtcaatctctattcccgatgactgctgccaggcctaccccgagttccggggcattctttgtcagcttggcgacaccctgcacgtccgggatgattactccgtggatctacttaccgccgcctgccccagcgagccccaggacatagaagtctgtctacctgcaagccgaaccagatcgcatagattgcggaatgacggtgatcaaagtggatcttgtgacacacgacaattgcaaagccacggtgacggcgactgagcaaatacatttgcccaaggaatatctgataagggcagttattccgcaaaatcgatatcgcgtatccacatcgccggtacatataaatgtgttgtatgttttgtatataggtactaaacgctcatttgtcattaaacccgtttgcaattaaaacccgcctcattgggtaaatccccctttaacgctcagtcggttttgatctccttatcagacatttgtcgcgcctgatagcagcaagcttttaatttccgacaattactaaactaggttccaatacccagcggacataattaatcaattacagaggcttatgaattttctttaaaaataacacatttatttaacatcacatttaccaaataggcacacctaattaaaggttatttgtgtgatagcatgaaatcaatgcctaccaatttttatgagggagcgtaaactgtttcatcgacgaacggtggaactggctgatagccccaataatcatttcctgattgttggataaactcaattagagtcagtagttgggtgtaattatgtatatatgtacatatgtatacttaataaattaagtgatgagacccgttcgattgcatctatttgcaggctgatcaagaatgatacgggacgagccattcttcgcgtcatttctggcccaaaggcatttcgagtcgttctctttacccgacttacccccattcccttcggagtgcagaatgtgatattcggagtaagtgactagattttgtcagatctattgttattcttgaacttgttgttcagaaaagggcgagttcgaaatatctagatattctcttattgtttgccaatttgtcacttcaagaattttatttattaactttaagaattcgaacgtaaaattaaatggaacaaattgaaaatggaccaaatattcgtcacactgacatgtaaataaaattttgcaaagctttgtgaatctatatgaataattatttatactgcaatatttaaatagctaattatacgaataatacagagacggttacgttgtatacctaatatatgtgcatattcgtcaagtttctatgcagttaaactgaacaaaaaccagttttccttaaaaattaggtgctaaatcatggcacgcttaaaccatttagtttctatatcacactattattttcacagatcagttccatcaacacaagagactaccatgtggccacgctgattggtttgctgccagcccaaaccatcaatgtttacttgggttccacgctaaggtccatgcatgaagtgctcagtgataacgataccaaactgacggggtatatcagcttcctgtttgaggtatgttcgctttggatcgcaattgacctcttcttagatcatatgcctaatagtttttgagtttgtacatttgaattgcttcattattgctgtttaataagtccacaagctctttgtttaattatcttgttttatcttaagttatttaatccacaatgtgtcttttgtgtctttaaggtaatttgcggcgtggccttgatgttctgggtattgcagaaggccagaaaggagctgtctgagacgttgctgagcgctgattacaataacgagggcaagcatcccgacgtacaagtttaacaggagccacttggggaacggagtcctacaggacccccagccaaagagaatctcctggactttaacagaagactgcgtttttgcattacctagttcaaactaaggcggttttcgagttgttttatttatttatgctcaaggcaatgccattgaaaccaaacattaagctagccttagcagatacggattcaaatcacactcgttccctaaaactgtatgagggtgtgtcatgcttcacatcacacattacttctaagaattcctgagatgtacatttataaataagtcaaagcctcgctcaaagaccgctagctcgaagactcgattgttggtcataatgctgctctataatgttgttcaattattagtttgtaagcgaataagcaaataaatgagctctaaagtacaacttttctacatcatcattgtgctgtttctccaactgcgagggctcttgctcatatgaaatttaaacgcttcctccagtgtctccagggcaaattccacgtcttcggcacaaagacacagtggcggtctcatgctcagcacctgaagagaagaggaaacttcaaataatgcgaaaattattattatattaatgaccctccgtcctacagtgtagcatcaaaaaatgtaatctggaaattttacatttcatgggatctttttactggtcaaggccaggtactaaatttaaaactgaaacaacaattgttgttctaaaagattgtgctttaggaataacttgtaaggtaattgtcaaataatgttcgtgcgcttaaacttttgaaaatctacattggtacccaatttttacacgtttaatacgtgctatatatgtagtgcatactttcagtcattttgtatttaatgcttatgttgtgtcaaaattttatatgtatatcctgctaccaataatttatccttttcgaaccgtccaagatgctagaatttgcattttcaaaaagatagagcttgggaatgtcttctgatttctatataaataaatggttataccgatttttaagataagtgggtgagtacatttagaatggtgcgtatgctgatcgtagattatagccatattccgagcttagggttgccaagtaaattacaatttggaatcgaagtgctgaggattatttttttttttcatgtgcaaatatcaacttgaatcataaaagtgtacacgtgtgcaatcgaggttttagagaatccaagagtgagttatgtgtaagtttgacaagagcgtttgagggatcaatatggaactacttcactcccacagatggtaatggcaaagatgcaaggtaatctggctagcagtagactgtggattttctggggtgatttgccccgcccatttgggaaacgcagtaacatatactagtcttgtgggatcttcaa

SEQ ID NO: 19484 - DNA, 3216 bp, DROSOPHILA
gaactcgaagttccagtcggaacgtcaacgtcgagtgggcagtcgtacgtcgattgttgagcggctgtggcacatatataaacaataaatacaattcgtaattttaattgaattaagacaataacaacaacggtttctgggactcggttgccttgccatatgtgacacaaagcacacacatgcgaccgtaaactcagaactctgtatttgcgcgaatgtgggtgcataaaagtgaaatttcacagcgacaagtggaaaagaaaacggagaaaggcagagctgtggccaaaagaaaatcctggtcatgtcatgcaacaataacaacaactataaaaacaaaaccacgtacggctattcgaacaacaatgataccaactgcatcatgcagaagccagtgcccgcctccaccgcacccgccttccctcagctgatccaggccagctgttccaacgccgtggaggtggatccaccagacagcattgtgggggctgccggcaactccgaagctctcttcgccgcccagcgcacaccggacacgtcggaggacagcgaatgtgacccgtttctagccagtcggagagctacccgctcctccgccaccacctctgtgctacacaaccggaagcgcaactcgtgttggggacgagcccacagctttctcacccgcaactggtacctgggctgcttagtgcccgccaccattctaggcgccctcgtcttcatcggatgggcgacgcgggactatgctcgccaattgctcttttggatcgaaatgcagaacgcctggataacatttgccgtctacatggggctcttcgctcttgtcagcttccccgtggtggtgggctacttcgttctgctcatcaccgccggttacctgttcggctgcctgcgcggttgggtcaccgtgatcctgggcgccaatatcggcatagccgtggcccatgccaccattcgcagctgccggcaccgcattcccgtccaaagcccttatattacccattgctctgtgtgctttttgtattctccaatgctgcggtttcttcgaaattttaagtattatgcctggcaagaggtgcgtcgcggttgttccgtagtggccccaccggataggagtgatgtgcttctggtgctgccaacggtctggccctccgagcttaccaagaggatccgcccgctctcagtgcccgacctgatcgagaagttctcctgcgatgcccctggcggacagttcgccacaatgtccgagtacctgcgcagcgatccacggcccgacggagttctcctgccggatgaaattgatctgcaccgaaaaatgtccctggacgaccttaattcttatatgcacgcgaaggacgcattcaaagagccgcacaggaaaaaccgcatattttcgcacgttcttgtggtggccggagctgactcagctcggagttacccctttcggcagaggcctgacttcctctatctttgcgactgcttgagaccaggggcagcattggttctcacccgcagccgaaagcgaaatactggcgcgttgctctttctttcccaggatgtggactcccagctgtccaccatttttagccatatgcactacgtggacgacgttctgcccctcgcaatgcttaagaaaagtttactctggctgttaagggatcactcgcccgagctatggcacttctacgacccatcgagtcctgtcagttgtatagtgcaagaggtggctaatgaagccaagattcctatgggcaatccccgatacatcctccagtacacacgcaccgtcaagacctcgcgggagctgagagccctgcgtcgggctaacgccaccgctgcggactccatggcggaggtaatcgcacagcatcatcagattcctcaggagctggccgcttcatttgactacaagtgccgtttgcgccacgctcgtcccgacgtgacaaaaacttcgtgcggattggatggcaatgggctgtggcagatggacgctggatgtcagtacggaggctacgaggggggactggccagatgctggcccagctcggggcgattcacgccgccccagaaaatgatttatggtgcgctgttggacatgcgtcgggatctgtgctcgttgatacagtacgcaggatgtgagggtgccgtccgcacacctctggaactgcacgccgcctatttaatccttctggctcggcacctaagggagctccgcgtgttgcctaagggtgtcagcagtgcagccgagacagtggagttggctcgcaagtacaactgctccccagtcgtggtctcgcacgtgggtctgggaaagcgagacaccagtcgcagactccttgactatcccttcgctcccggaaacgtgatgtcgctgcggctgtcaatctctattcccgatgactgctgccaggcctaccccgagttccggggcattctttgtcagcttggcgacaccctgcacgtccgggatgattactccgtggatctacttaccgccgcctgccccagcgagccccaggacatagaaatcagttccatcaacacaagagactaccatgtggccacgctgattggtttgctgccagcccaaaccatcaatgtttacttgggttccacgctaaggtccatgcatgaagtgctcagtgataacgataccaaactgacggggtatatcagcttcctgtttgaggtaatttgcggcgtggccttgatgttctgggtattgcagaaggccagaaaggagctgtctgagacgttgctgagcgctgattacaataacgagggcaagcatcccgacgtacaagtttaacaggagccacttggggaacggagtcctacaggacccccagccaaagagaatctcctggactttaacagaagactgcgtttttgcattacctagttcaaactaaggcggttttcgagttgttttatttatttatgctcaaggcaatgccattgaaaccaaacattaagctagccttagcagatacggattcaaatcacactcgttccctaaaactgtatgagggtgtgtcatgcttcacatcacacattacttctaagaattcctgagatgtacatttataaataagtcaaagcctcgctcaaagaccgctagctcgaagactcgattgttggtcataatgctgctctataatgttgttcaattattagtttgtaagcgaataagcaaataaatgagctctaaagtac

SEQ ID NO: 19485 - protein, 834 aa, DROSOPHILA
MSCNNNNNYKNKTTYGYSNNNDTNCIMQKPVPASTAPAFPQLIQASCSNAVEVDPPDSIVGAAGNSEALFAAQRTPDTSEDSECDPFLASRRATRSSATTSVLHNRKRNSCWGRAHSFLTRNWYLGCLVPATILGALVFIGWATRDYARQLLFWIEMQNAWITFAVYMGLFALVSFPVVVGYFVLLITAGYLFGCLRGWVTVILGANIGIAVAHATIRSCRHRIPVQSPYITHCSVCFLYSPMLRFLRNFKYYAWQEVRRGCSVVAPPDRSDVLLVLPTVWPSELTKRIRPLSVPDLIEKFSCDAPGGQFATMSEYLRSDPRPDGVLLPDEIDLHRKMSLDDLNSYMHAKDAFKEPHRKNRIFSHVLVVAGADSARSYPFRQRPDFLYLCDCLRPGAALVLTRSRKRNTGALLFLSQDVDSQLSTIFSHMHYVDDVLPLAMLKKSLLWLLRDHSPELWHFYDPSSPVSCIVQEVANEAKIPMGNPRYILQYTRTVKTSRELRALRRANATAADSMAEVIAQHHQIPQELAASFDYKCRLRHARPDVTKTSCGLDGNGLWQMDAGCQYGGYEGGLARCWPSSGRFTPPQKMIYGALLDMRRDLCSLIQYAGCEGAVRTPLELHAAYLILLARHLRELRVLPKGVSSAAETVELARKYNCSPVVVSHVGLGKRDTSRRLLDYPFAPGNVMSLRLSISIPDDCCQAYPEFRGILCQLGDTLHVRDDYSVDLLTAACPSEPQDIEISSINTRDYHVATLIGLLPAQTINVYLGSTLRSMHEVLSDNDTKLTGYISFLFEVICGVALMFWVLQKARKELSETLLSADYNNEGKHPDVQV

SEQ ID NO: 19486 - DNA, 3028 bp, DROSOPHILA
tctttcgcgagagagttggctggcgcttttcgcctaagagacgtttctctttctttcagctgcacctgcagttttccactagtttttctcgctctcttcatgagtagtggtgatgggcatttgggggggtgccgagtggccgaaggggcggagggcggggcactatcgtttcagactggtcagcctcggttttttgcctctgtgtgggtgattccgtgtatgtgtttatgattatttttgttattgccttgcgcatttataatatgcgaaacataaaataaaaaaaaaacacaaatctagcaaaaataataaattcttgcaagtgcgagcgggacgaagctacatatcaaggtgagtgagcgagaggtggcgagaggggtccactacagccagtcataaattatgcataattttttcgtgactggcaaatggcggctgcttttcattttggttacattataataaacatcggccatgaatcgaatcgcgaatcgcgataaaggggcacaaatacgcgatcggcaggtatccatcgatcggattatattcagtattcatctggcatctctgaatgagtcttttaatgccttcattcactcgtatccggtgatttaatgacgctaagtgatacttttgcctactctaatggccagcccttgaaatagttttggactttgtatctctactatttaatgagtgtgtgtgctattaattcataagttattcgggctttttaggcttttgagtattttgaatgaattcaggtaactgaatatggtttttatgtattggataaattaataataaaactgattgtttttctattatactatatatattatatatactatatgtggtaatgcttgcaccacttaggaccctttgcagatagttctgcttattttccccctaaaaaccatatgcaattagataacactgtgtttatagcaaccaatgaattgcagccaacagaatttggatcaaacgcagcaacacgaaaatgcatcacgcattctctaagttgtttgctgttgtgttgcccgctataaagtggaaaagagggaagggggcgggcgctgggaaatggaaaattgggaaatggctgctaggctcgcgactgcagaacgcgtttatacgaaaatttatgtatttaactggtgacgacgacgctgacgagcaaaacgatgacgcggacgtgaaaggacatcggagctgtggagatgtggacgccggttcgtgggatggaatccactggatgctgatgtccaaaaaagcgacgaaagcctctgcgaaaggccaaaaatgggtgggccggtggctctgtggggtggagtgtgtgtgcggggaaagatgacaacatttgagccaaacagacaaagttgcggagggggtgagaggtcgccgtctgacccacacacatgagtgaacgaacaagcaaacaaacaaataaaacggttgccatgagtgtgaatgcactggcagaaaacctaggcttctggttgtcaaaatgtataagcttacaatgcagtaactgacttagttgatctcagctgcgcggtaatgcaatttaaagtcttagtattaattgttaagaaaagagtgagcatttatgaaattatttcaaaaaaggaaggcccttttaatagtacaataaattcgacatttttaatgtagccaaagaagtgatgtggtacgagatctcgctgctttttgttctcagtgagaaatgctgcgaccatggaggtgaccaaacgtacacataaggggtaaaatgggtactggggaggggaaagagtatggggatggggcatcgccggcggggagatcagcgggaaaaaatgttgcatattaaaacgccaaatagaagagtgcaacagcaacaggaacagcgacaacggcgacgttgcagcttagagaatgcagaaaatgggtggcacaagggttagccctttgctgattcttcgtcctcagctgctgcttcgctgctttcctgctcctgccgctggttttaccttcgaccatgtctgaaagttggcttacacacaaaagcgatgagcgatgatgcctcaaatatgcaaaaatgcctagcgcaataaaacccccttgagggcgtatgggcaatgaaaaagggcttaaaaagggagtcaccatgcaaggtttggggtgtgagggttttagagtcggtggattggcggcaggagtggacgtggaagtccgagctgctgaccatcggggttgcaacgaaacttggaacttggaaatgcaggcgagctccgagagtcgcgtttcgttgcgttgcgttgcgttgctaacgatgccgctggctgtctgattgggaaacgaatcgaggagggggctctggatgccatgccccagaatggggcagatggggcacatggggctgacggccacgattgagcagtcggggatcaggtagaggggtgcatgccacagacacaaacagatagacagccggccgagaacgagaacgagaacgagaacgagacggaggacgcgcacgaggatttgccaaaggatgagcacgaggacgaggactagtcctacgcctgatctaggaatagatgcagagcaaaaaatgctaacatagaaaataatcacaactaattcaaaatcacaagctccataactccacacatactttaaataagcataccatctagccatctattttattgtaatagtaagggggtgctgcagttatttcgcgcagtgcactcccctattgggcccgcattgatggacagttaacgcggcaaaacgaacgcgaaaacatggtcagaagggggttggtgggtggctggccgaagggggctgtccctttcagcggatgctgttgctgctgaagccagcaggcttagacggcgcaactgtaccgaggattgtttgcaggagaataggaagaagaggtcctggggacctgggatcccggctgccggttcctggtgcccggtgccccactggcaagattttcgcgtgcgttgcaagttgccaatgtccagtgtcctgt

SEQ ID NO: 19487 - DNA, 1028 bp, DROSOPHILA
atgcatcacgcattctctaagttgtttgctgttgtgttgcccgctataaagtggaaaagagggaagggggcgggcgctgggaaatggaaaattgggaaatggctgctaggctcgcgactgcagaacgcgtttatacgaaaatttatgtatttaactggtgacgacgacgctgacgagcaaaacgatgacgcggacgtgaaaggacatcggagctgtggagatgtggacgccggttcgtgggatggaatccactggatgctgatgtccaaaaaagcgacgaaagcctctgcgaaaggccaaaaatgggtgggccggtggctctgtggggtggagtgtgtgtgcggggaaagatgacaacatttgagccaaacagacaaagttgcggagggggtgagaggtcgccgtctgacccacacacatgagtgaacgaacaagcaaacaaacaaataaaacggttgccatgagtgtgaatgcactggcagaaaacctaggcttctggttgtcaaaatgtataagcttacaatgcagtaactgacttagttgatctcagctgcgcggtaatgcaatttaaagtcttagtattaattgttaagaaaagagtgagcatttatgaaattatttcaaaaaaggaaggcccttttaatagtacaataaattcgacatttttaatgtagccaaagaagtgatgtggtacgagatctcgctgctttttgttctcagtgagaaatgctgcgaccatggaggtgaccaaacgtacacataaggggtaaaatgggtactggggaggggaaagagtatggggatggggcatcgccggcggggagatcagcgggaaaaaatgttgcatattaaaacgccaaatagaagagtgcaacagcaacaggaacagcgacaacggcgacgttgcagcttagagaatgcagaaaatgggtggcacaagggttagccctttgctgattcttcgtcctcagctgctgcttcgctgctttcctgctcctgccgctggttttaccttcgaccatgtctga

SEQ ID NO: 19488 - protein, 117 aa, DROSOPHILA
MHHAFSKLFAVVLPAIKWKRGKGAGAGKWKIGKWLLGSRLQNAFIRKFMYLTGDDDADEQNDDADVKGHRSCGDVDAGSWDGIHWMLMSKKATKASAKGQKWVGRWLCGVECVCGER

SEQ ID NO: 19489 - DNA, 4849 bp, DROSOPHILA
caatcgctatgtgccggagagtatgcgtggacaggtgaaccaggcggtgggccaggcagccatcaatgagttgtccaatgccttcagttcgcgattcaagtaatggccgcgtaattgagtgcacagcatgccagagtatgcttaattattaacagaaacagaaacttagagagccagcacgcgaaacccctccccccaccaaccatatcacatcatttttttttttatcaaagatgtaaatcccaaaaagatggcaattcccatccagttgtttcgaaaattcgatggaaaaatttaaaaagtgttttacacatgatcttttggacaattcaacattcaaattagtgctttcgaattaagtttatcggggataccatttactttttaaagtatatttgaacgtgaaataaaaaaaaaaaaatttattttccaaaacgagtatttatgtatatgtaaaaaacagtgctgctagcttcatagttttcgtttccagatggtattacatatatccgtacatatatgatatttcgaatcgcagtgcaggaggcggacgagtgcaggaatgcaataaagccagtatttttttaaagctcaaaacaaaaaccgaagaaatatctaaaaggaaaatcgttaattgcagtgttacaatgcttctacattgatggtaaaaaaaaaatcgaactatgtactcactctaaaaacttgtatgaactaaactatcctcagagcaatgaattatatgcgaacaaatattatttagcaacgcaatgtccgcaagaaattatacaaaaacctattcaatgataaatattatgtgtgtgttaaggttatggtctttaacgattcttgtttatagacgtttgttaataagaaaataaagaaaaattaaattattcgcattgcctttaactacttggattcgtttggtaagctaatgcgatttatctgaaagtaaattatacgaaaatatacatacatcatagagggcagagaagaaattgcttttttctatcatttatttgccaacttatataattgttatccaaagttaactttaacatattgtttttctctttatgttggatggtttttaaaaaaattgcatttaatagttcgttcttttttggttatctgtgtaggatttcgaaaagcttatatacaaaaaaaaaatgttgctttgctgcttacaatcagtctcgtttttatgtttcatccatttcaaagtttcatgatgattatttaaaactattttatacaaaatatttaggatagctaaaaataataacccatagtttggtaaaaaatagttgcgtacatataaaatacatcgattcaaatgtaaatagtgtgatattggccaatcctatagtgatcggactatttggatcctatatataatttcaacttaagcctgacataactatcatgtatgcataactatcatttgacacctcaaaatgtaacgtcttgtatctcgttttgagcctgagcctgcgcctgcatcttgcacgtgtgcgtccgatgtggcgctgcggacccaaagttgtgctgctgctggtgttgctccacgcactcggcaggagctttcggtagcggcaagggtctaattgagatttgcgagagatgctgcgattgatgtatttggaagcgcctcttgtagtataatgttgacatttcttttgggtcaatattcactagaaatggctctagattccgactgtgctccttaaagatgtcctccatgtgcagcatacaatctcgcacctgagcctgtgcatttaaaatcaattgagtggtggtacataacaacactgctcccttgccatactcacttgctccacgctggttagatcggtcatcagactcaaaaggaagtgtagattgtgtcccgatcgcagatgccactttaggccattcattgacgcagctatgctcgatgcagctatggtgctggccgagaacttggcaaacttatgttcttcaaaggaaggggtgggaagtcagtacttaagttggactgttttgtatatggcttaccttttgctgccaacgatataaatgcctgagcatgtccccgcactttgccaatgtttatgtccggaaagtttttgctgcctatcggcaggcgcatcatcagaagctcaaggaagtccaagggagtcacagatgagaggtcccagcccaagcgacttagcacatacagctcccatttcttgggaatgaaatgaaaccgcatgttcaccgaaaggtattgtattacgagaaaggtacttacaatcaaatcatccttgtagatgctgttgtccgtgtaaacaacgagtagatccaccgaaagagcacgacagctgggttcacggagctttgaagccagtaagaggcaagctgcggccaaaatttgtagctgggtcttgcgtactgatttgctcgaaagaaatcgatccatgtaatttaatgccagtaatacgacctcttcctggcaattttcctcggcacacacctgtgaacatgtattcaattaatgaacgaaaagggtagtcaaaatattgtaatgggtgtgcgataaggactactaaaacaaacactaattaatgaagttcttggaaacttccatctatttggtaatattttctaacagattataaataatgcgtatatcacagtcggctagcttgatatgatttggatgctgtatctacatttcgtttaattactcacttccatcatccattcggcgacaattttgcgcatcggtggcgtaatatccttctggatgctaaagtacgtgtcgggaattttgtggtgcttctcctcgaccttgaggaaattctccagacaccgatccgaatacaatgtgggatccccgatggcagtgttcacgttgtcggttgcgggtggatcggctgttgtggtcaggcgttcgtcgagtcgttggcaatgtgacgtcggtggctcctggctgatgtaacgcggataactttggattgattgggtcgctgtcggtggtggtggcggcggtggtggaggtggcggaggcggctccaattgttctggatttttcgcagccgagtccacggacgcgtatatatacaccagctccttcatattgcacactacggcattgttctgggcatccggatgggaatcggattccgcgtcccccaaggatgaacatatcgatgattgatcccgaatgatcgccggtgaggacatttgctgctgtcgtttgttcaaacgatacaatgatggatctgattcgtagactatgatttccgagcataaaagatccattatatcggccatacgttccgtttaaagctatggattctatggatcgccgcactctcaagccatttatgtgtgccgatttatcaggaactttgggtaactccgatatgggaacactgcgtacaataggaaatgatcgtacataagtacatacatacatatgtatgttgcaaccttcttttcacatttaattcaagtatttgctcaagtatgggcacactgcgggcatatgtgtttagtcctgtgggagcactagagtatagcatataaccctaataccttgacttattcatatgcacattacattatttacatattttttcgacctgctcagaaataactcgttcatttcacactatgtacttatgtacatgtacatgcatggctatgtacgatcagctcgagaacaaaagttttcacttacgcctattctcggaattctggttatatacaaacggcacagcacttcatggagtaatgtaaattaactattaaaaaagtatactcgaagttgcacacgtttgccacttaaccggcgtggacaaagcatttatgtgaaccagatagttacaccttatggcagaaaaaaactagttcagcatgccgtcatcggagttatatctcttgctcactgcgatcagtaaaacatatcgatcttcatcggttattagtatagtactatcctttgcaatgaaaggcaagcgaaatacgttgaaaaggggaacctcctcattgcgtttccaacttgttgcttgtgaaatatgtttcacttagggttgttattagaacattaaaaacttataatccatcaatgggtttgatggactataaaagggtcttacccttataataaaaacaaagttcttctaattgcactactttttttcttaaataagctttttgttatacgatcttacgaacttactcttgatgtgaatttcacatcactcaagtgttccaattactccagcaaaatcaaaaatactaaaatatgctagggcgttgccaccctgcattcatgtaaggatggtactgacagtcgatctttcggcatgtcatacatttaacgatcgtggtccacgacaaaatggtcagtaatgcaaaactcactggcatcaccctactaggttgaatcgtgatcaaaacacccttattaaattccgtttaaatggccggaacctgttgattaaatggcaggttgttcgaaagagtcgtaaataaatgaatgctgcacttaaagatcctgtaccgcttacaaaaagcattgaactgctgttattttctttagggttgtacttaaacagttttagatgacaaacagtaagacatgtaagaaacctaaaataatttcactaaaaaaattctaaaagcaattgtaaaaaaaagatataatctttgctgctttgtttaataattaataagatattgataaaagggtaaaaagctttcgcgacttaggaatgccaggttaatgataaacaaaagtaacctgtggatcccttccgagaaatgatgtaccgatatatgtacacatcgagattaaaatggacttccatgtccattg

SEQ ID NO: 19490 - DNA, 2139 bp, DROSOPHILA
tctggttcacataaatgctttgtccacgccggttaagtggcaaacgtgtgcaacttcgagtatacttttttaatagttaatttacattactccatgaagtgctgtgccgtttgtatataaccagaattccgagaataggctgttcccatatcggagttacccaaagttcctgataaatcggcacacataaatggcttgagagtgcggcgatccatagaatccatagctttaaacggaacgtatggccgatataatggatcttttatgctcggaaatcatagtctacgaatcagatccatcattgtatcgtttgaacaaacgacagcagcaaatgtcctcaccggcgatcattcgggatcaatcatcgatatgttcatccttgggggacgcggaatccgattcccatccggatgcccagaacaatgccgtagtgtgcaatatgaaggagctggtgtatatatacgcgtccgtggactcggctgcgaaaaatccagaacaattggagccgcctccgccacctccaccaccgccgccaccaccaccgacagcgacccaatcaatccaaagttatccgcgttacatcagccaggagccaccgacgtcacattgccaacgactcgacgaacgcctgaccacaacagccgatccacccgcaaccgacaacgtgaacactgccatcggggatcccacattgtattcggatcggtgtctggagaatttcctcaaggtcgaggagaagcaccacaaaattcccgacacgtactttagcatccagaaggatattacgccaccgatgcgcaaaattgtcgccgaatggatgatggaagtgtgtgccgaggaaaattgccaggaagaggtcgtattactggcattaaattacatggatcgatttctttcgagcaaatcagtacgcaagacccagctacaaattttggccgcagcttgcctcttactggcttcaaagctccgtgaacccagctgtcgtgctctttcggtggatctactcgttgtttacacggacaacagcatctacaaggatgatttgattaaatgggagctgtatgtgctaagtcgcttgggctgggacctctcatctgtgactcccttggacttccttgagcttctgatgatgcgcctgccgataggcagcaaaaactttccggacataaacattggcaaagtgcggggacatgctcaggcatttatatcgttggcagcaaaagaacataagtttgccaagttctcggccagcaccatagctgcatcgagcatagctgcgtcaatgaatggcctaaagtggcatctgcgatcgggacacaatctacacttccttttgagtctgatgaccgatctaaccagcgtggagcaagctcaggtgcgagattgtatgctgcacatggaggacatctttaaggagcacagtcggaatctagagccatttctagtgaatattgacccaaaagaaatgtcaacattatactacaagaggcgcttccaaatacatcaatcgcagcatctctcgcaaatctcaattagacccttgccgctaccgaaagctcctgccgagtgcgtggagcaacaccagcagcagcacaactttgggtccgcagcgccacatcggacgcacacgtgcaagatgcaggcgcaggctcaggctcaaaacgagatacaagacgttacattttgaggtgtcaaatgatagttatgcatacatgatagttatgtcaggcttaagttgaaattatatataggatccaaatagtccgatcactataggattggccaatatcacactatttacatttgaatcgatgtattttatatgtacgcaactattttttaccaaactatgggttattatttttagctatcctaaatattttgtataaaatagttttaaataatcatcatgaaactttgaaatggatgaaacataaaaacgagactgattgtaagcagcaaagcaacattttttttttgtatataagcttttcgaaatcctacacagataaccaaaaaagaacgaactattaaatgcaatttttttaaaaaccatccaacataaagagaaaaacaatatgttaaagttaactttggataacaattatataagttggcaaataaatgatagaaaaaagc

SEQ ID NO: 19491 - protein, 481 aa, DROSOPHILA
MADIMDLLCSEIIVYESDPSLYRLNKRQQQMSSPAIIRDQSSICSSLGDAESDSHPDAQNNAVVCNMKELVYIYASVDSAAKNPEQLEPPPPPPPPPPPPPTATQSIQSYPRYISQEPPTSHCQRLDERLTTTADPPATDNVNTAIGDPTLYSDRCLENFLKVEEKHHKIPDTYFSIQKDITPPMRKIVAEWMMEVCAEENCQEEVVLLALNYMDRFLSSKSVRKTQLQILAAACLLLASKLREPSCRALSVDLLVVYTDNSIYKDDLIKWELYVLSRLGWDLSSVTPLDFLELLMMRLPIGSKNFPDINIGKVRGHAQAFISLAAKEHKFAKFSASTIAASSIAASMNGLKWHLRSGHNLHFLLSLMTDLTSVEQAQVRDCMLHMEDIFKEHSRNLEPFLVNIDPKEMSTLYYKRRFQIHQSQHLSQISIRPLPLPKAPAECVEQHQQQHNFGSAAPHRTHTCKMQAQAQAQNEIQDVTF

SEQ ID NO: 19492 - DNA, 3009 bp, DROSOPHILA
gtcgttggaagacgcgcacgctcggtatgtgatcgaaatgagtgttccataaaaccaccgagcacggcactggcgaggtggctttaatgcgaatttacttttctgatttctttctccgatgtctgcgttttttcctgctacatgtgtccagtgtgacccgtcgtcgaagtgccggaaacgtcgatctgccccacaaaagttcgggaaaataccagccaccgtccgcgttgtgcagcactggccttcaaatcaaacacagtttcttatcggcggaggtcgacgaatcggatctcgtcttatcgccgaccccccgtttattgtttcgtttctgtattagattcaaaatcagttcggtcataggcgttactcagtctagccggcgccgcgtttaacactatgccggttcagggacaggacttgaaacatccataggatccatcgagcatatacgcaaggtttcctaagtacgcttttttaattaattttatgaaatgtgtttcaatacagtggtaagctaaaaaaagaaagtttggcattctacaagagtgaattatattctaagttattaatataagtaagtgagctcttttattgtttttagaatactgtgtgttaatttaagccttggctttaagaatttgaatttgtataatatatttaaaataaccagtagacataagtatttagttaacggtaatgcctatgaaattgttgttgctcaactcaacaaatcagcagaaaatgaaataaatacgcaaactggtttctgtaaaatacattgtttatgcaagatcaataaaaaaaaaacaaacatccaagttttaaagttcgtaagattgaacaaaatggcggttttcttgggaaacggtattctttgcaacgtatttggagccgtcgcactgcgtgataaaaaaagtgcagtcacggtcacactggcgagcagaatttcatacgtttttgtttccttttggccatatttattattgttaaaattggagcaatgccagctgctgtgcgcaagttccgccgcgagaccagtgaaatcagctgctgtctgaagtaccttttgttcgccagcaatgtgatcctgtggctctcggccctgctggtcctctccgttggcatctgggcctggagcgagaagggcatgttccgcaacattgcgcggctgcacttcatcgccctggacccggccttcgtcctgatcatcctgggaggcgtcaccttcctactgggcttcatgggcagcgtgggcgccttgcgcgagaacacctgcctcctgggggcggtgggtaccacattgttagtggatcccctctggacctagttaatccttatttttccgcttgcagtacgccatcttcttgagtgtcttgcttatcgcagagatcggcttctgtgccgtggccttcgtgctcaaggacaagggctgggtgagttccatttgaaggccactattctagccagccattactaaggtttgccttttccagatcaaagaccaggccaccgagggactcaaggccttcattcgccactatcgcgaggacgcagaccagcagaatctcattgattggatccaggaggattggttgcagtgttgcggcattgatggtcccaaggactgggacagcaacaactacttcaattgctcgtctatcgctattggcagcagggaggcgtgcggagtgccattctcctgctgccgcagacgtccgcaggaggtgatcaagaacaagcaatgcggctacgatgtacgcaaggagggatatgtaagtccgctagctgttttcccccgtctttccgaaatgcatattgaaattcacccacgaatcgtacgcatgcagccggtggataggaatatacatgagcgtggctgcttgcgcgctggcgaggattggctggaggcccatctgattagtgtggcgattggctgcgtggctctgctcgtcctgcaggtgcaaaacatttctatagtcgtcgttgtatatttctttttgaatctttgaaaattttaagtttagtgtagttcagatgagagaatcgtttttaaggtggtcccattttttttaaaaatatggtttttactcgtagtagttacatctttttgttttataatttcccacagactttatatttattttatttttttaatttcttaccagggcatggagttgtccaaaataatctacgaaaagggctgtgttcaagcaggcgaagaatggatggagcacaacttgattattatttccgcaactgttatagttgtgatgttttttcaggtttctgtttgattttattatttttctcactatgacaatagatagattcttcttgtaacgatacactttttgtagatcttgggcatttgctttgctcagaacctgcgtgccgatatctacactcaaaagtcaaagtggcactgacaaatggctctgtctgctcccacggccatttagaaggacacccaaggtggcgaaggatttgggaaacttcgaggtaagccacatggagcatccaccaacttcaaaataagaatctgtatctactcatctacgctccggttagttaactatactataaattccttgtaaacccatactagggtgaatcgatttggatgcacgataatcgttgatagaatctagtcaatgatcaattcctaatgctattgccaaagtaactatgttccggaaattacgattcacccttcgcttttgatcagaaaacacaaatgcctatggtaaaccctgattttcgggacacacgttgtatattgatattggcataaaatgttcattgattaggtttctctcccacgatttatctattttttgcgtccataaaatcgacccagtttaacccatacccccatttatactcaagagtacgctatgtgtctaactaaagcaaacgcattccgtcttcgtggacattgactaatattaactaggttgccaaatttgttgctgtttttacgtcggcttccctttagcccaagaacaaata

SEQ ID NO: 19493 - DNA, 810 bp, DROSOPHILA
atgccagctgctgtgcgcaagttccgccgcgagaccagtgaaatcagctgctgtctgaagtaccttttgttcgccagcaatgtgatcctgtggctctcggccctgctggtcctctccgttggcatctgggcctggagcgagaagggcatgttccgcaacattgcgcggctgcacttcatcgccctggacccggccttcgtcctgatcatcctgggaggcgtcaccttcctactgggcttcatgggcagcgtgggcgccttgcgcgagaacacctgcctcctgggggcgtacgccatcttcttgagtgtcttgcttatcgcagagatcggcttctgtgccgtggccttcgtgctcaaggacaagggctggatcaaagaccaggccaccgagggactcaaggccttcattcgccactatcgcgaggacgcagaccagcagaatctcattgattggatccaggaggattggttgcagtgttgcggcattgatggtcccaaggactgggacagcaacaactacttcaattgctcgtctatcgctattggcagcagggaggcgtgcggagtgccattctcctgctgccgcagacgtccgcaggaggtgatcaagaacaagcaatgcggctacgatgtacgcaaggagggatatccggtggataggaatatacatgagcgtggctgcttgcgcgctggcgaggattggctggaggcccatctgattagtgtggcgattggctgcgtggctctgctcgtcctgcaggtgcaaaacatttctatagtcgtcgttgtatatttctttttgaatctttga

SEQ ID NO: 19494 - protein, 269 aa, DROSOPHILA
MPAAVRKFRRETSEISCCLKYLLFASNVILWLSALLVLSVGIWAWSEKGMFRNIARLHFIALDPAFVLIILGGVTFLLGFMGSVGALRENTCLLGAYAIFLSVLLIAEIGFCAVAFVLKDKGWIKDQATEGLKAFIRHYREDADQQNLIDWIQEDWLQCCGIDGPKDWDSNNYFNCSSIAIGSREACGVPFSCCRRRPQEVIKNKQCGYDVRKEGYPVDRNIHERGCLRAGEDWLEAHLISVAIGCVALLVLQVQNISIVVVVYFFLNL

SEQ ID NO: 19495 - DNA, 9736 bp, DROSOPHILA
gtgatttgtttttgaatttttttttatggattttttcttgtggaatggatgggtagttctatctagtgtaagtgtttacgtaactaatttgcgactatgagcaagtcgattgggcttgagacctcaaacgaaaccaagttgcacataatttggctgcagctgtgtgatctgcttgctgggtgaaggggaaatggggtggagtgaccttcggggaggtgtggatgtgggtggacttggtggtgccttgcaactaattactacgcctcgcctttttgccctttttcacgcctttacatacaactaattcataaagaaaatttaactaagaaccttatgaaagctttgcgaataaattatacgagttcggaccaaatcttagcacgagtgcatatatacttataaatgggaccgtacccgaaactccgggactttaaaaaccacaaagttttggtaaacatttaaacaaattgtcaagaagagattcaagttttttttttgtatagatttatggaatgtttgttcctaaaagttctcaaatgtatatttctttaaccaaaggttctaaagtctccgaagatttctgagtttcagcccaaaaaataaacatagcatacgattatatagctaagtactgacttgcaagttaaatgatctcttgcgctgatgttttaacatttctctttttttcactataaacagaaaagttttctccttacattttccgaaccccttttttctccatctgtggcttacataactaatgcgcgaaaaaaaactgatgctaaaattaaacaaaaaacgtttcgttgttgcgctcgcattgcagttctcagatcgcgattttcgaatctgaatccaaatccaaaaccaaaaacccgagtccaaatcaaaatccaaatccaagtccgaatccgaatccgatctctacgccgactgctgctggccactatcgttcgtttggctactgccgctccacattgatggtgatgaccatggttggtcaatagtggccgccaccaccgcctccgccgccaccaccaccaccactatgtcggtggtgctcgcgtctgccggaggagtgatcccgatcgcggtagtcgccgttgcgggagctgctcttgtggtgatgatggtgatggcgcttcttctcgcccttcaggcacacatccgacaccaccgaggacaccaccatctcggagtcatcccgcatgccgtagttgtccctgccgcatctgtttcggggaatccaactgattagaaattaactctatttgggtatatctaatagttcctctactcaatgaccaaaggtgaatgactaacctgtcgagattttcgcgggatcgctgcatattgtcgcgcagattgtcccgggaacgggtcatgctcggtggatcgagggtctccttgcggcggagggcgttgtgtgagctgttcttcgaggcggactcgtgcaggttctcccaggcttggcggtagtacctacgaatgagaatttataataatattaaaataaatattgatattgaggaaatcaactttaaacgctgatctaaagaacatatattcatattcgttttgaccgttatcgagatgtttttaacccacctgttgagtccattgcgggatccggaggtggagctatcgaagctggccacagtgttgcagtcgggcgaggcgcgatggcgatagtgttgtgtggttcggtttctgtggattacacgagaaattacattggtcagttgatatttctgagtaaatagttataatactgaatgccaggacgaaacagtgttgggttagtcacaaaatcaggcaaaaaagagggttaggcacggagaactacgcacacagagacagagacggatagatatgtttggagagagacagatggagggctagagaaagagacaggcaggcaggcaggcaaaaagagacagagacagcgaaccaggcgtgcagtgtttctgtgtgtgtgtgtgtgtgtggaagagagtcttgttggtgggtgatagatgcattgattgattgattgattgactgattgattgatggaggtgcaacagcaaagagtaggattatcgcctcacagcccacagcattcgcagctttcagtattttgtttgttggtgtttgtttcagtgttgcttgtttgattgactgactgattgattgttgttgtttcgtgtggtgttgttgttgactgattgattgattgatttttgggctgcttacatttgtgcatatggccgctttgtttgttcttgctctaaattatttttaatttgttttttttttgtcttgcatctttggcacgttttttttttttagctttaagtggtttttccaggtagtagcaggtctctttggcttggttttccatcggttttccatttgtatttcctgtcgctttgcttttcattcggctgctctacatatgggagttgctgaagagtccagcccgggcacgatatccgcgtccatagctgctgaactcccggcgacccagcttctgatcatcgaagggcagtgccagtacgctgtaccacatggatggcgcatggaccagaccaccagcactgctcgatcccacgctcccatagccaccgccgtcgggaaagaggtgactctgggttaattgggcggtggatgcgtagctggtggcactggtggccgtcgccgtggcatagctgggcaatcgactcggtcgcggtatcccgatcccgatcccaattccgattcccccctggcctttcttcgattgcgatggctgcttcttttggcggtggctctgatgcagttgctcctgttgttggtggtacttctgttgctgctggcgtgtgtggttctggtggtgctgctcctgctgctgctgctgctggttgcggtggtggaattgctgctggatctgctggtggtggtgatgatgagcatgatgatgttggtaagcggttaagtgtttggctaggtgccgccgttggctgttcggggtgctgacgaatggttttgccaaaagacagagagtgggagaagcaaaaacgaaaaaagagagttgtacaacgagaaagagaaagcgttcgatgttcaggtgtgtgcgtgtgcgtgagagactctctttttttgtacaggtgtgtgtgtgagtgttgaggttttcacagagagatagattcaaaattccggggattactgaaatcaaaataaaaccatccaaaatttggggggcactcagcgacgaaagagagaggttgtgacatgaagagcgagacggagacagcgtttgtgaactagagggagcgaggcagacagatcgagagagagagagagagagagagagagagagagagacatacagaggacgtgaaagggacagggggtggctggacaggtggtgaccccgacaacgacatcgactttcctccacacacaacataattattgatatgaaatcacggtcaatctgatcttattacaaattccgttactgtgacattttttaagcatacttaacaaagattcaaatcgaatagggtttactattatagtatagtttggccacagtattgaatttggaaggtattacaagatatttgaaaaaattacattaaaatgttttcattgatttagaaaatatattatgctattacaaattatattactttcataaaatggtgagtgtctcaaaaaactttgaaatcattggtgttaatgtatataaacttaaatcaaaaattctttaagtttattcaattaattgcattaccattataatttgaattaaacatatccctatcaaagcccaggccgagtttaaataaatatattaaaatatattggttagccaatcatcaccttgattatctttggagaacctaaccaaattgaccccgaacatatcggactgatcactgatcccatatctgctcccaattttctgtgcccgtttccccggctggatgactcaccttcgcacaaggatcacgatcgttgtgatgacggcggccaggaagacgaaaccaccaaaagcgcccagagcaacgatggcgcccagattaagtttggcctccttggtctccttgcggtcgggattatcgacggcgaagggcacgttgacattgggcgactggttctgctggatgttgacactgtcggggatctcgttgtcttgcggatgcgaattggcgatgatctgctgtgtattccgcgtggttgtctccacttcgccggcgctattcggagcaccacttggtcgcgagctgcgcggtggtgtgggtgcgtaggtggacggtggttgcggtggcacctgatgggtggtgggcggcagggcagccggtgtgctgttcggcttcttcggtatgagcactggacgaactgtgcgtcgtggtgggaactcctcgcgaacggtgccaggcactggaggcacattgatttcctcttcggattcagctggggattaaaagttaaaggtgatgaaattaggaataagttgcatacaaattcgaactaaaaatctctccaagggatgactaacattagcatgcagtaaacccaggagaccctggaacatgagatataattcgtcgctctactcacattcgccattgatctccacctgcgtggggctgagactgggatacgtgcccactgtgctggtggagctgccgccaatgccgctgctcgccgtggatactgctgggcggtagggggtgcggctggtggtcgagctgaccaccttggggcggaacggtggtggcgtggccaccgacgagggcacgggaatggtggacgcggcagtgggctgagtggacggttccagtttgatgcaacgcggcagggcactgctccattgaccactggccaggcaggtaagcactcgaggtccttccatgcggtatccgggtggacaactgatctccgccttggagccgtagtatgtgccattgggagcgttgataatggtgctgtagtagttgccgggcagagtgtcgcactccacaactagaaaacgataagtgaattaggtgggattaggaatctctatcgattgagttctatattcatgtctactcactctcacaacgtggtggaggtccattccagcgctcatcaaagtcgcaggtgagcaaagctcgtcctatcatctcgtaaccctcctcgcacgaatacttcaccaggctcaagtagccaaccgtgttgttgagcagggcgtaggaaccatgggcaatgctggccggcagaccacactcgatgtctagagtaggattagatattaattaccatacatcagagataatcaaatgtgaagtcatttcttaacgaagcaacacttgatgagcgtattaatacttacacttgcacactggcgggaactcattgtagaatccagtctccaggcaggtcctcgtggcgggacccaccagcaggtgattggcatcgcagctgtacttgatctgggcgccaacctcgaatccgttcagggctaccatcgtggaattgggcggttgctccggtcggccacaggtcttcggttggtgctgacagatgaagttcagcagcgtgttgcagttggtatcgctccagagccagcccttggagccatcaaatcgggcacaatcctcatcgccgccgggatgactccagaaggagacggtcagctcgtcaccgttcacccatttccagctgctgcgatcgctgccatcacgtaccgctcccatccagtactgcgaactgacgtcactgcgatgacgccgccacagctcccaactgatgaatccctgcagcgccggattgctctcactgatcagcgtaccgccacgggatcgacagaaggacagtgcgtccaaaaagttcagcggctggcggttgtagaagatgtagcacttgccattgtacgaggccagagctccaggcggctgatcgcggaaggtgggacaccgctcgatgggcagcgcttggtccgtgtagacgaacgcctcgcaaatggacagcggattgggtgtgctattctccaggtggacactcacgaaggctcccggcatcgggggattgcagggcaggaagagcggctgtccggcctccaggaggcccgtgaagcggttgcagatcggatttgtgcccaagtccggtcggttgttgcccactcgcactacaattgtggcgggcttattgcctgcaacgggagcatgtgacaataaacgttattaaggttgctatgcaaaaatgtttcaattttataacacattcttaaacaagaattcacattctgattatccttaaaaataatctgccttttggccaaaaataagaaaatattggtctaaatgtggaatgttccacctttttgagctcgtaacaaaatttgcaatcgactggcatgcacaaataaaatagttaaattttgaccgtttttcacaaaaaatgttgatgacccttaaaaacaacttataaaaaaattctggaaaaatatctggaatgtaaagggaatttgatgtttttattttccgcaaaaaataggaattttttccaaaatcaagaaaagaatgggccaagggactgtctcacattcgttttcaatgattattagatataaaatgtttattttcaattgattttataagcaatagacttttgattaggtaatcatttctgatctacaagattaaacatacaaacattaattaggcgctgcctagtttctcagctctttctattggtattcctgttgtcaccatttgggctttggctttgtctgtcagcgggtcaggcgggttcagttcagttcagttgagctcggttcggtttggtttgctgaaagccgcagacgactcagcctcatcgtcagccaagtgaaagtaatcataaatttcgggccgcactgactcactgggtctgggtttcttgggtttttttttcagcttgtagatcgagtccaagaccaagtcaaagtcgcagtcgaagtcgaagtcttcgctgtcgtcgccagagccgcacgaaaatcacataaccagccaaagattcgaggagatggagatggaggcgaggatgaagatggagttggagatgtggatggagatgggggacttcaggttgctggcaagtgaaagcattagggaaaactggctggcagttgtttgcttttgccgccgttgctgtttcggcaacccttttttttccacttaaaacaaagacgatgtttggggaagaagatcgtgcagcatttgccattttagccagtgaagctggagaggtgctcgaaaatctggtggtagcctgggcagacttatagactcggtatagaccctggcagactgcctggctggctgactggcagcctgggaaaagcggggcattgaactgtccgtcgggcaagagagtttcgtccacagaatgtggtccaagcaggtctattattcgcctttatcgccatatatatatatatatacatttactatatgtttgcgacaggtttagggttgggccgccgcgataatggttgactgcggtttgtataaaagcgaaaaagttgcccaatttaatcaatttgctggaggattaccacgggctaatcgccatttgctcgttaagtttctgtctaccaaagttgcaataaattgtggcaaccgaaaaagggaacaaaatgcgcagcattcattcactttccatttttattgtttttttttttttggccaaggtagtgagggtagttagataaagcaacttaaaattttctacatgtatgtagtctgcgcatgcttattaataagaaacttgcagctaaacttaccgcaacaggatttgccaaagtccagacgcaccagttgcaccatgtagggttccaggagattcacataccaccagggcgatcgctccgccttcgtcagcgagcaggtctccggtgtgaagaaggcggatgtggagccatcgatggccttttgtggagcaccagcgccatcagtggaaatctgcatgggcgccttgccagcggcaacgttcaaaactgtaagtaaaattgcgaattaattgataaatcataaagaagttaggatgtagatagaatgttcatgcacatgtcggggtcagttttttgtaggaataagtttaaaatataattttaaaactaagcctcaataacatatttaatgatgttttttttattgtaggtgttcttctctcaaaatgttatataattagccaagttcctatgtagaaccaatgataatttatgctaactgcattgttgatgagcaaatataaagataggggtcattggtaattatttgggaattcaaggcgcattgcggcgatgaagatatcagtcttggtccgcttttcaagcgatttgctagccagttggagtcgttcttggattcagttggtccgagggccggagcaccagagttcccagagtgggcccaaggcccggctaattggccgcgggccctgacacggtttgtggccaaaacgagtgaagacaaagcaataacaactcgaaaagaccaaaaaaaaaatctaacaatgttctgcctggcgaatttgtcaagagaccttcgttctggcccgggcccattgtctttattattattttttttttcatctttagtttattttacggacctggagatttttatgcgctggccaaaaagcaaaagtgaaatttaatgtcggctcaacttttacttgctcacctggccgggcttaattacatcgctcgccacgcacttctgcggcattgggattcattaatcagatgcatctgtcggataagacgggtttggttttggatccaacggcttggaaactttttttttgcgacgactgctttctaacttgggactaagccaccgcccaatttcgctctgtgtagcagccagcaggtgtttgccggtgtgacaaatgccttttaatttcatttaattaatttcctatcgcctgtctagctgccagcctgctgagtcactatggatcaaaatttgaattacaaaaccaaaaccaggtctacagatccatagatgatcagagaaaatccgattttaagttcgggcgatcgcggctttgttttccttttctataagagcgtcataaacttgcaatcagccaacacagcggggaatttgggggtcagatacagcaactatagatctcacgatttactcgacctcgtgtcaaagaattttaagggaatattaatcgactcacacaaagtgaaggaattaaaatcgaattgggtcagtcaaagtgaaatcataaattttagcgtgaaatatcgtttcatttgattttactttcgatgtatgaattctttggatcgctttctaatgaaaatatatattttaattgcactttgaaattgtttgattatccagaccaacaattttccctcactttcccaggcattatcaatgggtatcaacacttactactgcctcagatcgatcgacttatcgttgagatctctagcaacaaagagcccgttgaaattttgatggatcgttaaagggccgcctttttaccgagaattattttacgccccccaaatcgatcaattcattcaacaaatgccggcattcattgactagaaatccatttgccgccgctctcgttgtgtcagtcaattcgggttccgttttttttatttggcccacggaagtgcatgtctggtggtgaattcacttagaacatttatttattttcgtgcccgacacgttttacccttttatttgctcgtgtccgttggcttttc

SEQ ID NO: 19496 - DNA, 3186 bp, DROSOPHILA
atgaatcccaatgccgcagaagtgcgtggcgagcgatttttgaacgttgccgctggcaaggcgcccatgcagatttccactgatggcgctggtgctccacaaaaggccatcgatggctccacatccgccttcttcacaccggagacctgctcgctgacgaaggcggagcgatcgccctggtggtatgtgaatctcctggaaccctacatggtgcaactggtgcgtctggactttggcaaatcctgttgcggcaataagcccgccacaattgtagtgcgagtgggcaacaaccgaccggacttgggcacaaatccgatctgcaaccgcttcacgggcctcctggaggccggacagccgctcttcctgccctgcaatcccccgatgccgggagccttcgtgagtgtccacctggagaatagcacacccaatccgctgtccatttgcgaggcgttcgtctacacggaccaagcgctgcccatcgagcggtgtcccaccttccgcgatcagccgcctggagctctggcctcgtacaatggcaagtgctacatcttctacaaccgccagccgctgaactttttggacgcactgtccttctgtcgatcccgtggcggtacgctgatcagtgagagcaatccggcgctgcagggattcatcagttgggagctgtggcggcgtcatcgcagtgacgtcagttcgcagtactggatgggagcggtacgtgatggcagcgatcgcagcagctggaaatgggtgaacggtgacgagctgaccgtctccttctggagtcatcccggcggcgatgaggattgtgcccgatttgatggctccaagggctggctctggagcgataccaactgcaacacgctgctgaacttcatctgtcagcaccaaccgaagacctgtggccgaccggagcaaccgcccaattccacgatggtagccctgaacggattcgaggttggcgcccagatcaagtacagctgcgatgccaatcacctgctggtgggtcccgccacgaggacctgcctggagactggattctacaatgagttcccgccagtgtgcaagtacatcgagtgtggtctgccggccagcattgcccatggttcctacgccctgctcaacaacacggttggctacttgagcctggtgaagtattcgtgcgaggagggttacgagatgataggacgagctttgctcacctgcgactttgatgagcgctggaatggacctccaccacgttgtgagattgtggagtgcgacactctgcccggcaactactacagcaccattatcaacgctcccaatggcacatactacggctccaaggcggagatcagttgtccacccggataccgcatggaaggacctcgagtgcttacctgcctggccagtggtcaatggagcagtgccctgccgcgttgcatcaaactggaaccgtccactcagcccactgccgcgtccaccattcccgtgccctcgtcggtggccacgccaccaccgttccgccccaaggtggtcagctcgaccaccagccgcaccccctaccgcccagcagtatccacggcgagcagcggcattggcggcagctccaccagcacagtgggcacgtatcccagtctcagccccacgcaggtggagatcaatggcgaatctgaatccgaagaggaaatcaatgtgcctccagtgcctggcaccgttcgcgaggagttcccaccacgacgcacagttcgtccagtgctcataccgaagaagccgaacagcacaccggctgccctgccgcccaccacccatcaggtgccaccgcaaccaccgtccacctacgcacccacaccaccgcgcagctcgcgaccaagtggtgctccgaatagcgccggcgaagtggagacaaccacgcggaatacacagcagatcatcgccaattcgcatccgcaagacaacgagatccccgacagtgtcaacatccagcagaaccagtcgcccaatgtcaacgtgcccttcgccgtcgataatcccgaccgcaaggagaccaaggaggccaaacttaatctgggcgccatcgttgctctgggcgcttttggtggtttcgtcttcctggccgccgtcatcacaacgatcgtgatccttgtgcgaagcaccccgaacagccaacggcggcacctagccaaacacttaaccgcttaccaacatcatcatgctcatcatcaccaccaccagcagatccagcagcaattccaccaccgcaaccagcagcagcagcagcaggagcagcaccaccagaaccacacacgccagcagcaacagaagtaccaccaacaacaggagcaactgcatcagagccaccgccaaaagaagcagccatcgcaatcgaagaaaggccaggggggaatcggaattgggatcgggatcgggataccgcgaccgagtcgattgcccagctatgccacggcgacggccaccagtgccaccagctacgcatccaccgcccaattaacccagagtcacctctttcccgacggcggtggctatgggagcgtgggatcgagcagtgctggtggtctggtccatgcgccatccatgtggtacagcgtactggcactgcccttcgatgatcagaagctgggtcgccgggagttcagcagctatggacgcggatatcgtgcccgggctggactcttcagcaactcccatataaaccgaaccacacaacactatcgccatcgcgcctcgcccgactgcaacactgtggccagcttcgatagctccacctccggatcccgcaatggactcaacaggtactaccgccaagcctgggagaacctgcacgagtccgcctcgaagaacagctcacacaacgccctccgccgcaaggagaccctcgatccaccgagcatgacccgttcccgggacaatctgcgcgacaatatgcagcgatcccgcgaaaatctcgacagatgcggcagggacaactacggcatgcgggatgactccgagatggtggtgtcctcggtggtgtcggatgtgtgcctgaagggcgagaagaagcgccatcaccatcatcaccacaagagcagctcccgcaacggcgactaccgcgatcgggatcactcctccggcagacgcgagcaccaccgacatagtggtggtggtggtggcggcggaggcggtggtggcggccactattga

SEQ ID NO: 19497 - protein, 1061 aa, DROSOPHILA
MNPNAAEVRGERFLNVAAGKAPMQISTDGAGAPQKAIDGSTSAFFTPETCSLTKAERSPWWYVNLLEPYMVQLVRLDFGKSCCGNKPATIVVRVGNNRPDLGTNPICNRFTGLLEAGQPLFLPCNPPMPGAFVSVHLENSTPNPLSICEAFVYTDQALPIERCPTFRDQPPGALASYNGKCYIFYNRQPLNFLDALSFCRSRGGTLISESNPALQGFISWELWRRHRSDVSSQYWMGAVRDGSDRSSWKWVNGDELTVSFWSHPGGDEDCARFDGSKGWLWSDTNCNTLLNFICQHQPKTCGRPEQPPNSTMVALNGFEVGAQIKYSCDANHLLVGPATRTCLETGFYNEFPPVCKYIECGLPASIAHGSYALLNNTVGYLSLVKYSCEEGYEMIGRALLTCDFDERWNGPPPRCEIVECDTLPGNYYSTIINAPNGTYYGSKAEISCPPGYRMEGPRVLTCLASGQWSSALPRCIKLEPSTQPTAASTIPVPSSVATPPPFRPKVVSSTTSRTPYRPAVSTASSGIGGSSTSTVGTYPSLSPTQVEINGESESEEEINVPPVPGTVREEFPPRRTVRPVLIPKKPNSTPAALPPTTHQVPPQPPSTYAPTPPRSSRPSGAPNSAGEVETTTRNTQQIIANSHPQDNEIPDSVNIQQNQSPNVNVPFAVDNPDRKETKEAKLNLGAIVALGAFGGFVFLAAVITTIVILVRSTPNSQRRHLAKHLTAYQHHHAHHHHHQQIQQQFHHRNQQQQQQEQHHQNHTRQQQQKYHQQQEQLHQSHRQKKQPSQSKKGQGGIGIGIGIGIPRPSRLPSYATATATSATSYASTAQLTQSHLFPDGGGYGSVGSSSAGGLVHAPSMWYSVLALPFDDQKLGRREFSSYGRGYRARAGLFSNSHINRTTQHYRHRASPDCNTVASFDSSTSGSRNGLNRYYRQAWENLHESASKNSSHNALRRKETLDPPSMTRSRDNLRDNMQRSRENLDRCGRDNYGMRDDSEMVVSSVVSDVCLKGEKKRHHHHHHKSSSRNGDYRDRDHSSGRREHHRHSGGGGGGGGGGGGHY

SEQ ID NO: 19498 - DNA, 3068 bp, DROSOPHILA
attttaacaacaaattaattcaacaccatttaatttgttgagtagatcgttttattcatgtataaattatctgttatgttaatatataaaggccaactgtaatatgcgtaggtggggtatattttagcgctcgctctgcggtcatactaaaatttgcagaaatggaaacgtgaggattgttttgtttttatttagtttttccattaaacagcgaataatatgcagatgataacgcttccatttcaggatcaatcccacgttctcgtacctcaccaatctggaggtaatgcagattctacagaagatcaaaagcaccaaaaagaagttcggcatgcgcaacttggccacggttacctatgaggtgtcgatttttttaaatatttaactaatatatgataaattaaccaaacactttgttccacaggcactgcagtatctggaggagtcgccctgcaagacacaaactcgtgagaacattatgaattacgttaaagacctgtcttcttatcgtctaaagtcccaagagatcctgcaaatgatcaacgatccgcctacaagtgcactacacacgcaactggtaaggattagtctatcatatgccagaaaggctaattaagtatataataacctccccagctcatcgacgacaataaagctccactaaccgatgaggagaacgagaaaatcattcagctgagctacaaacacttccatggtggagaaaccaaaggcgctgctaaggaaacaccggcggaaaagcctgcggagtccactgcgaaggccggcaagcaatctggcgtaaagcgtaatgcccaggcaaaatccaatccagcggaacaaatagctccagcggacaaaaccacgccaggtgatggagttactcctgcgaatgtcgctactccttcaagtgaagccactactactactccagcagaagaagcaagcccagtggaaacatcgtcttcagaaaataatgctactccagcaaatgaagccactacagcgcctgcaacggatgcacccacttcaatggaaaccaagtccaatccgacaccagatggagaaaacctcgggtagcagccgccaaaataacccatccgcttattacgtttaacgtttcatatatttatgttgatggagcgtataaaataagctaaaaaaaaaggtaaattatttatgttcgcttctgatcgcccaaatcctcgatgacgtcctcatcgatctcggcccatttttcgggtatgacatcgaacaagtcatccttgacgtcaccctgaatgacgatctcgtcgtctccggtaaccgaggagccgcaggcaaatttcgtgccaaagaacttggcggccaccttgagatcaatatctggaacagacagggaatgtattatgcttagttaacaataaagctcataagtatatctaatatatctaagttacatggtatggtaatggctactcatagcatccagtgggcccgcatccccctccatttcctactctatactcataatgtgcgaacagaacctaccaaaagtgctcaatcctgtgaccacggtcactgacttctttttgccacgtgccgcccgcgagacgcagatacgcttgggcacgtcctctttcttcttgacgcgcaacagtcccttgccaccgcgtttctggcgcttcttgtcgtcatccgtcccgtcagcggcggcagcctcctcctcaatctttagtcgctcgaagtcatcgggcatgtggagctccagccactccttgcacttctcgtactccggatagtactcgcagtactgcgtatagtggatatatatatatgtaaatatatgggccatatatgatccctaatatggatttttcccaggtttgaagacgaactcacctcaatgggcatcgtgcagtggccacagtacttcatctggatcggataggtgacgccttcgcgcggacccaactgtaggcggtcggcgacgctgttggtgcccacatcttcgttcgtcattgcggatcggattaactgcctgggatttgctccgggttattgaaatattaaaataatgacagttttaagaagtcggctactgcaaactgaccgtttttgtttaggctcgtaaaatatactaacattgacacatgttaaataaatacctacctaaaatatacctttatttaaatcgtagtacaattccgactatcaataagctaaaattaaaatttacgtattttcattaattttacattgattgaaactattttaatttataccttgtattgtattacaaaatacttattaaaattgtatttattggcagaacagaagaatgtttcgatagtaaaataccaaaatatgtttgcctatcaaaacaacactcgtgaaatactgcatgaaggaagcggcatttagaataatttgccggtttgtaacatgcaaccaaagtttttaccaaattgtatcacagtaggctgataattgtattcgagcacaagtcagccaaaaatatccagttgctaacgaaacaaggcttaataaaatggtcacatacaatactctaatacagaacgaaaagaatgaaaatgtggtcgccccgataagccggccattcgccagaaagaggaggactgagattcgccgcctgcagtccaacaggcggttgaataaaaaggtgtgcaaacaccatttggacattgcccattgtacccagaagaaggctccatggcggaattgggcatacctcattctcgccctcgccgcaggaattggcatgttattgcagttcaccgacaagttgtccacggtcagcggattcctggaaagctacaaaaaccagtaccactcgatcgtccacaaccaggacaactactgcaatccctcccgacggctgggcgacatggtcctgcacgcccgccaccaggtactcaaccaggatcttgcattgaaccagctagaactggcactggacaacaccaccaatgaggtgactagcggggaaacagtagatttaatgtgcatcctaagcggattttccatatcacttagtatagtttactattgattgtactaccagttgttgt

SEQ ID NO: 19499 - DNA, 872 bp, DROSOPHILA
tcttaaaactgtcattattttaatatttcaataacccggagcaaatcccaggcagttaatccgatccgcaatgacgaacgaagatgtgggcaccaacagcgtcgccgaccgcctacagttgggtccgcgcgaaggcgtcacctatccgatccagatgaagtactgtggccactgcacgatgcccattgagtactgcgagtactatccggagtacgagaagtgcaaggagtggctggagctccacatgcccgatgacttcgagcgactaaagattgaggaggaggctgccgccgctgacgggacggatgacgacaagaagcgccagaaacgcggtggcaagggactgttgcgcgtcaagaagaaagaggacgtgcccaagcgtatctgcgtctcgcgggcggcacgtggcaaaaagaagtcagtgaccgtggtcacaggattgagcacttttgagatatacttatgagctttattgttaactaagcataatacattccctgtctgttccagatattgatctcaaggtggccgccaagttctttggcacgaaatttgcctgcggctcctcggttaccggagacgacgagatcgtcattcagggtgacgtcaaggatgacttgttcgatgtcatacccgaaaaatgggccgagatcgatgaggacgtcatcgaggatttgggcgatcagaagcgaacataaataatttacctttttttttagcttattttatacgctccatcaacataaatatatgaaacgttaaacgtaataagcggatgggttattttggcggctgctacccgaggttttctccatctggtgtcggattggacttggtttccattgaagtgggtgcatccgttgcaggcgctg

SEQ ID NO: 19500 - protein, 131 aa, DROSOPHILA
MTNEDVGTNSVADRLQLGPREGVTYPIQMKYCGHCTMPIEYCEYYPEYEKCKEWLELHMPDDFERLKIEEEAAAADGTDDDKKRQKRGGKGLLRVKKKEDVPKRICVSRAARGKKKSVTVVTGLSTFEIYL

SEQ ID NO: 19501 - DNA, 6427 bp, DROSOPHILA
cctggtggcccgataaggcctgttggtcgccgctggagtggctgatagtgctgtacatttcgccggctaatcggtattcgttttgaattcctcgttgagatattttccatccgcacaagtgcttttccagcttataagtactccagagtgccgtaatgttaatcgacgtgtttgctgattgggctaattaggctaagatttggttgacattgctttttctataagctatttacggtccccctaagtgatgtccaatttttgaaagtcattacgaaagttaaaaatataagaatcttaaaaatacccgtaggggtcttttacttgattttaatacttaataataataataataatcataacctttgtgttgaaaatatgaatttaatgcgaagtaaagtctgcaagcattgtaaaccagaggtcggaaacctctaaagagataacattcatttgggtttaagtagtttctttattgttatcattatctttacatatacaaaattgcaaaaattatgcattcattgcgttatgcctatatcattttgtgagagagtatgtttgcttacgatgttttttgttttttttttttttttgattaatgtatattgtctcttctatagtcgagtaagttattgcatagaataaataatgggattggtaagtaaatacaagactttggtagtacatcagagtgaggtggctcttaaagagtttttccataaaaatatgataactagttcgttttgcatacgcgtacaatactaaatttaacttaactaaggattaaacggtatttgaactgtaacataaagtgcttttgtgtttctgctgaaatgatatatgtatactcaggctgaggtagagacagcacgaaatttaaagatgcggagggtctggagacattgtggatagtagataggaggtcctggcataggttcgctttaagttagttcatttgatatcggccagaaacttaagtccatattatttcacagcttactgctcggccatcatgcaaaacttgtcggccatcagggtgagcaccttttccagtttgttgtgccgatcttcggccttggccgttgctccggaactgccccataggaacttgacatggaactcggttctgtgaggatatgggaaacttgaggaagactcgagaatagtgtattctatcatattaccgaaaagcatcagctagaagctcatcgagccgaggactagcatcctccaggatgatcttggcattctttcgatacagttccaagttcttcaggaagccacgcgatgcatccaggtgctggaaattaatggtcatgccaaagtcatccgctttcgactcccaaggagcaatacaggtgtggtacagagctgggcgatcgtcaatgttggagtggtttatgatgtccataacgggtcgatcgatcagtagtgcatacagcagaacatggggaacggttgtgtttggagcctgtggattggaggcctcgttcatgatgctcaacgtgggtcgcaacttggcctcgaaggtgaaggcgctgtccgtgtactgttgcctcaggatgtgccaggcctggtcgagcttttggatctgaaagaggtggtgggacaatcggttatgatgtatcgctctaacaatgtagcttaatggtttgcaaacaagttgccaaactgctaattgctcacgtgtgattaactgtgataataaaaagatcatctaaatcatcactcgtttgctaagcaaaaaactgtgatgacctaatgtacttgtttatacctctcggcgttaaactaactaaaaagtaatttgttttagtgtacactgcaccgaacgagtattcacctgttgcatgcacaggcccaacatgatggcgcagaatccaaacagattgccgagagccgtcttagtttccactgcgatctgaatccatttactgagcagttgggctcggtccagatccgtttgacaggtgagtatggtcacagcgaccatcagcttgatgcactgcgtccgctctattatgtcctccctaaagacctttccatggggcagtgttagcagctcaagacccgaacagctcagatagtagtcctcctcgttcgacggctcctccaaaaacagggcaatgtcgatgcgagtgatgtgctccgccagcagctttgggcccgtctccagaagcatcatcttgaacgtgttgagggcatcgccatccaggggcttgttctccacagatggcagtagcaaagtaacaaagttctcaaagtcaaacttgcttgcctaaaaacgcaaataaatggtaaaattaagtttttaaagctagcctttaacttactgttttaacttcttctatggccatggtgaatagttcttcctcagcggccaggacgtcgaactccgtgaagctcttcagcgttccgttcgagaccgaagtggtcatgaatcggggattcttgattatcacaccccgctgtacgctcgcctcacatgcatcccctagagccgaatcaccggacccgttccccgagtcggatccactggcctggtatgccagcaccgctgccatgggttccttgcgtggcttgggcggcggactgggcggccgtgagtccgacggcgagtccaggctgcagtttctcgccaggctcgagattcgggccaccgcttgctggcgcagagcgtgcgccgccgaagtgttgggtctgggcagcgagtgggttgtgaacttgctctccaggtgctgctcactggtcggattgcacctggcgattgtctggaagcgcattattccgttgccattgccattctcgagctcctgcatctgtagttgttgctcctgaagcttgttgatgttgctgaccaacatggcctgggccggtgtgaggctctgggagcgctgttgcttcttgcacggcagccgcggcggtggaggcacctctctacgcgcccgcggcggcgagcagtgcggactggccggtgagccagccatcggcgagagctgttgctgctgctgctgctgcggttcgaagcgaaaggtagcgttcatacctgctcccactgcaccattgctgcccatcggcgagttcagaggactcagacctcgcagaccggccagcatctgcgtgtgcagttggttgcccacgatcttgtggccgtagaaggagagcggataggtgcgattgcagggaaactgaatgagcgctcccgatgctgacgagatgggcttgccggatcccacgtagaaggtaattaggtcgggcaccgtatcgaaggcatcctcctcaaactggtactgcacacgttcgtaaaccgtctccggttgaagcaccaactgcaatgcataaccacatcagatactacttggtaaactggtactccaatgccaagaacagtgcgaacccaccttattaagtacgaagtgcagtacagccgctttgctccggcaactgagcacatagttgtccggctgggaggcgcagtcgcggaccaggaagtcgccttcgcgctgcacgatctcctcggcccgctggcgtggcagtgcgccgtggtaccaggcgtgggaacgcagctccctggcgtccaaactcagctcccactcgagcgccttcttcagggcgatggcctcctgttgctcgctgggactgggctgggcggtggccagcggagtggtggcattgctgctcccatagccctccatcctgctgtcttcgatggcccaatggggactgttgcacttggagcgcggcctcagttcctcgtagctgtcaatggaaagacgaatgagtgagtaaatttcccttattttgggtaattttatagtatcataggccattcctcccacaggcggctttggggaaatttgctcccacaggatttggtccttggtatatggacaactcactatatgtgtgaagttcaagtgcaaaaaaagaagaaatcaaattgcagacctaatgttttgccataatgaactgaatggaacttcaaaaaacttatataccaactaaaaggatttagtttttttaggaaatcgacttgcctctgttatcactcacctgctacgcccattttgtagtagaaaatttaggacaggacacacccaaacccaattgttcagtagtacgaaagaactcgattcaccagctgcctgaataatacgatttctaaacaaaactctccatttgaaaatagatagacttcactagcacagaactagtctcgaaaaaaaaaggagtgcagtttaaggtccttcgtattgtagtagtctgaactccctgccgctcgaatctactctgaaaagttcacggcaaaggactcgagtgcggtgcacttttgggggttggacaccgatttctgtgcaccacgctactccgcgcagtttgttttgggttttgttggaaaactctaaggacgcccgaagtcacttttttgggaaattcgcggagcatgcgcagagtctatgttatgattgtccattgagggtaaaaagaaatcttgtggatgttgtggaggatgttgaatattttagttttaaaactccaacatgccggatgtggtatacttttgcaactattattagcataatataatagcatggaaaatttaagaagattttgaagggttgaattctgaaatgcacacttacatggtggaagtctcatcaaaggttagttgcttcaggaccttgccactcttggtggtaatcacgccgggtccgctatcgccgcttcccgccatatcttgaggattctcacccagatacaccaatggacaggagttcttgcgccgtggcactgctcgcggcgcactgctcattgctagacaagatacgagtagataactcagtggggggaactacgtttcactggcttaccttccagattcatggactgccttcgcttggcacgaacacccagcaaactgttgaccatccgctggcgatgggcaccgcgcacgccaaattgcttcagctccttgtccgtgatgtccaccacatcgtccacggtgctgaactcctgtaggtttcctggttaacataacatacagtctcaattgggaactgctgatcatgcaaaccttcgtactgctgcagctccagaaggtccagccactcgcttatgctcatcctagagttgtgcaccattacggccaaatcttcgcgacgacgcactgtgttcgagtaccgaaagttccacaaaatgcctacgaagcggttacgaaatgtgtgatcattatgatcagaatcggaaaccgtattttcgccactcactgctcctccgattcggcacttggcggttctccagttgtcgggcttgggtgttgcccatgttgcccaggctatctttgcaaatccaatgtgcagatctgaaagatctttaaattctggagcagtaccaaacacctaagctgaaactcaaccgcgcacttcgctttgggaaaaacaactgaacgtgagcaaatgttgcccaaacagacttcttcaactgagctgaaattgcatatgtcattcaccgactgttaaataccctaaaggaattacgcatataattataaatcatatatgaacgtaagattgcagctaaagtatgagtaatatatatttattgtttctattctattctctatttagtaatgttctttaaattcagctataaatcgttgttatttttttatagttttctataatttcagcggagtcttaaagtaattgaaaaaatgaacgaactcagccaaagagaccgacaatgacaataaagcccaagtgagtaagatttcaatgtcgtgcaccaacaatttaccctcactgtttttctaattagtgctctatatccgcagtgccccctcctctcactcccctgtcgcgatccaccaaccgatccgatcgtattggataaacccattcgcacccccgcgcttgaccaactcactccagtcgtatttgctctggccattcagtcgcgtatcgtcttttatcgttcacttgattagagaaggtctccccgttgtcgccgagtttcatattctgctgatcgcagcggtatttgcttaattaaaatttctgttcttgccgcgtagcattgcgtatttttatagcttcattctatggaatagtgaataataaattaataataaaccaagctgtgaattcacaagttcattttactagagaatttattttaaatagtttacacataaacgtttagattatcttacagattgaaataatttaagttcactttgtgcagtatctgtctactttacattacattacaactagcaatgaaggaataaatacatctacatggcattttacacgtgtaaacggagctatctacataggcggctctactccaccacattgatttcaatattatcatcttcgtcggcctgctcgctcaaatccacactggagcagctatcggaactgta

SEQ ID NO: 19502 - DNA, 2933 bp, DROSOPHILA
cgaagtgcgcggttgagtttcagcttaggtgtttggtactgctccagaatttaaagatctttcagatctgcacattggatttgcaaagatagcctgggcaacatgggcaacacccaagcccgacaactggagaaccgccaagtgccgaatcggaggagcagcattttgtggaactttcggtactcgaacacagtgcgtcgtcgcgaagatttggccgtaatggtgcacaactctaggatgagcataagcgagtggctggaccttctggagctgcagcagtacgaaggaaacctacaggagttcagcaccgtggacgatgtggtggacatcacggacaaggagctgaagcaatttggcgtgcgcggtgcccatcgccagcggatggtcaacagtttgctgggtgttcgtgccaagcgaaggcagtccatgaatctggaagcaatgagcagtgcgccgcgagcagtgccacggcgcaagaactcctgtccattggtgtatctgggtgagaatcctcaagatatggcgggaagcggcgatagcggacccggcgtgattaccaccaagagtggcaaggtcctgaagcaactaacctttgatgagacttccaccatctacgaggaactgaggccgcgctccaagtgcaacagtccccattgggccatcgaagacagcaggatggagggctatgggagcagcaatgccaccactccgctggccaccgcccagcccagtcccagcgagcaacaggaggccatcgccctgaagaaggcgctcgagtgggagctgagtttggacgccagggagctgcgttcccacgcctggtaccacggcgcactgccacgccagcgggccgaggagatcgtgcagcgcgaaggcgacttcctggtccgcgactgcgcctcccagccggacaactatgtgctcagttgccggagcaaagcggctgtactgcacttcgtacttaataagttggtgcttcaaccggagacggtttacgaacgtgtgcagtaccagtttgaggaggatgccttcgatacggtgcccgacctaattaccttctacgtgggatccggcaagcccatctcgtcagcatcgggagcgctcattcagtttccctgcaatcgcacctatccgctctccttctacggccacaagatcgtgggcaaccaactgcacacgcagatgctggccggtctgcgaggtctgagtcctctgaactcgccgatgggcagcaatggtgcagtgggagcaggtatgaacgctacctttcgcttcgaaccgcagcagcagcagcagcaacagctctcgccgatggctggctcaccggccagtccgcactgctcgccgccgcgggcgcgtagagaggtgcctccaccgccgcggctgccgtgcaagaagcaacagcgctcccagagcctcacaccggcccaggccatgttggtcagcaacatcaacaagcttcaggagcaacaactacagatgcaggagctcgagaatggcaatggcaacggaataatgcgcttccagacaatcgccaggtgcaatccgaccagtgagcagcacctggagagcaagttcacaacccactcgctgcccagacccaacacttcggcggcgcacgctctgcgccagcaagcggtggcccgaatctcgagcctggcgagaaactgcagcctggactcgccgtcggactcacggccgcccagtccgccgcccaagccacgcaaggaacccatggcagcggtgctggcataccaggccagtggatccgactcggggaacgggtccggtgattcggctctaggggatgcatgtgaggcgagcgtacagcggggtgtgataatcaagaatccccgattcatgaccacttcggtctcgaacggaacgctgaagagcttcacggagttcgacgtcctggccgctgaggaagaactattcaccatggccatagaagaagttaaaacagcaagcaagtttgactttgagaactttgttactttgctactgccatctgtggagaacaagcccctggatggcgatgccctcaacacgttcaagatgatgcttctggagacgggcccaaagctgctggcggagcacatcactcgcatcgacattgccctgtttttggaggagccgtcgaacgaggaggactactatctgagctgttcgggtcttgagctgctaacactgccccatggaaaggtctttagggaggacataatagagcggacgcagtgcatcaagctgatggtcgctgtgaccatactcacctgtcaaacggatctggaccgagcccaactgctcagtaaatggattcagatcgcagtggaaactaagacggctctcggcaatctgtttggattctgcgccatcatgttgggcctgtgcatgcaacagatccaaaagctcgaccaggcctggcacatcctgaggcaacagtacacggacagcgccttcaccttcgaggccaagttgcgacccacgttgagcatcatgaacgaggcctccaatccacaggctccaaacacaaccgttccccatgttctgctgtatgcactactgatcgatcgacccgttatggacatcataaaccactccaacattgacgatcgcccagctctgtaccacacctgtattgctccttgggagtcgaaagcggatgactttggcatgaccattaatttccagcacctggatgcatcgcgtggcttcctgaagaacttggaactgtatcgaaagaatgccaagatcatcctggaggatgctagtcctcggctcgatgagcttctagctgatgcttttcgaaccgagttccatgtcaagttcctatggggcagttccggagcaacggccaaggccgaagatcggcacaacaaactggaaaaggtgctcaccctgatggccgacaagttttgcatgatggccgagca

SEQ ID NO: 19503 - protein, 904 aa, DROSOPHILA
MVHNSRMSISEWLDLLELQQYEGNLQEFSTVDDVVDITDKELKQFGVRGAHRQRMVNSLLGVRAKRRQSMNLEAMSSAPRAVPRRKNSCPLVYLGENPQDMAGSGDSGPGVITTKSGKVLKQLTFDETSTIYEELRPRSKCNSPHWAIEDSRMEGYGSSNATTPLATAQPSPSEQQEAIALKKALEWELSLDARELRSHAWYHGALPRQRAEEIVQREGDFLVRDCASQPDNYVLSCRSKAAVLHFVLNKLVLQPETVYERVQYQFEEDAFDTVPDLITFYVGSGKPISSASGALIQFPCNRTYPLSFYGHKIVGNQLHTQMLAGLRGLSPLNSPMGSNGAVGAGMNATFRFEPQQQQQQQLSPMAGSPASPHCSPPRARREVPPPPRLPCKKQQRSQSLTPAQAMLVSNINKLQEQQLQMQELENGNGNGIMRFQTIARCNPTSEQHLESKFTTHSLPRPNTSAAHALRQQAVARISSLARNCSLDSPSDSRPPSPPPKPRKEPMAAVLAYQASGSDSGNGSGDSALGDACEASVQRGVIIKNPRFMTTSVSNGTLKSFTEFDVLAAEEELFTMAIEEVKTASKFDFENFVTLLLPSVENKPLDGDALNTFKMMLLETGPKLLAEHITRIDIALFLEEPSNEEDYYLSCSGLELLTLPHGKVFREDIIERTQCIKLMVAVTILTCQTDLDRAQLLSKWIQIAVETKTALGNLFGFCAIMLGLCMQQIQKLDQAWHILRQQYTDSAFTFEAKLRPTLSIMNEASNPQAPNTTVPHVLLYALLIDRPVMDIINHSNIDDRPALYHTCIAPWESKADDFGMTINFQHLDASRGFLKNLELYRKNAKIILEDASPRLDELLADAFRTEFHVKFLWGSSGATAKAEDRHNKLEKVLTLMADKFCMMAE

SEQ ID NO: 19504 - DNA, 3142 bp, DROSOPHILA
tattttactcagctgtaaattaatcagctgtaaattaattaaacactcttttccattttacttgtatttagtttattttttattcagctttctggtctattcatagtttctaattcttaatttttggaatgtcataaaatcaccttaaacactattacgaatatcatttaaaaattgcattaccaaagattgcacattaatcgtaaaaatatgtaaaaataattgcaaataaatatgcataaattgtgtatgtatacaaaaaatgtaatgtataaaacatgcaatactccttgggaattaattgaaataaactaaatggtgagtctagcatttttgatatcataaattcttcgtagcattggctgtgatgctcacttggtaaacgatccataatcagatcaatacatacgtctatataatacaaatcaagaaaatcaggcggtcttaaacacctccaatggagttcttgtaacacaaatatttagcatccttagtcattgacagctagtttcccataggatcttaatcgtgataaatagtaaattagtttttacaatcaatttctttctgtaaaccaaaggggatacagaaataatcaatttttttagtcttgtaattaaaataataaacccttaagcatgaacagaatatcacgataacagataacagattagctgcacagtttccagatccgtttgcacattgtactttaaatgtttgttgttatcgtagtttagtgaaagcgaagagaattgctctaaatacctttacatttaaaggtatttgaagccgatgtgttttaacaatctaataggaatcgttacaaagacaaaggcaaacgatcacgtcataatcatgcttataaaaacaaaatttaacatatgtatgtatgtgttagaatgtgggagcattgtggtaataaaagataaatggaatatcacgattagtccttaacaagttacagattagctgctcagcttccagttcagtttgcagctgctcagccgccttgactagagttggagccgccgctggcgagtccgccacagcaattgctctgcgctgccttggcactgaagctccccagtccgatggagctgccctccgactgacgctgggcggctgccgctgcggccgaactactgccatccttgctccttgcctgaccaatcaattcggcggcaatctcgtagaacagacgctctacattctctgcctccttggcggatgtctccaagaagtacatgtcatgctgcttggcgaactcttcgccaatctgggtgggtatctctcgatcatccctgtccgtcttgttacccaccaggattttgagtaccttggagttggcatactcctggatctcgcgcagccagtccggcaggcagtcaaatgtgggctggcagctgatgtcgtacaccaggatcaaggcgtgagccgatcgatagtagctttgcgtgatggatcggaaccgctcctggccggcggtgtcccagatttgtagcttgatcttctcgccctccacctccacggtcttaatcatgaaatccacaccaatggtggcaccctggccaggtggaaatagaccctgagtaaagcggcgcactaggcatgtttttccaacaccagcattgcccaccaggacgattttgaacaggaacttgtagtcctccattggggatgttgccaaaaatgggttggttttggggtttttgagtcgctgggtgtgggcaagtgtgtgtgtgctctgcgaaagtagacgaaagttagtcggagcttagacacacctagtcagcgacgcgtaacgattatactttgctggctggtggtggttcgttggatcagcttacgccatccccagcgaagacaacgcctctcacctgtggctcacctggggctctatcactagctggccaacggctgttcgccttgttttttggcttatttggctaaaagatgatgactcaacagcagctgtagatgcttgttactcgcttatctatgcgaatcggccccaaatctattcagcaggctttcggccaggttgactatgcttgcaaatttgtaatcaactggttgcatgctgccgcattaattgccagccttaattttgcttatgtttaccaacagaattttactgtatttcgacgtgatggtatttgattagagatgtgacatcaattcccatagcaatacttaacgatgtttttctcggtatcgatagatcgacgttttgcaaagcacttaaaaactttttgaagtacggtcactagttatcgattgttcatcatcgataagttctgtgacaaccctgaagccgaaaacaagcagccacgctagagaagaaaatctggttgaaaattggcaaaaattctaattaaaaaatcgcaaaagccaaaagagaagttcgtaagtcgtcctacgaattccgctgtgcgtccccaccacattttgatttctccaaacgtgccagacaccgagcaggggacttttttcacggagcaccccgaattgcagcgaagtaattttcgaatatggccgaggactttgatgtggaggcgatgctcgaggcgccgtacatgaaaaacgtaagttcccaaaggccggataacagccaactatcgtttaaattaagtcccactggcttttgtgcccacccaaggcaattattttgctgtgcaaaaacaaaatgaaaaaaaatagaaaaacagttacttcatatgtatgtttgtatacttcttttcccacatagacacccacaggcgtacgtgcattttgtgtttgtatgtaagtcgtcttcgtctcgggcacacacacacacacacacacatgtgcagtcgatgcatactaagtggtcttaaatcgatttttagcctaattttgctgtttaataaaaaatcggcagccggaacgccaatctgcgtgctgattttcgtaatatttttttttcacactagactgcgttcatacagaaaagtgtttcgccaacggaaaatctgtctgtgtgtgggtttgtgttgtttattttcctacgcggcatttgatacagtcgtgtactgcagtgggtgtacagtggggtgcaaaatatttggcagggctgcaatagcaactgaaaacgtttaacaagtatcagggaaacttaaag

SEQ ID NO: 19505 - DNA, 1009 bp, DROSOPHILA
aaatacagtaaaattctgttggtaaacataagcaaaattaaggctggcaattaatgcggcagcatgcaaccagttgattacaaatttgcaagcatagtcaacctggccgaaagcctgctgaatagatttggggccgattcgcatagataagcgagtaacaagcatctacagctgctgttgagtcatcatcttttagccaaataagccaaaaaacaaggcgaacagccgttggccagctagtgatagagccccaggtgagccacagagcacacacacacttgcccacacccagcgactcaaaaaccccaaaaccaacccatttttggcaacatccccaatggaggactacaagttcctgttcaaaatcgtcctggtgggcaatgctggtgttggaaaaacatgcctagtgcgccgctttactcagggtctatttccacctggccagggtgccaccattggtgtggatttcatgattaagaccgtggaggtggagggcgagaagatcaagctacaaatctgggacaccgccggccaggagcggttccgatccatcacgcaaagctactatcgatcggctcacgccttgatcctggtgtacgacatcagctgccagcccacatttgactgcctgccggactggctgcgcgagatccaggagtatgccaactccaaggtactcaaaatcctggtgggtaacaagacggacagggatgatcgagagatacccacccagattggcgaagagttcgccaagcagcatgacatgtacttcttggagacatccgccaaggaggcagagaatgtagagcgtctgttctacgagattgccgccgaattgattggtcaggcaaggagcaaggatggcagtagttcggccgcagcggcagccgcccagcgtcagtcggagggcagctccatcggactggggagcttcagtgccaaggcagcgcagagcaattgctgtggcggactcgccagcggcggctccaactctagtcaaggcggctga

SEQ ID NO: 19506 - protein, 223 aa, DROSOPHILA
MEDYKFLFKIVLVGNAGVGKTCLVRRFTQGLFPPGQGATIGVDFMIKTVEVEGEKIKLQIWDTAGQERFRSITQSYYRSAHALILVYDISCQPTFDCLPDWLREIQEYANSKVLKILVGNKTDRDDREIPTQIGEEFAKQHDMYFLETSAKEAENVERLFYEIAAELIGQARSKDGSSSAAAAAAQRQSEGSSIGLGSFSAKAAQSNCCGGLASGGSNSSQGG

SEQ ID NO: 19507 - DNA, 4748 bp, DROSOPHILA
aaggtgtacggcgatgctatcggcgaggagaacgcattcctctacagaaccggactctatttggctgcatcggcatccgctgagttcttcgccgatatcgccctggcgcccatggaggcggccaaggtcaagatccagaccacgcccggattcgccaagacattgcgcgaggctctgcccaagatgaccgcccaggagggcgtgaccgccttctacaagggcctggtgccattgtggatgcgccagatcccatacaccatgatgaagttcgcctgcttcgagcggacgctggagctgctgtacaagtatgtggtgcccaagccacgtgccgattgcaccaagggtgagcagttggtggtgaccttcgccgccggttacattgccggcgtgttctgcgccatcgtctcgcatccggcggacacagtggtgtccaagctgaaccaggccaagggtgcctccgccctggacgtggccaagcagctgggttggtctggtaagtgctgacatttgatgggatttcctgttcctcatctaaaacattcgcttttttccaattcaggattgtggggcggtttggtgcccaggatcgtgatgatcggcacattgaccgccgcccagtggttcatctacgatgccgtcaaggtgttcctgcgcatgccacgcccaccaccaccagaaatgcccgagtccctgaagaagaagctgggcgtgactggcgagcagtaaaccaaatataagctaactgtttttaaatttagagcgagcagaatgttaatcgaattaaacttgatttgtatagataaaccacacagtaaataaaaaccacacaaaaattaaacgctctttgtatcaaggggtaaaagaaaatttcaatttaaaataaccgccaagctcgagtgcacacctccatattttccaacactaatttagcacttttagttcaataccgaacagctgagcttaacagccccgtccaatgtcaacaaacagagggaagaagaagcagcattcaacacgcggttttttgaactgcatttttatttcacttttattaagttaaaatagataattatggttcagaataaacagaaaacagcgaagccaccaaagctgctaaaaggcgcagccaaggagcctgcactttcgaaggcggaaaactggcagaaggttaaaatcaagggccacgtgatatccgacgatggtggcggcttcgagggattaattggcctggaggtcctcaaggactacgatgcatcgctggtgaagtcctcgcagaagaggaccacatcccggaatccagacagagagcgcaagctgaagaagaaaaagaggaaggtatcgaagggcgacgaggaggaatccagcgagagttccagcgaatccgaaagcgaggatgaagtggcggtcgctgctaggaccagtaaaaaagcccgcctggccgagcgtcatgcgcaaaaaatgcagaaactgcgcgagaagcgtgaaaagcgaaaggagctgcggaaacagaagaaatcgaagggcaaggaaaacgacaacagtgaggagtccagtgatgagcacgcggcagatcgtttcgcattgctcaggccaccaccatcggacgatgaagaagaagtggtcaaggcggaagattcggcagaccaacaggagtcgaccgacgaagaagcacccgaattagtgcccatctccacaggcgaagccgaagatatgtccgcctggaacggcctgggtgttcccgcttccattttgcgtgccctcggcgagcaaggcttcaagacgcccacacaaatccaggcactgacgctgccggctgcaatccacggcaaaaaggacatccttggagcagccgaaacgggcagcggaaaaaccctggcctttggcatacccatgctcgccggaatcatggagctgaagcaaaggaatattcgctctggcatacgcaaggcgcccaaggtgaagggacagcagccggagccagcggcagatgagcacgagctgacgcccccgccggaggagctggatcatgtttccggtgccagtgatgaggagagcgatgcggaggagcaggcccagcgtgtacagactcctctgtacggtctggttctcacacccaccagggagttggccgtgcaggtcaagaatcacctggtggctgctgcaaagtatacaggcattcgagtggcagccatcttcggaggtctagctgttgcgaaacaggaacgagtacttcgccagtgcccggacatcgtggtggccacacctggtcgcctctgggaactttacgcccagggcaatcgacatttgggcaagatcgaggatgtcagtttcctggtcatcgacgaaacggatcgcatggtggagaagggacacttcgaagagctgcgcagtctactcaaggttctcaattcggacgagcagaagaagcatcagcgccaaaattttgtttactcggccactctgacgttggtccacgatcttcccgatcacatgcagagtaagttactcggatcttttgagattccattaagtaaccaaaactctttcactttcagagcgaaatgtaggtaagcggcccaaatttgtgaaacagacggtggatcagaaaattgaaagtcttattgaggagttgggcatttcccagccgaagattgtggatataaccagttcgcagcgtaagtattcatagttaatcatgaactaaacagcagatttataaagtccacttgcagaaaccgcacaaacattgaccgagagccgtctgctgtgtcccatcgatcacaaggactatcatctttactactttattcagcgccatccaggacgcaccattgttttttgcaattccatcgattgcgtaaaacgactggccacgctcttcggcctgctggactgcaatcccctgcccctgcatgccaacatgatccagaagcagcgtctgaagaacctggagcgattccgtgacagcccgacaggtttgctgatagccactgacgtggctgctcgtggcctggacataccgaatgtggagcatgtgattcactaccaagtgccgcgcactagtgagaactacgtacaccgatcgggacgcactgcacgagcgaataagcatggcataacagtcatgtttatggagccgggcgaggtcaagagctatgtgaagctgtacaaaacattggagagaagtgagtgagagacttctaacaggaagacagacgttctacatattcgtttactttttagctgaggatctgccgcttttccccattttggagcgttttatgggagctgttcgcgagcgtgtgaatctggcgcgagatctggacaaggaggagctgaagctgaagcgcgtgcagagtgagcgcggctggatgaagaagcacgctgaggaaatggacatgatcattgatggctacaatgacgaatcgtaagttttttttaacaagatctcattaaaatgaagtctatgactaactcttacttttgcagtggcagtgaccaggatgaggatccatttgtgattgagcgacgtcgcaatcggctgcgcgtggagacagttagagcgcagctcaatgctctcctggcccaacccatcttccccagaggcttcagcttcaagtatcccaacagcgaggcggcccaattagccacgagtcatactcaaagtgccgtggagaccatgaaggcggccatagaggaccagaagcaggccaaaaaagatcgcaacaagcgaaaacggaatgcctaatctaacttaaagctgttttattgaataagagatacaaagctatagccttggatgtttccatcaatgctttgaaacaaagtatcgcacacctccatcggtcaatgagcgagcgtgcttggccaatagtgtggaaacggacaagtttggggtggtaaagcacctagttataaaaccgaaaatcaaaaaaacaatctagatatgtgttcatcattacttactctatgtacggttccatttcctccatcgtccatctctttttagtcttaaatagcgcccgcatgcgatcgcttatattggtgggcagtaactcctctgccagggagcgtatgcaaggctgcgctccctccttgtcgcaaatgcccagacctcgtaggtactttaagtcgcaggacatgccctcgggcagtacctcctgccaggtgcgcatgaactcctcgttgcgaaagcgcaaacccggctgaagaatgttctgtgccacaatgcgggagaccaaggactcctggtactcaaacttgcccgggcaacgttcactgggaatggtatagatatcaaacagcccagccacaacatcctctggagctatgcccttcagtgcattgatggtctcctcccgttccacttcgtccaaggcccaggagttttcgcttatcaaacccagcatcatgttaataatgcgatactcgtattcgtactccatcacgcgcattcgcccgtccagttctatggctcgatattggttcaatccctccatgaactgaccgcggctgcactgcaccgtgtccaggagctgcgaaaaggtaaagagtagcttctgctccacgcagaactcgttctccggccccgaatatcgagtcagctgcagtagttcacccagcttgcgaaagcgcggctttatctcgcggcactcgaagtactcgtggaacaccttgagcaccggccgctgctccagagttcgcggcacttccagttcatcctccgtgctgtcattgaggctgcgctc

SEQ ID NO: 19508 - DNA, 2513 bp, DROSOPHILA
aagcagcattcaacacgcggttttttgaactgcatttttatttcacttttattaagttaaaatagataattatggttcagaataaacagaaaacagcgaagccaccaaagctgctaaaaggcgcagccaaggagcctgcactttcgaaggcggaaaactggcagaaggttaaaatcaagggccacgtgatatccgacgatggtggcggcttcgagggattaattggcctggaggtcctcaaggactacgatgcatcgctggtgaagtcctcgcagaagaggaccacatcccggaatccagacagagagcgcaagctgaagaagaaaaagaggaaggtatcgaagggcgacgaggaggaatccagcgagagttccagcgaatccgaaagcgaggatgaagtggcggtcgctgctaggaccagtaaaaaagcccgcctggccgagcgtcatgcgcaaaaaatgcagaaactgcgcgagaagcgtgaaaagcgaaaggagctgcggaaacagaagaaatcgaagggcaaggaaaacgacaacagtgaggagtccagtgatgagcacgcggcagatcgtttcgcattgctcaggccaccaccatcggacgatgaagaagaagtggtcaaggcggaagattcggcagaccaacaggagtcgaccgacgaagaagcacccgaattagtgcccatctccacaggcgaagccgaagatatgtccgcctggaacggcctgggtgttcccgcttccattttgcgtgccctcggcgagcaaggcttcaagacgcccacacaaatccaggcactgacgctgccggctgcaatccacggcaaaaaggacatccttggagcagccgaaacgggcagcggaaaaaccctggcctttggcatacccatgctcgccggaatcatggagctgaagcaaaggaatattcgctctggcatacgcaaggcgcccaaggtgaagggacagcagccggagccagcggcagatgagcacgagctgacgcccccgccggaggagctggatcatgtttccggtgccagtgatgaggagagcgatgcggaggagcaggcccagcgtgtacagactcctctgtacggtctggttctcacacccaccagggagttggccgtgcaggtcaagaatcacctggtggctgctgcaaagtatacaggcattcgagtggcagccatcttcggaggtctagctgttgcgaaacaggaacgagtacttcgccagtgcccggacatcgtggtggccacacctggtcgcctctgggaactttacgcccagggcaatcgacatttgggcaagatcgaggatgtcagtttcctggtcatcgacgaaacggatcgcatggtggagaagggacacttcgaagagctgcgcagtctactcaaggttctcaattcggacgagcagaagaagcatcagcgccaaaattttgtttactcggccactctgacgttggtccacgatcttcccgatcacatgcagaagcgaaatgtaggtaagcggcccaaatttgtgaaacagacggtggatcagaaaattgaaagtcttattgaggagttgggcatttcccagccgaagattgtggatataaccagttcgcagcaaaccgcacaaacattgaccgagagccgtctgctgtgtcccatcgatcacaaggactatcatctttactactttattcagcgccatccaggacgcaccattgttttttgcaattccatcgattgcgtaaaacgactggccacgctcttcggcctgctggactgcaatcccctgcccctgcatgccaacatgatccagaagcagcgtctgaagaacctggagcgattccgtgacagcccgacaggtttgctgatagccactgacgtggctgctcgtggcctggacataccgaatgtggagcatgtgattcactaccaagtgccgcgcactagtgagaactacgtacaccgatcgggacgcactgcacgagcgaataagcatggcataacagtcatgtttatggagccgggcgaggtcaagagctatgtgaagctgtacaaaacattggagagaactgaggatctgccgcttttccccattttggagcgttttatgggagctgttcgcgagcgtgtgaatctggcgcgagatctggacaaggaggagctgaagctgaagcgcgtgcagagtgagcgcggctggatgaagaagcacgctgaggaaatggacatgatcattgatggctacaatgacgaatctggcagtgaccaggatgaggatccatttgtgattgagcgacgtcgcaatcggctgcgcgtggagacagttagagcgcagctcaatgctctcctggcccaacccatcttccccagaggcttcagcttcaagtatcccaacagcgaggcggcccaattagccacgagtcatactcaaagtgccgtggagaccatgaaggcggccatagaggaccagaagcaggccaaaaaagatcgcaacaagcgaaaacggaatgcctaa

SEQ ID NO: 19509 - protein, 813 aa, DROSOPHILA
MVQNKQKTAKPPKLLKGAAKEPALSKAENWQKVKIKGHVISDDGGGFEGLIGLEVLKDYDASLVKSSQKRTTSRNPDRERKLKKKKRKVSKGDEEESSESSSESESEDEVAVAARTSKKARLAERHAQKMQKLREKREKRKELRKQKKSKGKENDNSEESSDEHAADRFALLRPPPSDDEEEVVKAEDSADQQESTDEEAPELVPISTGEAEDMSAWNGLGVPASILRALGEQGFKTPTQIQALTLPAAIHGKKDILGAAETGSGKTLAFGIPMLAGIMELKQRNIRSGIRKAPKVKGQQPEPAADEHELTPPPEELDHVSGASDEESDAEEQAQRVQTPLYGLVLTPTRELAVQVKNHLVAAAKYTGIRVAAIFGGLAVAKQERVLRQCPDIVVATPGRLWELYAQGNRHLGKIEDVSFLVIDETDRMVEKGHFEELRSLLKVLNSDEQKKHQRQNFVYSATLTLVHDLPDHMQKRNVGKRPKFVKQTVDQKIESLIEELGISQPKIVDITSSQQTAQTLTESRLLCPIDHKDYHLYYFIQRHPGRTIVFCNSIDCVKRLATLFGLLDCNPLPLHANMIQKQRLKNLERFRDSPTGLLIATDVAARGLDIPNVEHVIHYQVPRTSENYVHRSGRTARANKHGITVMFMEPGEVKSYVKLYKTLERTEDLPLFPILERFMGAVRERVNLARDLDKEELKLKRVQSERGWMKKHAEEMDMIIDGYNDESGSDQDEDPFVIERRRNRLRVETVRAQLNALLAQPIFPRGFSFKYPNSEAAQLATSHTQSAVETMKAAIEDQKQAKKDRNKRKRNA

SEQ ID NO: 19510 - DNA, 2689 bp, DROSOPHILA
atggtggaaaggggtggataacaatgtaaggagctagccagctggaaccggagctcggcgccatagcagatttacttttattgcaaattgcaattctgcattctcgtctggcccgcccccgctccctcccctcctccgcctaccaactgctggccacacgatatacacatccaaatgaatgaatagacagatacagagagagtcggtgggggaattctactccctggaggctaatgtgcaacgggagctcggcatctccatctgcatttcataagcgcagcagcacagaagcacctctgctgtcggccacagtgacagccctctatgatggacataaagcatccactgactcggcacaaattgaaagcatagaattacacgcgtgcagcttgtggtaaatcttacattttgcaattgcctttcgcttggctctacaatttgagtcaaagtctgtgttgcaacataggtaggtggctagctggctggctgctcgggaaacatttattacgtcatttattgtcgaccgcaattttcaatgcaattttctattgaattttacagttattggtcatcgtgtggcccatttggaatttcaattaattaacgacaaatattagtaactaaaatctgtcactgcagataagagatactttttctaaaatctacatttcatgatcatgttataaatataattaagtgcgaatattaacaacagacataccagaaaaaactgggcttattgaagtttaaatatttattttacacagaacatacaaattatttatctacttggcttcaatttatcaatttgaactaaacgctgccgcgtttaatttccgagcattcactgtgactaaattcacttgaagtagacatcctttttggtcacatctgcagccgggaaaactacgaaaatggattcaagtcctatgatttaaattaataaagccgtttctctagcatcgtgtttttgggcggataaacggacaactgcatccggttagcggaaccaggtccaaaacttccaccacctgcggttgccacgcgcatttggcggcggcacagcgggaggtggcatcacctggggcggcaccaccggcatcattggcggctccatgtccgccaagtcgtccacgcgattctgtgtggcacgcaccacgcagttgcggtactcctccatagctgcaaagcagttgcacgaccgctggcggtgcgcctggaggcagctctgcagccgggcggccacatccaagcacggtgactccaccgccaccggccccagatggccctccacctgctgaatcagtcgatcgaattccgcgtaaatggcctccgttggcctgaaatgaaaatcgagataatcacgaattttcaccactgctcttttaaaaattttcaaatatttttgatgaccttgctgcaggatactcacattcgttggatatcggtggtgaagctgcgcgatcttatgaggcgtctggaaacgggcatcggctgtggatactcctgtttgggaatcggttgtccatccggttcctgcttcgtctgccccggcaacgctttctccgtctggtccgatttttccgacctcttggtcgtcgaatcctgcttttgcggtgggtgtggtcctgttcctggtcctgcaccgccaccctcggcacgcgtttcgccggccaactgggcgcccatttggagtgtgtgctcggataatcccagctagattcgctctgtgtgtacttttgtggttgggtctgggttaaacctgtgaactggtgtacttatgttggtgtttttagttctttgttttttgtcaaacagatacaattttcatagctagagattttgagttgctaaactaactgatgggggaaagtgaaatcgctttctgtttgttctgatgaaatttgtgacttagcactcctgggtaaaaataaattggaaattgtatatgtgccttcttaagttttttaaaatggtagaaaatccaagtctagagtttaggattagaataccaatttaactttgtttacatattgtgcatttaggaacgaacattttcatcccaagtatgatggtacaattttattacactctttgtgaattcggactacggatgaatatattttattacttgttagccattcaattaaaattccagtgcttcattgatcccatctcatgcagctgtccatttttaagtattttgaccggggcatccggaggatttgtcgtttaggtgatgatccacaatgtaccacctctgcccgaattgccacgaatccaccggaattttagcttaattgcgcattagagggaaaagttttcctgtttcctgcgaatggccacaacgcaacacatttcgaaagttcagccagacaatttgacgatgggccatggccacgatgtccatcaaatgcaggcattctccgtactccggctccggctccggttcaagcttcgcttccgaatccggctcatccgggtgcatcaatgtccggatacgggactctaccaagacaccctccccacaacacagactaatcaagccaaggcaaaagtaagggccaaaagcaaagtccacctgggctacaggtgcaagtgaggagtgaggggggggggggtcggggggtcggaaaaacttctccggctgccggctgggcataaaaaagtcaagaagtttgttgcggct

SEQ ID NO: 19511 - DNA, 597 bp, DROSOPHILA
atgggcgcccagttggccggcgaaacgcgtgccgagggtggcggtgcaggaccaggaacaggaccacacccaccgcaaaagcaggattcgacgaccaagaggtcggaaaaatcggaccagacggagaaagcgttgccggggcagacgaagcaggaaccggatggacaaccgattcccaaacaggagtatccacagccgatgcccgtttccagacgcctcataagatcgcgcagcttcaccaccgatatccaacgaatgccaacggaggccatttacgcggaattcgatcgactgattcagcaggtggagggccatctggggccggtggcggtggagtcaccgtgcttggatgtggccgcccggctgcagagctgcctccaggcgcaccgccagcggtcgtgcaactgctttgcagctatggaggagtaccgcaactgcgtggtgcgtgccacacagaatcgcgtggacgacttggcggacatggagccgccaatgatgccggtggtgccgccccaggtgatgccacctcccgctgtgccgccgccaaatgcgcgtggcaaccgcaggtggtggaagttttggacctggttccgctaa

SEQ ID NO: 19512 - protein, 198 aa, DROSOPHILA
MGAQLAGETRAEGGGAGPGTGPHPPQKQDSTTKRSEKSDQTEKALPGQTKQEPDGQPIPKQEYPQPMPVSRRLIRSRSFTTDIQRMPTEAIYAEFDRLIQQVEGHLGPVAVESPCLDVAARLQSCLQAHRQRSCNCFAAMEEYRNCVVRATQNRVDDLADMEPPMMPVVPPQVMPPPAVPPPNARGNRRWWKFWTWFR

SEQ ID NO: 19513 - DNA, 3474 bp, DROSOPHILA
agggcacggacttgaccacctggcgcactgtatccgcttcactggtggccaccaagtatctgtacttcaggcgctttggggcgcaggcggagcaggaaaggaatatcaacgtggccatcgtgggctgtggagttcaaggacaactccatgctgccgctttctgcgcgaacttccgggtgaggcagcttaatctttacaatcgcacgcaggcaaaggcactgggtttagcggaccaactgcggcagaaattgaacaccgagagcggaacccagattactgtatgtccaagtcctcacgaagcttgccaggatgccgatatcatctgcatcgccacgtactccaaggagccgcttatccagttggcagatctgaaatccaaacgggctgttcatattaacggtaggtctgctgttataatggaatgctggatggatgatgatgacctaccctttataactttcgatttcagctgtgggagccggcgaagttcacttttcggaggtggctccaaagatttaccagcaggccaaggtctacgtggattgctatgccaatgccgaggctgaattggtgggattacctgcgccgatcaccgctgaagtgggtcagatcattctggatggaaactatcccaaggagctagaaatcagcatctttcaatccatgggtgcgtttttattaagtttgtgtaactatatgactatctctgtctgtttcaaagttgtatcattaaaaatttcatacatttcctatttaaggcatggcctcggaggacgcctgtgtggcccaggcggttcaggattgcattatctctagcgcaaaggattcctgattgctgtccagctggcaaagcgattccggaaccagcccaagccaaaccagtgaattcttaaactttaatgtgtatatgcgcgtatataaaaaagcatttggaaacataacaatcggttcgcttacaaactacaacaaacccaactggccggagaagtccttccggtcgtcacttccagatcacagtcacattcgtgtccttctcgatatcccgctcgatggtgcagggcgagaggcccgtcttgcagcagatctcgtcaaagctgatcagcccggtgtacatcttctgccgcccggaaggcactgagcccgtaaacaccgggtacttgtggatgcagcgaatgaatcggtgctgcagcccgaagatcaccatgcgacgctcatcgatgttgtggtgctgggggcacaatctctggcagatcgctcgcagagtaacgccgtgagtcatcgaggcgtagaactgaaagatgcgctgaacactgggcagcgtcttgtccggacgcaaggccacgtatttccggcatgcgccgctcagtgatgcgctctggatgagatgctttaggttctgcgtcatgtacacgttgctgtacttcaggattggcagcagctgaacgaccccgtagtagaccagattctgtatgcacgacttgaccaggtccgtttccacgtccgcttcggcggcaatgcgggcaacatggttgattccatttatataaggcaggatctagaggaaaccataacagtccaatgggattactaaattatttacatcgtgaagattgtataactatagaatcaggaatagtccgcacctgttgtgtggtaaggtcccagttgtccagcggagcatcgcgcaggttcgccagcagcaggggcaccatgtgatccttgaccggcggcgggtccggcttgtgcatgacgatcttcaggtatatagtgttatcgccctcaacaatggtggccaccttccgctcgttaaggtcgcgtagtacagtctcaaagatgttctgtaggcggcgcttgtcatcttcgcgagacaggaagcacgactcctcctccatcattatgaggtactcggacagcttcttgacgaccggctcgtactggacgctcctggcccgcgagtcgcagacaaagcataggttaaacaggaaggcattccgtgcgtacttctgctgatcctggatgcccactggatagccgactatctttacatccattgcgttgacggtgagaatgcagcgttgaagatgctgcttgggtatgatgtaaacattgatagcatcgaacacatccttggatatgtagttatcaggaacctgagggacgtggatttgttcgaactatactgcgttatcagcgctcctgggaaccagctcacctggcagcttatcttgcagcccgccgtcgcatgaaactcgctgaggaagatgcaccggatcttgccctccgtgctgccatgggcacccgctgctccagctcctgatccgcctgctccattcgtgaccgcgcccgccgttgtcgacgtcgcagccgtctcattcgtatgggaatgcatgccgttcaaaagattccagtatcaccgcatccacatcctctgcttccttccgcggagtggactccaaagctttaacagcaggtggcacaatccaataacagtggcggaattcgctgtaatgttatggtaagcgatgctttagtgtgaccatagccttactgcaacaaatatactccaatgcaaaaaccaattataacaaattttaacaacaaattaattcaacaccatttaatttgttgagtagatcgttttattcatgtataaattatctgttatgttaatatataaaggccaactgtaatatgcgtaggtggggtatattttagcgctcgctctgcggtcatactaaaatttgcagaaatggaaacgtgaggattgttttgtttttatttagtttttccattaaacagcgaataatatgcagatgataacgcttccatttcaggatcaatcccacgttctcgtacctcaccaatctggaggtaatgcagattctacagaagatcaaaagcaccaaaaagaagttcggcatgcgcaacttggccacggttacctatgaggtgtcgatttttttaaatatttaactaatatatgataaattaaccaaacactttgttccacaggcactgcagtatctggaggagtcgccctgcaagacacaaactcgtgagaacattatgaattacgttaaagacctgtcttcttatcgtctaaagtcccaagagatcctgcaaatgatcaacgatccgcctacaagtgcactacacacgcaactggtaaggattagtctatcatatgccagaaaggctaattaagtatataataacctccccagctcatcgacgacaataaagctccactaaccgatgaggagaacgagaaaatcattcagctgagctacaaacacttccatggtggagaaaccaaaggcgctgctaaggaaacaccggcggaaaagcctgcggagtccactgcgaaggccggcaagcaatctggcgtaaagcgtaatgcccaggcaaaatccaatccagcggaacaaatagctccagcggacaaaaccacgccaggtgatggagttactcctg

SEQ ID NO: 19514 - DNA, 1324 bp, DROSOPHILA
ccacctgctgttaaagctttggagtccactccgcggaaggaagcagaggatgtggatgcggtgatactggaatcttttgaacggcatgcattcccatacgaatgagacggctgcgacgtcgacaacggcgggcgcggtcacgaatggagcaggcggatcaggagctggagcagcgggtgcccatggcagcacggagggcaagatccggtgcatcttcctcagcgagtttcatgcgacggcgggctgcaagataagctgccaggttcctgataactacatatccaaggatgtgttcgatgctatcaatgtttacatcatacccaagcagcatcttcaacgctgcattctcaccgtcaacgcaatggatgtaaagatagtcggctatccagtgggcatccaggatcagcagaagtacgcacggaatgccttcctgtttaacctatgctttgtctgcgactcgcgggccaggagcgtccagtacgagccggtcgtcaagaagctgtccgagtacctcataatgatggaggaggagtcgtgcttcctgtctcgcgaagatgacaagcgccgcctacagaacatctttgagactgtactacgcgaccttaacgagcggaaggtggccaccattgttgagggcgataacactatatacctgaagatcgtcatgcacaagccggacccgccgccggtcaaggatcacatggtgcccctgctgctggcgaacctgcgcgatgctccgctggacaactgggaccttaccacacaacagatcctgccttatataaatggaatcaaccatgttgcccgcattgccgccgaagcggacgtggaaacggacctggtcaagtcgtgcatacagaatctggtctactacggggtcgttcagctgctgccaatcctgaagtacagcaacgtgtacatgacgcagaacctaaagcatctcatccagagcgcatcactgagcggcgcatgccggaaatacgtggccttgcgtccggacaagacgctgcccagtgttcagcgcatctttcagttctacgcctcgatgactcacggcgttactctgcgagcgatctgccagagattgtgcccccagcaccacaacatcgatgagcgtcgcatggtgatcttcgggctgcagcaccgattcattcgctgcatccacaagtacccggtgtttacgggctcagtgccttccgggcggcagaagatgtacaccgggctgatcagctttgacgagatctgctgcaagacgggcctctcgccctgcaccatcgagcgggatatcgagaaggacacgaatgtgactgtgatctggaagtga

SEQ ID NO: 19515 - protein, 412 aa, DROSOPHILA
MHSHTNETAATSTTAGAVTNGAGGSGAGAAGAHGSTEGKIRCIFLSEFHATAGCKISCQVPDNYISKDVFDAINVYIIPKQHLQRCILTVNAMDVKIVGYPVGIQDQQKYARNAFLFNLCFVCDSRARSVQYEPVVKKLSEYLIMMEEESCFLSREDDKRRLQNIFETVLRDLNERKVATIVEGDNTIYLKIVMHKPDPPPVKDHMVPLLLANLRDAPLDNWDLTTQQILPYINGINHVARIAAEADVETDLVKSCIQNLVYYGVVQLLPILKYSNVYMTQNLKHLIQSASLSGACRKYVALRPDKTLPSVQRIFQFYASMTHGVTLRAICQRLCPQHHNIDERRMVIFGLQHRFIRCIHKYPVFTGSVPSGRQKMYTGLISFDEICCKTGLSPCTIERDIEKDTNVTVIWK

SEQ ID NO: 19516 - DNA, 8344 bp, DROSOPHILA
cggccaaatcttcgcgacgacgcactgtgttcgagtaccgaaagttccacaaaatgcctacgaagcggttacgaaatgtgtgatcattatgatcagaatcggaaaccgtattttcgccactcactgctcctccgattcggcacttggcggttctccagttgtcgggcttgggtgttgcccatgttgcccaggctatctttgcaaatccaatgtgcagatctgaaagatctttaaattctggagcagtaccaaacacctaagctgaaactcaaccgcgcacttcgctttgggaaaaacaactgaacgtgagcaaatgttgcccaaacagacttcttcaactgagctgaaattgcatatgtcattcaccgactgttaaataccctaaaggaattacgcatataattataaatcatatatgaacgtaagattgcagctaaagtatgagtaatatatatttattgtttctattctattctctatttagtaatgttctttaaattcagctataaatcgttgttatttttttatagttttctataatttcagcggagtcttaaagtaattgaaaaaatgaacgaactcagccaaagagaccgacaatgacaataaagcccaagtgagtaagatttcaatgtcgtgcaccaacaatttaccctcactgtttttctaattagtgctctatatccgcagtgccccctcctctcactcccctgtcgcgatccaccaaccgatccgatcgtattggataaacccattcgcacccccgcgcttgaccaactcactccagtcgtatttgctctggccattcagtcgcgtatcgtcttttatcgttcacttgattagagaaggtctccccgttgtcgccgagtttcatattctgctgatcgcagcggtatttgcttaattaaaatttctgttcttgccgcgtagcattgcgtatttttatagcttcattctatggaatagtgaataataaattaataataaaccaagctgtgaattcacaagttcattttactagagaatttattttaaatagtttacacataaacgtttagattatcttacagattgaaataatttaagttcactttgtgcagtatctgtctactttacattacattacaactagcaatgaaggaataaatacatctacatggcattttacacgtgtaaacggagctatctacataggcggctctactccaccacattgatttcaatattatcatcttcgtcggcctgctcgctcaaatccacactggagcagctatcggaactgtagtcgagtgcctcctggggcgtaccatcaccggatggcgtggatgtcttgaagacacctccggattcgggtactgcactcggctgcttctcctggccactcttcagattctcgcgcgtgtgccgccacttcatgcgacggttctggaaccacaccttgacctaatcagggtataaaaataataatatattggtttttatagagctatgaaaggagtcgaatgtgcaaatgttaaactatgaaaatcccatcttttaactaacctgagcgtcggtgagattcagtcgtgccgccagcttgcggcgatctggcttggtgatgtacttctgctgctggaactgaatctccaggcccttgcgctgcagattcgagaagacggcgcgagaccaggatcgcttgcgcttcccattgcttccggctgaggcgttgccctggccattgccacctccatgtccatgtgcaccgttctgggatgtggcagcggcggcggcggcgggcgaggtgggcgctatgtccaggagctgctgcggcgtcttgcccagaaatcgctgctgctgttgcgtcagctggaggctcgtgaggctgtggagcggcgccagtagcgccgaggctgtcgtcgagttgtgtggcgggggcttgtgctgctgatggaggtgtttgggatggtgctgatgatgatgatgctgctggtgctgctgcttctgatgttgatggaagcggaggagcgcattggtagccagcgtgggataagtgggtgcggctgttcgggaatggaatgttaaagtcaattgggagattcatacttccttcattagcaataactcttaatttgttgctatactgaatccggtgcgttttttacgcaccaatttggatatttatttttataggaaaactaccattagttatggacaacatcctcccttggtagcacattgcatccgcaggaaataatacatttatcgccggccaaagaaatgatacttgtttcgccaaagaaaatatgaaattcaattttttgtgttttctgagtaaattattttgatcaataaaatgcatgttgagaatttttaaatgggcttgtttataataaaattttcacttaattggaaattatcattgaagcgttttgtggctagggggggcaaacgaaatttgtttacttctagcgcgaatctaaacaacaacaattacctctagagatccaaaattatttggggtaatcgaacacgacatggggcacacgaggttgaggtcgaaccagggtgctttacttcccttaaatgttttttaaatatccaagaatttatacacgcagtaagaaacaattcgaatgacgttgactttcctattgtatttccaatcattattggcatttactatcctttatctaactactgagtttcaatcaagatcattacggcatttatcaactcaaaggactccgctgaaaagtatgctacaaaaagttcctttgaatcctcagttcacgataatgttcactaatgttgatatgaaatgtaatcctgatgttgttaaaaggccacaattttaattcctatccttgactttttcattgaattttatttgatttcaaactgcaaaccattcctctttgtttgtagccaacgctaaattatcataggtattttttattgcctttttaacgttgtgctatgtggaattcgatttgtttgtgtgctcgcggcatgcgcctaattgttttcgagatcgagcgttttatttacttaagcaacacactactcgatcgattgtgtgtatttacactgcagcggaaatgcgcttctgcacttgtggatacaattgtatctcaatccgtgcgcttgtgtatctgcatcgggaacgccaatggaatctcagcacatctgcaggggctaataacgccttaattggccgttttggcatttggcttgtgtcaaccatcgggggtttgttataatgagttttcaccgactttcaacaccttggatgttggccggggcattggggttcactcacagcgcgagatcattaattgccgactttcccgttcagatacatttacaaaataccgccagcggacccgtaaatatcttaatgagttgtgataatttttcggatgccatcttaaatcactcaagggtctgggttgcagatgcatctccagtaggatgtgtttgcgaatcgtacatttcgcagccatatttaagttgcatcgatttattagcacgatgcattccacatttacgacttggcgaatattgtggcttatttcgcggtaaattgcgaatgatcttttggggttaagcagagcactcccagtgggccatgtgctatggaaatttcgactaccagctcgacaagcggagtatgtgtttatttgattgattttaatatattatacatatgtatctacttccgaacatccgaatctctgacttttaccagctaactatgcactaagatatattatctgcattatgtactttcaaaatatttaagtgaaatcaaaagtatagctaatatttcaattgtatatttcgtgaaatatctttagctacttgggattgtcgtcaattttcactcaattcattatagttaatcctatagttgtggtatctacatacatatatcagtcccgttaatttgagttgagtgcgtggtaattattattgctacaaccctcccctgctgttgggaacttgagaaagagtcttcaaagttccaaaagaaatcgtctgagggccatcattaatcagggatcttcgaacgctttgaaagtgcatctatcagttggattaacatataaattgctaattaattagacccacggcgccggattattgttcagacagaatttccatatcagacaatggtctgtagcatccaatcgatcgatggatggatcgattgatcggcagccagaagagcaacaacaacagatcaacaaactactcatcgccaggcgggacaggcaaacagcaacaaatagtcgacggaggagccgcagagatctcgctggtccatgattttatgatgtgcgatgcgatgcaatcaatccatcacggaataattccgcaggggccggcaggttggacacggcgggcagccacagggtagcctcctcctgaaaaggccaccacagtgggtggttgtgtaaatacttggccttttggctcggcccccaaagaacagcgcatagtttcacccgtgcccgtgcccgtacccatacccggtacagtcatccatcggtcagcagttccctgtcgttggcctaaacggcagccgagcctcattggagtcggttgagccgcagtagttggaaccgtggcgcccaatctatcagagatccgcgtctctagccgggccaaagatgcctccacctgtcgaactcctcggccggcggaacaattcattagagagcgggcaattagatggatagctatctgtatctgcccatgaatgacgggccaattgcccaagcaaataaacaaactgttcgccacaaacgttttccacgatccgtgtgagcttgaagtttatttttaaagactgactcgtaatttgttcataaattgttcttaattttccactttggtctttggcatctcatctatttgcggtgcccaaaggattgatgaagcctttcaggtgctgtctgttcttcgttttttttttaccgatcttttgttgattgagctatgtcgaatttattcgccttactaattgctcctcccatttttggctgagcaaatgtgtttgaaaaccacttagcactgatgataattttcattaatgttccatcattgtgtgaagtgtaatttatttaagtttggcgctaattttgctacataatttaatcgtgtgctggaatttggcggaatttaaagggctattagtatcgaatttacgttggatgaatcaaccaaagtcttttttgaatatgttttagtcggctgttaaaaaattgtattttgctacttgtaactaggtctaaactatagtaagctttaagttaagctcgctaataccatttacacatcattttagtatagctccacatatttgcgggtctcttattttgaaataaattaatatctcagacatttcctaatcaatttatccattgaggaatcccaaaccaaatatgtatctcatttatccgcaaaagatctttaagatcgtttaaggccctcgcattgttagcacccacttgataagaattgtgtacaatattgaatgggaaaaggctgtgctgacgatatgtataaaactcaagcagcttgttaaacaatgaacaatttctattcgaaaagcgaaacatttaccgattatgttgctctcactatttccatttccatttccattttcacataaacaagatcaaagtgcgctggcagcctgcaggctttataagaagtcttcgtccccagatatacaaaaacagcaggaagtacggcaaatacccaaaacaatccggactattttgttgtcgatttcaaaaatcgaattgttttcgtcaagagccaaaggcgcggaacatttggccgcaggaatattgcacaatatggctgcagatcaactaataattcaaataaaaacgtgaaatttattggggctgcgccttaggttctcactctttgtgtttccaggaatgttcatttcccatttggctaaattccatttcacgattttctctgcaaatctcaacatggctaataattatagtccataattgaaaaacagagcgaaatagctaaggaattttgatgggcaaatggcgaagccacctcatcaactcgtttgatcgttccctgagatcctgcatatttccatggaaagaatgcagaatgattgacaaatcgcaatatctgattagctttgatcagttttattggcgctgcaagtgcacacaacatacggggagattgaaatagtgcagatgatagatcgtatctacaagatagagtcatgggtataaaatattattttgataagtggtacgttgttggaactagaagaggttcactgcgaacgaatgatgtttcaatagctttctgtatggagctgattccttttaagtttaaaagtatcttaaaaatacacttaggtacctataatccatgtaatacggatcagtaccaatatagttcatattaatttaaggcatcccttacagagattaaatgttttccttctatcaactcggtttgctcatgatgttccaaatgccgtgcacttaatggtaattttgaatgatttactttcaaatggacattttttttgtaaaacctgctcggattcaaaggatgttcccttttgagtatagtgcatccttaccgtgttctgctgcccgaattggcgtcggtctgagcactgatttgtaatccatataggggccagggaacagcttatccagacccacgaaggggtacgtgtgcgatgaagtgggtgtgaaagtgggcggaagcgtggcatgtccaaacctacgggattcggcattcgcctggctgaagcagtgggggaaggagcagcaggctagaatgctgccatcgcagcatgacttggtcgagggcgaggaggagctctgccggtgggattcctcgggttccgagcccaacagacgatccacactgaagctcagcttgactttggtggtgctcgtggcgctggttggcgacgtactgactatggtagtcgaggcacaggattctttggtgggcagctcatgatcgacattcactggatcgggacactttgccagcgttggattcacttcacactcgccgtacatgtgagtgctgaggttctcgggcatactctgttccatgctggcggcactctcgtgtagtaacattgtccggatatgtgttgtatatggtttctatctacgaatctcgacacaggacactcaaaactgatttcacacgttcacaatcgatagggactatctatcatgtccaaaacaccgtcgctgtgcaccaataaaacgatcgcgaattttggcttaggtctcgtgcacctccgattaaaccgccttgcaagacatcccactcagaactgatcggaaccggccagggagcacgctcaaccagccatcgattgccgatcggccagccaacgcggaacagtctgttggcggtggggttaatctcgctgagattgtgtattcctggtgctgacagtggggcaaggagtgcgagatgatcaggatataatgctaacaataaataatggctatatgttcgatatacaggatatacaaaccaggatatttttttatccaacgtgtatattgtttataaagtaatactcaagaagagtaatactatcaagaaagattagatttttgggcttcggttggtggtaacattggtttctattccgctgaagatctatatacctctagaaagtgccctaaaattatgttaatccacttaccatagacctgatcccactgtagccacacacagatgggataccttgccatgccgatcgcttgtttacacacaagcatgccgctgtgtcattagctcagtcggagatcgtttcctcgagcgcagccgagatttgtttaccgatttctccatatgttcccgtactcccacacacagacacacacaccccatccgaattccggtttccctgcgcagaggccatgtcgagtggctcgtggttcgtgatttctggccaatgcgatcgatccgcagtggtgggcggagccactggtggcgctgatgcggcatctcgctttcgcgcccaaggaatgtgccttccattggcttgggattgagcgatctgcgcgaactccacctgctccacgctgtctgggttcaatgaagtgggtaaccgggactggtggtcataaatcagaaaccgcattccacaagcggaaatccgcaaaacggaacacgaacggatcgtcggggttggaaaacttaagtagaaatgtgtaaattgcggagcgaaactggcgttattaataggaaaattgtcgtgactaccttaagatagcatactttccggcacaaaactcccatccaagcgggcggatttggtgcc

SEQ ID NO: 19517 - DNA, 1662 bp, DROSOPHILA
agttctgagtgggatgtcttgcaaggcggtttaatcggaggtgcacgagacctaagccaaaattcgcgatcgttttattggtgcacagcgacggtgttttggacatgatagatagtccctatcgattgtgaacgtgtgaaatcagttttgagtgtcctgtgtcgagattcgtagatagaaaccatatacaacacatatccggacaatgttactacacgagagtgccgccagcatggaacagagtatgcccgagaacctcagcactcacatgtacggcgagtgtgaagtgaatccaacgctggcaaagtgtcccgatccagtgaatgtcgatcatgagctgcccaccaaagaatcctgtgcctcgactaccatagtcagtacgtcgccaaccagcgccacgagcaccaccaaagtcaagctgagcttcagtgtggatcgtctgttgggctcggaacccgaggaatcccaccggcagagctcctcctcgccctcgaccaagtcatgctgcgatggcagcattctagcctgctgctccttcccccactgcttcagccaggcgaatgccgaatcccgtaggtttggacatgccacgcttccgcccactttcacacccacttcatcgcacacgtaccccttcgtgggtctggataagctgttccctggcccctatatggattacaaatcagtgctcagaccgacgccaattcgggcagcagaacacgccgcacccacttatcccacgctggctaccaatgcgctcctccgcttccatcaacatcagaagcagcagcaccagcagcatcatcatcatcagcaccatcccaaacacctccatcagcagcacaagcccccgccacacaactcgacgacagcctcggcgctactggcgccgctccacagcctcacgagcctccagctgacgcaacagcagcagcgatttctgggcaagacgccgcagcagctcctggacatagcgcccacctcgcccgccgccgccgccgctgccacatcccagaacggtgcacatggacatggaggtggcaatggccagggcaacgcctcagccggaagcaatgggaagcgcaagcgatcctggtctcgcgccgtcttctcgaatctgcagcgcaagggcctggagattcagttccagcagcagaagtacatcaccaagccagatcgccgcaagctggcggcacgactgaatctcaccgacgctcaggtcaaggtgtggttccagaaccgtcgcatgaagtggcggcacacgcgcgagaatctgaagagtggccaggagaagcagccgagtgcagtacccgaatccggaggtgtcttcaagacatccacgccatccggtgatggtacgccccaggaggcactcgactacagttccgatagctgctccagtgtggatttgagcgagcaggccgacgaagatgataatattgaaatcaatgtggtggagtagagccgcctatgtagatagctccgtttacacgtgtaaaatgccatgtagatgtatttattccttcattgctagttgtaatgtaatgtaaagtagacagatactgcacaaagtgaacttaaattatttcaatctgtaagataatctaaacgtttatgtgtaaactatttaaaataaattctctagtaaaatgaacttgtgaa

SEQ ID NO: 19518 - protein, 409 aa, DROSOPHILA
MEQSMPENLSTHMYGECEVNPTLAKCPDPVNVDHELPTKESCASTTIVSTSPTSATSTTKVKLSFSVDRLLGSEPEESHRQSSSSPSTKSCCDGSILACCSFPHCFSQANAESRRFGHATLPPTFTPTSSHTYPFVGLDKLFPGPYMDYKSVLRPTPIRAAEHAAPTYPTLATNALLRFHQHQKQQHQQHHHHQHHPKHLHQQHKPPPHNSTTASALLAPLHSLTSLQLTQQQQRFLGKTPQQLLDIAPTSPAAAAAATSQNGAHGHGGGNGQGNASAGSNGKRKRSWSRAVFSNLQRKGLEIQFQQQKYITKPDRRKLAARLNLTDAQVKVWFQNRRMKWRHTRENLKSGQEKQPSAVPESGGVFKTSTPSGDGTPQEALDYSSDSCSSVDLSEQADEDDNIEINVVE

SEQ ID NO: 19519 - DNA, 3007 bp, DROSOPHILA
acaagccgctgacagatggagcgtcataaaagcggcaacaacaatgcgccgcagaatgtctgaggttaggaatagcggcaaagtggtggggcggaaatgggaaatggaaaagccgagacaagaccaaccaaccaaccaaccaaccaaccgaccgaccgaccaagcgagcgaaaagggagtgtaaagcggtgacggggatttgaatttgtcacgtggccggcaaacgcacctgggcacaaaggggcggacaaggacacaacatgcaattatacgcaatcaacataaatcattcaaattgccacgcacacacacacactcgcagaagagggaaaaataatggtaaagaaaagtcgagacgcacttcaaaagggggcggctgtcggtgtgggcgtggtgaccgttgacgttggcttttggctaatttgcaattgaaatgcccaaattctgtgggctggccgcattacgcatacgccgtgtggtgtctgcgtggcaaaggctccttaaacttccgctcagtccattcatcttccacccccgcattccgagtcgactgacaaatgccacaggggcacgtgaagcggccagtgaccaaggtaaatggcacccatactgtccatagagatttctttataaatttcctttattttattattatttttttttattttttgcaattaattacggaataaccttgcagattcgtatactatttctagtaattgctgccttcggaaaaatcacttaacgccaggaacttaaaatttagagcagggaatgtagcaagaaaaaacaatcgacgttatattgccaatgccacgtatttggcgaatactgaattcctagattttgccaacagtgccaaagttcaaatgacagttgccatggtccagcttataaaccgtacaagccaaacggagctaatcaagaatccatcaaaaccatcgtccatgtgcggtacactgcaatcgcttcaacgaagaatctggtttatgcatcaccatcagtcgaacagaacgtccatcggtatgccataaatctcggccagctgcagtttggtgtaggcaacaacgccgctgggacagtaggccatcgcctcctccagagtgacccacttggagcttgactcaccggcacataccacatgcagatagacgataccatcgaacatctcatggctgatgatgcccatcaggttgctgggggtgccgctactgacgtttccggcggtgttgccactaccgttaccatcaccgttaccgttaccgtttccgcttccgcttccgtttccgccaatgatgttgccgctctggctcccagcgctgctcattccatcgccgttgccaccgtcgctgccgccaccgctgccgccacccacgctgctaccgctggcattggcgttcgaagaggtggacggattcagattgatgaccatcctggaagggcagcggttcgggatatctatgaggcaaatatcgaatgcagccaattaactgagtgtatttataattatttggatctagtaagccgaaaagtatttcttatatatatttaacaacaatacttatattataagtgataattaactcacctgaatataaaactatcaaaagtggaaaagaaatcggattggaagcagttatcaaagtggctcaatactgaagcttcgttgctggttgctacctttggccttctggacgggatggtccgtggttggattctcggttagtccttcggaaaccgtaaactttgaactttgaacctacgaattttgtactttgctcggtgcgatccaatgagactctggtgcagtgatgtgctgcttagggatctgttatacacttctcgacgttcaagtcgcacgcgattctagtgcaactctctaattagctagatacaataccaagttatgatttttgtttcgctgtttgattcttttttttttcgattttcctctattttttttcacttttgtttaaacggtgtgtgtgtattttgtgtcgattgtgtgtgttgactacctagatgattttaacttatgaaatgagccatgacattaatctggcattcttttcaaagccagctggtacattttgtttcgacgatgaaatgagagacacaaatatcgcgaatattcaagattttggtaaattaataattcttatggctatttcattaattcatgacactgcacattctaagttagactttaaagtaagtgcagtaagtgtactatttaagtgcaaaaaggcaaacaaagttttcaaggatttttttttttagtgttttcctcagaaaatccccataccattcacaattttttgacatcgcccggcaacacgggtgtttatgaatgtgccatataatgttttgcttctgccagcagcaccaaatgaactgaacaaataaaactttcacggcaaagttgttgacacggcagcctcctcctcttccgatttgcagctgcaattcctcaccttcatgttcacgcttagctctttatttacgattgcaggtgcaatgcgggaaaagtgcaggaaaagtatgggaaaagtgtgggaaaagtgtgggaaaagtgcgggtgtgggcgagaggaaaagcaaagtaaaagcaccagagctgagtttaagtcgcgggagcaggggtcccaaagcaattaaatcgcattcgccgtgtggaaagcaaataggattccgggtggggctttgaatgtggagtccggacagagacaaacaatcaaacggaaattaattgcggtatgtgtgaaaagtgaaagccaaaagctgttcggtaaatgattgtcgagcagcgagttttaccccggtttccccacgacgactttaattcttaaaccctgattgatagctaacctcgtcctggagcaatgacttctgctctccagctcttcagaatcgaaatgaaaccaagatagtatgctgacatccgaaaagaagtaaatttttaccactgcatagccacacaaagcgaaaacttttacacagcaaccatg

SEQ ID NO: 19520 - DNA, 877 bp, DROSOPHILA
acacaatcgacacaaaatacacacacaccgtttaaacaaaagtgaaaaaaaatagaggaaaatcgaaaaaaaaaagaatcaaacagcgaaacaaaaatcataacttggtattgtatctagctaattagagagttgcactagaatcgcgtgcgacttgaacgtcgagaagtgtataacagatccctaagcagcacatcactgcaccagagtctcattggatcgcaccgagcaaagtacaaaattcgtaggttcaaagttcaaagtttacggtttccgaaggactaaccgagaatccaaccacggaccatcccgtccagaaggccaaaggtagcaaccagcaacgaagcttcagtattgagccactttgataactgcttccaatccgatttcttttccacttttgatagttttatattcagatatcccgaaccgctgcccttccaggatggtcatcaatctgaatccgtccacctcttcgaacgccaatgccagcggtagcagcgtgggtggcggcagcggtggcggcagcgacggtggcaacggcgatggaatgagcagcgctgggagccagagcggcaacatcattggcggaaacggaagcggaagcggaaacggtaacggtaacggtgatggtaacggtagtggcaacaccgccggaaacgtcagtagcggcacccccagcaacctgatgggcatcatcagccatgagatgttcgatggtatcgtctatctgcatgtggtatgtgccggtgagtcaagctccaagtgggtcactctggaggaggcgatggcctactgtcccagcggcgttgttgcctacaccaaactgcagctggccgagatttatggcataccgatggacgttctgttcgactga

SEQ ID NO: 19521 - protein, 143 aa, DROSOPHILA
MVINLNPSTSSNANASGSSVGGGSGGGSDGGNGDGMSSAGSQSGNIIGGNGSGSGNGNGNGDGNGSGNTAGNVSSGTPSNLMGIISHEMFDGIVYLHVVCAGESSSKWVTLEEAMAYCPSGVVAYTKLQLAEIYGIPMDVLFD

SEQ ID NO: 19522 - DNA, 3160 bp, DROSOPHILA
acactttattatgttcgaggcgcataaatcgttccatcacccggacatggtcccgaggaggtccccaagtcccccactcatccagttccctagttccccgagttcccaagttaccaagttccagagtgtctgcgttcgggccaacgttggcgattatgatttatcgcattttaatcaatttaaaatgtttaaacgatacgaatcggaagaaattatgaatgtgttgctgtctccaggctccacagtaggccaccaataacaacagccacataacccacaccaaactgatacccatatacccatgcccatacctctacccctacccatgagagccatgcccgacgaatacccgattcgaggacccagcgatcatcgtcagcaagcgttatccgacgcgtacctcgtttgtaagtctccaccacatctcgtgttacctacggtctcgatcgcctcgcagacctacgcgctacatattagtcagagatcagggacggattcgaaagtgggttcttccactaactggtcaaaagtaacaccactctggattaaagggcagaggtacatttctatggtcaccaagtaagattatgttaatttattatgcctttaaatatcggaaaggcattttttcaataatatattataataatgtataatgtaaaagtatttttaagtcaaagaacttaatggtggaagaccaaatttcatcccaccaattgccttggtatgaacacagcgccatagaaccggacctggattaagccagcaatacctttcgcggatcggggatgagggatgatcgcgtgctgcgcggactgggcgactgagttgcagagtgcgtttcgggcgcgacgacggcgcagcgacgattatgattaaagatgataagcgaaatatttttatcatttctcaaattaacataaaccatatgtgattatcacacaataagcgcagttggtctgttggacgagctccaatccccccattccacacgctggccttttttgttgctcgctttttataagcttttatgcccctcactgcggtcgggataagttatggcattgctgtgggatttggtcgtggcgttggtcaggattcggtcgcggcagtgtcaatggcatcggcgaatttatgaggatttatctgcggtcggaccgttggatcctggatcttgcattcggggtcgttctggtgtcataaagaagttttattcgatgcttaacctatgcgtacggactaaaatggtttgaagcggcgcgactgcttgagcagcccgatctttcgcttttcctcctcgaacttcttgcgcatctcgacgatattctgcatcttgctctcgcgtatttggaaggtgtagaagttctttagctccttggtcttattgcccttggccaccttctcctccaggcgtccaattacggacgccttctgctcgaagccagcattgcgaccctccttgccgacggtgacccatccgtcggcgtcggcctctccggtcttggccgcctgtgccgccgctcgctccctcttgtcgtagccggccatgtacttgctgatctgtagcttcgtcttttgcgcatccagcaggtaattgcagtcgtactcctcgtgccacagctccatgccggtcttgacgatgcactcgccgctgctgttgaacaggtcaatgctctttagtgccagcgccttgccgatgctgctgttcttctcgaacactatgtaggccaccttgaagacgaagggcggacgagtgttggagaagggttcgccggtgccctcgtaccacttgatggtctcctccttgcccggtttggcggcgaactccacggcctcgatgctccccgcccggccgaagaccgtgcgcaggctgtcctctgtcacgtagggcggcacgttgagcagaaagagtgtgcgtcccttcggtttgttgggatccatcagacggatgaagtgctcccgcatgtagatactgtggcaatgttgcgccttcggcgtcgtgcgcagcggcaccactgaaagtagcgctcggttagcagcagcattggcaagatgtctttgattacttacctacatagccctccagttcaaccattttgtgtaattcgcggtaaattaactaaacaacgttttgtaaacacgttgtgtgccagtgtgaccgtttttgaattataccaaaacgttactgcaaggggtgcgaaacttgagtagaatgtaaaatacattggcagcactgtcaaagggcgggaaacttaaaattaaaagaatttattaaaacattctttatttgcaatgttaacataacaagctttaaaataatgcaccatattatggtacataaaagtattgtcatttaagcaaaaactagcaataaaggtgtgagaaagattagttttgagtttttattcttttggcttaaatgccactaatattcttaactttcagaacacttttttatttataccaactgcaaataattaagcaacattagttgtggaaagggaacgggaacggaatgccgcatcagtttggtagaatccaaatgtttttgtaaactttgcacgtaatttagcattcgtctgattttgttttgcactatgtgtcctcctcagtttcccctaaacgtgaatgtgtgtggatgtgggtggggacgtacccgtcaaatggtccgagaacaaaaactgcacaccacaaactgcatccggtctgccgaccacgtatcccccatgcactgatgaaaaactatataaattatgcctacatttaatacaaaaagcagaacgacccaatgcaactatatattatgtggatgtgtcctttgattgcgtaataaaataaaaattaaattcaaagagcaaaactagttttgatttgaaaatactacgttttttgatcagtgcacccacgtagcatctaaaggccgcaggcagcgtttatttaatggccgcatgttgaaaacggaagttgtcgaggcacatttactgcccagtatcctctgctccgcaaatagatgctaattaatcgaaaaattaattttaacagccacctttcatcgcataaaggttctctgtgacataaagtcagacaattgaagttcaaaaagtcggaccttttgtgttttggctgtcgaaatgcaaatcgaaatcaaataatcaaaatt

SEQ ID NO: 19523 - DNA, 1105 bp, DROSOPHILA
ggtcacactggcacacaacgtgtttacaaaacgttgtttagttaatttaccgcgaattacacaaaatggttgaactggagggctatgtagtggtgccgctgcgcacgacgccgaaggcgcaacattgccacagtatctacatgcgggagcacttcatccgtctgatggatcccaacaaaccgaagggacgcacactctttctgctcaacgtgccgccctacgtgacagaggacagcctgcgcacggtcttcggccgggcggggagcatcgaggccgtggagttcgccgccaaaccgggcaaggaggagaccatcaagtggtacgagggcaccggcgaacccttctccaacactcgtccgcccttcgtcttcaaggtggcctacatagtgttcgagaagaacagcagcatcggcaaggcgctggcactaaagagcattgacctgttcaacagcagcggcgagtgcatcgtcaagaccggcatggagctgtggcacgaggagtacgactgcaattacctgctggatgcgcaaaagacgaagctacagatcagcaagtacatggccggctacgacaagagggagcgagcggcggcacaggcggccaagaccggagaggccgacgccgacggatgggtcaccgtcggcaaggagggtcgcaatgctggcttcgagcagaaggcgtccgtaattggacgcctggaggagaaggtggccaagggcaataagaccaaggagctaaagaacttctacaccttccaaatacgcgagagcaagatgcagaatatcgtcgagatgcgcaagaagttcgaggaggaaaagcgaaagatcgggctgctcaagcagtcgcgccgcttcaaaccattttagtccgtacgcataggttaagcatcgaataaaacttctttatgacaccagaacgaccccgaatgcaagatccaggatccaacggtccgaccgcagataaatcctcataaattcgccgatgccattgacactgccgcgaccgaatcctgaccaacgccacgaccaaatcccacagcaatgccataacttatcccgaccgcagtgaggggcataaaagcttataaaaagcgagcaacaaaaaa

SEQ ID NO: 19524 - protein, 241 aa, DROSOPHILA
MREHFIRLMDPNKPKGRTLFLLNVPPYVTEDSLRTVFGRAGSIEAVEFAAKPGKEETIKWYEGTGEPFSNTRPPFVFKVAYIVFEKNSSIGKALALKSIDLFNSSGECIVKTGMELWHEEYDCNYLLDAQKTKLQISKYMAGYDKRERAAAQAAKTGEADADGWVTVGKEGRNAGFEQKASVIGRLEEKVAKGNKTKELKNFYTFQIRESKMQNIVEMRKKFEEEKRKIGLLKQSRRFKPF

SEQ ID NO: 19525 - DNA, 4700 bp, DROSOPHILA
cagaaaagctgaatgctatggcatcgcatgcggacaaaagctgtctggcatgcgtgagttttcaattttcaatttacgtaagatttccgctttaatttcctattaattaagctaattctcttagtttgaatataagtacctcttagaatcggatttttttttttttgcattttcgtatctttggtgttttttggttacagtttgacatttactagtggtttctctatagtatttcttcatattttcttggtgtcttcgattacgatcgtttgcatttcggttaataattaataattcgtatttgcttgtatattatgagtatgagaataaggtctcggcggttgttggtgttgtctttcgtcttcaacttttcgtattcggttattaaaataagtacattccggatggcttaactgagaatcgctagagatttgaaaacaactattgagtggctccacaaaaaaatagggtaatcaagttttcgaaatctccaattgtggaattataaagtttacaatattgctgttgaattcctggggacttttgcatttcggtgggggaattagttcccatttcctatattttagacctcagctggtaattgttttaaaatatccattgatttcagaaaaacctccagtattcgattattttttgttcttaatcaagcctttggcagtttcttatttgcatagtaagtggtgttctagcttttcgtctgatttagagggagatagctatagcttgagatggctactatgggcaaatttggttgtaagtatttcttggggcactttgaggtaacgcataatcaatcgatcgattaacaaacaatcacataaaaagtacttcaaaatcgagagaacacgcgacacagtggcagattaatcaaatgagtaacaacgaatgagtaccgaataagtacctagttcatctggtaattcccctacacaaggaccttctagcccactgcgatgacggggaatccccgcagcgtatctcaacgtttcaccccgaacagattcggtatggacttgatcttcttgcgcgagcagttcagataatccttatacatatcggatcgcaggtacctggagtacgagtcgctcttcatcaggtgatatacatgcgaggcggccacatcgaagcaccaacgattggggccacttggcgagttgaccgcctcgcgggccagctccaccgacttggagtccacgttgaccggacagggcgcctcgggggcgaggaactcctgccatatcttctggatcgcctccttgatctccgactgcggcagcgccttcatctcctgcaccgattcccagaatctgcgggaagtgaagaagatagatgtttaataatcaaagcgcatttaaataatttttgaggaagagtttaagttgctggcttaatgatttcttatttccctatatagccaacgattatggtaggcactcacttgagattttcgccgctgtactccttctccaagaacttggtgaactgctcgcgtccaatggcatcgttcagtaactcccgcaaactgaatgcccagcgcttcacgcgccgcacaggaacttctttgctgttggattgaatagtaatttagttattaattaaacgaattattttttattttaacaattttagttacttacctatttttctccgtatcccacatctcggtgctgtctgtttgccaaggattcggcagctcgggcgaggttataaagtaatcgaactcattgtactgatcgtagtaggcaaccaaactgcgaaaaaaaatgtaaattttaatgtaattaattaatatttgtatgtataaatagatttcttacgcctcggccgcctttgacactttgattgtgcgacgctcgagcttctgtttgcgcagcgcgataatccgcgtcagttgctcgacgggattcttggccagggaggcgccggcggatccggttccatggctggaaccaccgcgtctgtaggccttctttatgtcaatctcggtggtgttgacgcagccgggcattggccggtggacatcccagaaggcccgctcctgcgagtccagcaccttccgctccagcttatcccgcttcttggccactttgctctgcgattcggcctggaaatatgaaatcatatgaaaatcatcagaattaaatcattcatattataaaagagtatccaaaagatagttatttgtgaaatatgatttctgttaacggtctcacctgcatgaatataaactcccactttctggagaacatcttctgcagcttggccagattctcggcctcgtagtcggccaactccagacgcgtcttattctgcatggtgcgcttgcaaaggtagacggcatagtccgtattctcgggctcccagcaattcgagggccaaaagtagggcgtctggaatctgtgcgagaattgcttatatatatatctggatgccaagatgctaagagacagttaacgctcacctgtagaaggtgccgtcatttttgacggtcagcgcatgatcatcgatgggaaatatgtacccatgcgagctgagcaggtgggcaaagtgcagggcctccgtcacgtcctccacgtcgaagttcttgagaatccaggcgaccagatccgcacccgtgaacaccgatggcaccttgctcatgaacgccttcaccgtgcgcaccgccacgcccgtcgactccgcctgcatcttctcgatgatggcctccatctgggaatggaatcgatttaattagctccaattagcggcacaactgactggcaatcaataagctggcatgtgcataataaagataatgaaccactccaaagacagaaagtgaaatgcaattatctagcgaatgcaaatttgcaaggcattgttcaaggtaacaatcaaaggtttacacatacatatgtatatgcattaaagtataaagttgaaatgaaatgataactttggctaagtaagtatgggtaaggctcaataacgtttggtagaaaatagtagaaataagtaatgcaagtaatgcaattgcagtgtaaataattacctttttgtacactaggatattgggtgcatcctcgttctttccgccgcgttggtggtgcgacgccgatggaaccgctaaggcggttgcggtgggcggctggggcggctgggcggccgattgacccgccgccgactgctgtgggtgggcgtggtggtggtgatggtggttcccgctgacggtcagcagtccgccgctagagccgctctgcttgctgcccgccgccgccgtcgacgaggatgtggccgaagaggaggatgtggtggtggccgctgccgtcttggctccaacaacgctggctgtcgatgtggatgcagtggttgggttgcttgctggcggggatgccgatgttgtgcctgctgctgctggagcacttgctgctgtggctactgctcctgttcctgttgctgccggtgagaccgatgacccagtgccattgttactgccattggccagtggtgttggcgatggcgtggctgtgccgggtgctgctcctcctgcacctccaccaacgacggcggtggcggattgtggctccggaatggccaccgccagcggatcgctgctgttgctgctggtgcagtccgttttggccggcgccgcggtgctgctggcattggtggcttgtgttttgtccgcctccgagttcatcgttaccattttctcgaacggctgcgctccagggatatttggtttccagagctgtggctatttttaaacgcttggtgcagaggggcgcgggtgccggctgctcgtcgaggggggcgtgggggcttgttcctgctgctgctcctttcgcaaaagtgggtggtgttttcccaggtctcctgtgtgcgtgtgcgtgtgtgtgtgtggcgggtgtgtgtgtgcgaatcaatttgatggcttaaatagattttattcagcttgtaggtgtcattttgccttttctaatgccatttttggtcgctttttccacctctggctcctccttgatgtgcacttcgtttttgctactttttttttcttccgtttccttttttcctgtatgctggaaattcacaggagttatggcacacacacacacacacgcacacaaggtgttggattgtttattacagtgctccagcagctttccagttaatgtttttaatttatggatttttagaattttttaaatttagttttggttttatttttagcagcgatttttccaagttttcgcttgctgtcgctgttgctccttttgccctctctctctctctctccctctcgctcgcacgtcctctctcgctctcgcgcgaagtgttttttagcttttagcccgtaatcattttacggcccaaagtcaatcggctccttagagcttcctgctgatagtccttcatcgatttttcgtccttcctaccccagaaactctctctcgactcgctcttttcgctctcttttcgtcctgcggctgcgccaataccgttgtttacatccagccagctgttatttatcgataacaagtccccgatatcatatcgataattgcatatccttagcttttaacttttaagctaaaggggtgagtattgaaacatgtagttgtaaatatcaatttttattacgcgtttttattatagcgtttattattaatctgaaattaggttttatataaagaaaacaa

SEQ ID NO: 19526 - DNA, 1935 bp, DROSOPHILA
atgaactcggaggcggacaaaacacaagccaccaatgccagcagcaccgcggcgccggccaaaacggactgcaccagcagcaacagcagcgatccgctggcggtggccattccggagccacaatccgccaccgccgtcgttggtggaggtgcaggaggagcagcacccggcacagccacgccatcgccaacaccactggccaatggcagtaacaatggcactgggtcatcggtctcaccggcagcaacaggaacaggagcagtagccacagcagcaagtgctccagcagcagcaggcacaacatcggcatccccgccagcaagcaacccaaccactgcatccacatcgacagccagcgttgttggagccaagacggcagcggccaccaccacatcctcctcttcggccacatcctcgtcgacggcggcggcgggcagcaagcagagcggctctagcggcggactgctgaccgtcagcgggaaccaccatcaccaccaccacgcccacccacagcagtcggcggcgggtcaatcggccgcccagccgccccagccgcccaccgcaaccgccttagcggttccatcggcgtcgcaccaccaacgcggcggaaagaacgaggatgcacccaatatcctagtgtacaaaaagatggaggccatcatcgagaagatgcaggcggagtcgacgggcgtggcggtgcgcacggtgaaggcgttcatgagcaaggtgccatcggtgttcacgggtgcggatctggtcgcctggattctcaagaacttcgacgtggaggacgtgacggaggccctgcactttgcccacctgctcagctcgcatgggtacatatttcccatcgatgatcatgcgctgaccgtcaaaaatgacggcaccttctacagattccagacgccctacttttggccctcgaattgctgggagcccgagaatacggactatgccgtctacctttgcaagcgcaccatgcagaataagacgcgtctggagttggccgactacgaggccgagaatctggccaagctgcagaagatgttctccagaaagtgggagtttatattcatgcaggccgaatcgcagagcaaagtggccaagaagcgggataagctggagcggaaggtgctggactcgcaggagcgggccttctgggatgtccaccggccaatgcccggctgcgtcaacaccaccgagattgacataaagaaggcctacagacgcggtggttccagccatggaaccggatccgccggcgcctccctggccaagaatcccgtcgagcaactgacgcggattatcgcgctgcgcaaacagaagctcgagcgtcgcacaatcaaagtgtcaaaggcggccgaggctttggttgcctactacgatcagtacaatgagttcgattactttataacctcgcccgagctgccgaatccttggcaaacagacagcaccgagatgtgggatacggagaaaaatagcaaagaagttcctgtgcggcgcgtgaagcgctgggcattcagtttgcgggagttactgaacgatgccattggacgcgagcagttcaccaagttcttggagaaggagtacagcggcgaaaatctcaaattctgggaatcggtgcaggagatgaaggcgctgccgcagtcggagatcaaggaggcgatccagaagatatggcaggagttcctcgcccccgaggcgccctgtccggtcaacgtggactccaagtcggtggagctggcccgcgaggcggtcaactcgccaagtggccccaatcgttggtgcttcgatgtggccgcctcgcatgtatatcacctgatgaagagcgactcgtactccaggtacctgcgatccgatatgtataaggattatctgaactgctcgcgcaagaagatcaagtccataccgaatctgttcggggtgaaacgttga

SEQ ID NO: 19527 - protein, 644 aa, DROSOPHILA
MNSEADKTQATNASSTAAPAKTDCTSSNSSDPLAVAIPEPQSATAVVGGGAGGAAPGTATPSPTPLANGSNNGTGSSVSPAATGTGAVATAASAPAAAGTTSASPPASNPTTASTSTASVVGAKTAAATTTSSSSATSSSTAAAGSKQSGSSGGLLTVSGNHHHHHHAHPQQSAAGQSAAQPPQPPTATALAVPSASHHQRGGKNEDAPNILVYKKMEAIIEKMQAESTGVAVRTVKAFMSKVPSVFTGADLVAWILKNFDVEDVTEALHFAHLLSSHGYIFPIDDHALTVKNDGTFYRFQTPYFWPSNCWEPENTDYAVYLCKRTMQNKTRLELADYEAENLAKLQKMFSRKWEFIFMQAESQSKVAKKRDKLERKVLDSQERAFWDVHRPMPGCVNTTEIDIKKAYRRGGSSHGTGSAGASLAKNPVEQLTRIIALRKQKLERRTIKVSKAAEALVAYYDQYNEFDYFITSPELPNPWQTDSTEMWDTEKNSKEVPVRRVKRWAFSLRELLNDAIGREQFTKFLEKEYSGENLKFWESVQEMKALPQSEIKEAIQKIWQEFLAPEAPCPVNVDSKSVELAREAVNSPSGPNRWCFDVAASHVYHLMKSDSYSRYLRSDMYKDYLNCSRKKIKSIPNLFGVKR

SEQ ID NO: 19528 - DNA, 4238 bp, DROSOPHILA
gggagttcgtcaacctacaggatcgctgtcgggcggtgatcatgcgccgcgtacgaagcgctgcgcagctggagaagctgaagctgccgctgcccatcgccgactatctgagcgaggtgatcgacgagaagaagccactgcgtcaggtagacaactacgatatactgtgtgatttgtagagctcggatcgtgtccggtcaacgtaagctaagtttatagagtacgtcctcgcccccaggtgaatcagctggagatgtgcattatgaattacgatttgtatgaggcccgtgaatgattttagtgccatcacatattggagtgcccaatgactaccagacgatgcagtggctcctctgggacgtgtgcatttctcgtagtagctttagagcgtgctaagtttaagcattcggaatttgtgtggataatagtcgtccgaccttttgatttgtcttcatttgtagcgaaaatgtgggaaaataggccaatttggtgcaatatttgtgatataagaaatgagaaaaacgtttttcggggcttcaagtgcttgctagaaaatcgcaaaataatctagagctaagcatatttttcggtacagacgagtgtgaaatctagtcaaaaagaacacgctgctaaactaattttgtaaattcgcagacagcaattaaggcctaagtactgtaatgtaacaaaatgaaaatgtgtctagtcataaattgcatataaagcaaagtgtaatttagtaaaaattatttagtacgctttatgtagatttttgtttctgtttatataaattactacacataatgtaattgatacatgacgaaacaaacgaaatagtattgaaaattaaattcgtaagaagtgctcaaaagaatttggcgatattgatttgcaattgtcacttgaatttacataaataaacataaatttactaactatttaaacgaaatacaatactaagcacaggttcactatagcacgatggggctttgaatggcatctagagctcgtcggagagatggttaatgttttgtaaatggtcgccgtagtcggtggcctcactgcccacaaaggtatcgtagttgttgagtatttccaggtaggacaggcgatcgtcgtgatcctcatcggtggagacaaagagatggtccacctcgtcgttggcaattgccgtattgcttggcacaatccaggataagacctcatcgcccgtcagcacgccatcgccattggagtcgtgatccttgtcgaagcgctccttctccgtgatcagccactccttgtcgtggtgcgaggctgcgtcgccgacaaactcctggaagttgatcttgccatcgtgatccgcatctttgtcctgcatcgtgtgctccagcagtattggcaacatttgtggatgctcctcgggattttggaataaaacgaattcctccagcgtcagcacaccatccttgttcgtgtcggccgcattgaacatctccttgtcctgcttgatcatcttctgctcatcctcgtagctgtcgtagtcgatggtctccttcttgaagtcctcatcctccatggcgtatgtgtcctggagatactccttccacgtaattctctcgtccgcatcctggtctatttcttcaaatcgatcagcggcttcttcctccgacagttttctgcaagttgtattatgtattttagtaaaagcttcaaatagtctatgcgttttcagtttaggcaagcatttagacaaagcattaggttgctgaggtgattattggcttggctaacattgatgcagtattaatcaacagacaacactcacttaaaggaccttaatatccaggctttcaactcatgccggtcaataaattcgtccttattcagatccatcattttgatcaatatcaacagtcgtcgcttcgattcgtctggcgaaagtgagtcgaattcctgagcctctttcgtgttgccttttttgtggttaaagagtaataatagcacacacatacattagcatttaaaactgaatggaacataaaacagcagcaatgccattgacgtattgcttttagaaaacaattttaatgatttcactataaaactatacaaacttatatacttcaataatacattttcttacagcatattccaattcattagtaaactatatttcgaccttcaagcaatatttttgagcataaatgggtatgtgtattgactgatccgtattctcttgatgcttgaatgagtctttccgtgtgcagacccacaaaaataaacctcaggcaagtaaacaaacatatggcatacaccatagcatacacaaaaaaaaagtatgagtccttttcataactaaaataatacaaaattatggtcaatactcataatttcattgggttggaaagtatccttaaaataaacttttatatttctacaaattaacaactgaaactggaaattctattgttgttctggcaaaaaaacgtgattatattttatttgcttttcaggaaatgagcactacttttatgaccttcattgtaaggagtctttttcgctcttttcaaagtgattttctcaaactgaatatgatctgctttctctgctaactagcgctgactcaccgatgatggcctcgtgatcgaactccacgttgtgctccccatcctcgccgtggtggtgggcatcccggggagcgtagatgccgtccttgacccgctccttgctaaggtgcttctcgtgcttgtgactgttggccaccgccccatgggcgggcatgggacccacggcggccagcaaggcgacggcacagagggtcagcgggaggagcggcagattcctaggcattttaattgattatgccaagcggcgtgttctttggtctttgttttctctttttttttggcagcttcccgagttctcgagtggatgggggggatgatgttccggcggaggagggagaccggatggacgcacacgtaatgcccaacagcacaatgaactcagttcacctttcgcctgcttctgaaatatgcaaatgtcagtaaaaaaccgacaacaaaaaaaaactattttttgaattttaaataatcaccgacagctgttgtcttcgcttgccttgccaatatttcgctgaccacaactgtttacctaaccacacagcccttcagtcacacgtgcatattatgggcatggaaattaatttatttacctatacatattaatacatgttcacataaaaattcgtttatttatttgcgtacaccaaagaaacgaaaatgcagacaatgtgaccgtcagcgaaaaataaatgttagcccatcgatttttgggtttagcatctgtgcagccctggtgtttccacgccctaccaacactgcccaccttgctgttaactttacagcagtgtttgctacgcgccagccctgacttacattacgaggaataaaagaaaataaattgcacaaattggcgaaaagcgcattattgctaaactaaagcctcgttaatttagcaggtgagctcttaaagagaaaaacaccaacacagtgctgtgcaggttaaaagcaacaaggaaaaaagctgaaaacatctaaaaaaaaagtgggcgaacgaagttgattaaattcaaatgacatcattttgcgacagctgtgtggcataaaaatcatttggagccgcgcgtttatttatttcgaaatttgatcataattcacgttcattttgtgtgccccaaacacgcaaaggacacttgagcccactgggtgtgtgcgtgtgcatttccaggaccccaattgcctacgtgtgcgtgtgtgtgtgtgtgcgcgcgcggctatgtatgtgtatgtgggtaggagttgttgaccggcttggttagacttttattttcattttattagtattttcgttgggcgccgagcgacagaaatacttactcattagtcgaccggtcggtcaggtcagtaattatagtcactgactaaagcttcacatgcaactggtcgcggggtgccaccccgccagcgagtgcgagcgagagggcgcatggctcagggatgtcgctggtggaattccaagggggattgcaataaggtaatccatttcaaaatttgcactcgcactgtctgcatgttttgaaagcgttgatcgaatgggattttgtttttaggaaagttagcatttctgaggctaaattcaattcattttgtttataataatatatataaataagttttgagctaggaaagaatgtc

SEQ ID NO: 19529 - DNA, 1365 bp, DROSOPHILA
aaataaacgaatttttatgtgaacatgtattaatatgtataggtaaataaattaatttccatgcccataatatgcacgtgtgactgaagggctgtgtggttaggtaaacagttgtggtcagcgaaatattggcaaggcaagcgaagacaacagctgtcgaagcaggcgaaaggtgaactgagttcattgtgctgttgggcattacgtgtgcgtccatccggtctccctcctccgccggaacatcatcccccccatccactcgagaactcgggaagctgccaaaaaaaaagagaaaacaaagaccaaagaacacgccgcttggcataatcaattaaaatgcctaggaatctgccgctcctcccgctgaccctctgtgccgtcgccttgctggccgccgtgggtcccatgcccgcccatggggcggtggccaacagtcacaagcacgagaagcaccttagcaaggagcgggtcaaggacggcatctacgctccccgggatgcccaccaccacggcgaggatggggagcacaacgtggagttcgatcacgaggccatcatcggcaacacgaaagaggctcaggaattcgactcactttcgccagacgaatcgaagcgacgactgttgatattgatcaaaatgatggatctgaataaggacgaatttattgaccggcatgagttgaaagcctggatattaaggtcctttaaaaaactgtcggaggaagaagccgctgatcgatttgaagaaatagaccaggatgcggacgagagaattacgtggaaggagtatctccaggacacatacgccatggaggatgaggacttcaagaaggagaccatcgactacgacagctacgaggatgagcagaagatgatcaagcaggacaaggagatgttcaatgcggccgacacgaacaaggatggtgtgctgacgctggaggaattcgttttattccaaaatcccgaggagcatccacaaatgttgccaatactgctggagcacacgatgcaggacaaagatgcggatcacgatggcaagatcaacttccaggagtttgtcggcgacgcagcctcgcaccacgacaaggagtggctgatcacggagaaggagcgcttcgacaaggatcacgactccaatggcgatggcgtgctgacgggcgatgaggtcttatcctggattgtgccaagcaatacggcaattgccaacgacgaggtggaccatctctttgtctccaccgatgaggatcacgacgatcgcctgtcctacctggaaatactcaacaactacgatacctttgtgggcagtgaggccaccgactacggcgaccatttacaaaacattaaccatctctccgacgagctctag

SEQ ID NO: 19530 - protein, 342 aa, DROSOPHILA
MPRNLPLLPLTLCAVALLAAVGPMPAHGAVANSHKHEKHLSKERVKDGIYAPRDAHHHGEDGEHNVEFDHEAIIGNTKEAQEFDSLSPDESKRRLLILIKMMDLNKDEFIDRHELKAWILRSFKKLSEEEAADRFEEIDQDADERITWKEYLQDTYAMEDEDFKKETIDYDSYEDEQKMIKQDKEMFNAADTNKDGVLTLEEFVLFQNPEEHPQMLPILLEHTMQDKDADHDGKINFQEFVGDAASHHDKEWLITEKERFDKDHDSNGDGVLTGDEVLSWIVPSNTAIANDEVDHLFVSTDEDHDDRLSYLEILNNYDTFVGSEATDYGDHLQNINHLSDEL

SEQ ID NO: 19531 - DNA, 5120 bp, DROSOPHILA
ctgtgaaaactattgattagtcctgaataatagatgcattgggcgctttaaagagggccagataagtaagcagacatggcacttaaagtactcgactagagtttccgctccgtacagattgacccctttgtttatccgaaggatacgcgctgggcggatggccgaatggcggtacaacgtggccaccacccaagtgccatgccagccattcgaaaagtgcactcaagcgtaaactgttgatgccctcgaaagtgaagtattcagcaattcgtcccttgaagcctcaaaaatttgcatttaatgaggtcaaagtgcggccgaggtgcgaaaaaatgttgatttaagcaggtactttgggctgcgatgtgattaaagtgtcgtcgaacggaatcgaatgcaaattatatgcattgcgttgctgggaaattgatctgtccactatactagtggcaggttttcacggaaaagtggcatattaaaagtgaaagaaaggtagcaaagcaaggtagttctttcaacccaaagatataacaaagatgtgatttaaattgcttagctctttaatccaatttaaggatcgcttttctagtcctgcattaacctctttgtggcagtaatgtcactggccagattcacttttgagctgcgttttctaagctgccctagaacgtctcgaatctgtgtcagcggaaaatgtccccgaaatgctggaaaatgaatattttccaagcccaaataacgccaaggaaaatcgcagccacatttgagcatttctactaattaaactgacacgaaagccgcaaaacagacgaatgcacagagttgcgactaaaccagtcccaattttaatttcggtctatagaaaatgagaatttgtgtgcttggcagccgcttgatgactgccagcagattgcttttctggtttgcccgccaacttctgttcaactgactccggcagatattggcccatcagcactcaccccactcacctcagagcggctcagagatccaggtgcttgcccagtcccgtttgctgcagcaatccaacgcctgcggccaaggaatgtcgccccatcgtcatgtggagtggtccggcagcgggctgctccttgtgtgctgccagcggggcacttcggttgaccatgctgccaccgagccagcggcggtaggtgtgctccggatccgtgttccagaacttgtggaaggtcagcggcgcatgcagttgcagcagttcgccggcatagtcctgcggcctagcctgatgcattccggcaacgtgtatcgccggcacgcccagcgcttggaggcagtagcccaggatcatgtcgtcgggggcactggcactgggacaactgcagcgctgcacgatgagccgcaccagcggcaggctgagcacgatgccggctcctccagtgtggtagttgaagccgtcgggagcgtgtagccggtagccatagcgctggcccaggtacaccagctccgtggcattgtggcggcagaggagggcgctcacgcgtggcacactggtgggcaaatgggtgtgaatcaaatgaaggctacccgatgaaccgggtatatcaatataatcatttttaattgaatgcgccgtcatgcgattgagtcggaaaatataattggaaacgagagagcggagagtcttcgacaagccgaagttggaataccctttcggtggagtttatgaataatgaagatttcgactttcaggccgtaaaatatatatgagggaacccaccaacataaattatcatgagagcttaagtttcaagttcaaaacggatcgacaatgtatatacaatctactttatagggtagcaatcgcaatacacagtgcaaagctggctttacttaaataaattaaaaaaaataaatctcggatcagcagcggtctgtaataataaggccatcaattcatggagttggctattgaacctccgaggaagtggctaatccaaagtatccccattcatacctatcaatcaatctgtaaattgagtctcacctcagcagcgtgtcatcatcgacgagcataagccagcggatgtccaattgcttgccgatgtccttgagggataattgcagaatggccattgtcttggcacagtgtccagtctgcacattgggtatcccagtgccgattgccggaatgccgacgtctgttgaggttttcgttggggcagaaggagcaggaaagtcggaaagacggaaagtcaaatcaatgaatattcaataagtggactcctcgccaccgggcgctgcaggggattggggaattgggctgggaatttcgagtggtgaatggccaatcacgctggatgaaattcactgtttgcccagccatatatggatgatatggttgtgtggatgtgtttagtcagcctgtcactgtgtttttgttggtgcaccgcccgctgctcctgatcccccacccattcggtttaattgcccgctcattgtcatcggggtgctcacctgccacatcgctgtagtatctcctgttccgggcgtcggctgcccaggtgcgctcgatgattggtatgcgttccttgtggaatttcgcacaggttttgatggcgaagtatatatgcgatcctgttgtgtgctcctgctcgtccggttttggggtggccaaaatacggcagttgcggaaacggagggtttcagttcggggtcgatagacaatttatggttatggaggtttcaaatgctaattgctcgggctgaatcttgaatctgctatctatatgtatgtgggttttaaattttaagcactcaatgaactttgatttaaaggtttgctgtccgtttttagataagcatatctcaaacacaggtgtctcaaaaaatagtactgaatagtacaaacaggtaaacttaaaaacattcatgcaaaataacgaaattttgacatttttgcaaatacctcatcttaatcaaaagccccttagcatgatatatgattttgctgcaacaaggcatgccaggcataaataaacttacacagccatttctccgctgccccaaagtcagtggctcctccggctgcgcatgcagcagacaaggcagtttcctgtttggcacggacgtgggtgtggaacatatgtagctggcacttttcagcaggattcctccggaaatcggggtgctaatatgcgggtcgggcgatacattgtcgaaaataaagcgagccagctcgtgagaggcatcaatggagaaatcgctgtgaacggtgatgttttggccactaggagcaaccagatccgccaacctggtaacaagtgattcattcaagaatgtaaaacaatgttcgagttaccaattgtcgagacacatttcaaatacttaaatcaacttatcccttctttctcaatgcatttgtaataacttactttcatatgccatttaaaaaggacttaccttcgcaacagagcaccagtgaaaacgactccggcactgagcatgggatatggaaaccgctggggatccttgtagttcgagaagtggtggatgatggttgcctccgcatcgtaaagggcgtgcccatagaaagctagctggaggaggcacaaggatataggacacagttgtggcctccagtgacaaactcacctcccttgggttctggcgacgcagttgctcgagcaggccgcgcaacgaagacacacgcgtgttgtgttgacaccatataatccattccgtgcgcgcacccagcacacgtgcctgggctcttagatgaggcagtgcgtccagcatggtccaggagttaaagagctcatgcatcacatggaccttcaggacaaagtcctcggggaagatccccgccagttccagtgcccgttgctgctccagcacgttgtgcgataaggctaaacaatcacttctggcctgctgaggatgcgggggacaggcgataaccaggagcacctctcctggcttgttactaccgcagcataagcttgcgaggcacagaagcccaaacagcacacatatcctagtaggcataactaatatctattgcggaactctaagagttccgaacgcatttcctgatattttacaaacacctgcccttttcctaccggaaatcggaacacgtctgtcccaatgaacgtgcgatgtcgtactgaggcagctgtgatttaattttggcgcaaagccgaaatgttttgtgtcctgtggtgtcaaaagtgggattcgggatttaacgtgcgtagtccaacgcgcaggcgcctctatgaagcggtgtttatgaatgaatcacaaggagcgtgcaacagttggtcacctgtttaggtatctttttgacatccaaactagtttaaggcacatataaaagtagctccactgagctgcgaaaacgctatacgatttgaactatatgatgttattcatgaaataattaaaacattctcagacatttaacactttaattagattcgataatgtggttcaatgatacaatgttgaatcgactagttttccatttaagaaaaacttttatttggaattagaacgtagttcacaatacgtgcactacatatgcgtacaagtagggggaataaaaaagcaatactattagtgcataggcgaggccagtcgcgtagttgtctgcatgctgttgctgcggttgttcgacttgagccgcagctcgttgacgagcttaaagagctggtcctgcttggatagcagttcgcgggttcgctggcagccatgctgaggagcgcacagaccaggattccagcgacagtataggcccttccacaagcggaccgatctcacgctggcaatcggacgcagcactagctcggcgccgtgcgtgaacgagggaaagagtggattcaaatactggtccagcgacgagttgatgtgcgtccacagggatgttgtcttgtgcttgagatctacaataaatgtgaaaattacttccaagcccatgcaaacagcaatcagtctaaccttcggccacacgctcggcctccgtgttgcagaggaaggtgccgaagcggcacgagtacagatgatccacgatggttatcaggaagtgctcgttgaactcaaatgcgttgttgaactgctggctaacctgccagacgctatcgata

SEQ ID NO: 19532 - DNA, 1741 bp, DROSOPHILA
ggacagacgtgttccgatttccggtaggaaaagggcaggtgtttgtaaaatatcaggaaatgcgttcggaactcttagagttccgcaatagatattagttatgcctactaggatatgtgtgctgtttgggcttctgtgcctcgcaagcttatgctgcggtagtaacaagccaggagaggtgctcctggttatcgcctgtcccccgcatcctcagcaggccagaagtgattgtttagccttatcgcacaacgtgctggagcagcaacgggcactggaactggcggggatcttccccgaggactttgtcctgaaggtccatgtgatgcatgagctctttaactcctggaccatgctggacgcactgcctcatctaagagcccaggcacgtgtgctgggtgcgcgcacggaatggattatatggtgtcaacacaacacgcgtgtgtcttcgttgcgcggcctgctcgagcaactgcgtcgccagaacccaagggagctagctttctatgggcacgccctttacgatgcggaggcaaccatcatccaccacttctcgaactacaaggatccccagcggtttccatatcccatgctcagtgccggagtcgttttcactggtgctctgttgcgaaggttggcggatctggttgctcctagtggccaaaacatcaccgttcacagcgatttctccattgatgcctctcacgagctggctcgctttattttcgacaatgtatcgcccgacccgcatattagcaccccgatttccggaggaatcctgctgaaaagtgccagctacatatgttccacacccacgtccgtgccaaacaggaaactgccttgtctgctgcatgcgcagccggaggagccactgactttggggcagcggagaaatggctgtgagcacacaacaggatcgcatatatacttcgccatcaaaacctgtgcgaaattccacaaggaacgcataccaatcatcgagcgcacctgggcagccgacgcccggaacaggagatactacagcgatgtggcagacgtcggcattccggcaatcggcactgggatacccaatgtgcagactggacactgtgccaagacaatggccattctgcaattatccctcaaggacatcggcaagcaattggacatccgctggcttatgctcgtcgatgatgacacgctgctgagccttcatttgattcacacccatttgcccaccagtgtgccacgcgtgagcgccctcctctgccgccacaatgccacggagctggtgtacctgggccagcgctatggctaccggctacacgctcccgacggcttcaactaccacactggaggagccggcatcgtgctcagcctgccgctggtgcggctcatcgtgcagcgctgcagttgtcccagtgccagtgcccccgacgacatgatcctgggctactgcctccaagcgctgggcgtgccggcgatacacgttgccggaatgcatcaggctaggccgcaggactatgccggcgaactgctgcaactgcatgcgccgctgaccttccacaagttctggaacacggatccggagcacacctaccgccgctggctcggtggcagcatggtcaaccgaagtgccccgctggcagcacacaaggagcagcccgctgccggaccactccacatgacgatggggcgacattccttggccgcaggcgttggattgctgcagcaaacgggactgggcaagcacctggatctctga

SEQ ID NO: 19533 - protein, 546 aa, DROSOPHILA
MPTRICVLFGLLCLASLCCGSNKPGEVLLVIACPPHPQQARSDCLALSHNVLEQQRALELAGIFPEDFVLKVHVMHELFNSWTMLDALPHLRAQARVLGARTEWIIWCQHNTRVSSLRGLLEQLRRQNPRELAFYGHALYDAEATIIHHFSNYKDPQRFPYPMLSAGVVFTGALLRRLADLVAPSGQNITVHSDFSIDASHELARFIFDNVSPDPHISTPISGGILLKSASYICSTPTSVPNRKLPCLLHAQPEEPLTLGQRRNGCEHTTGSHIYFAIKTCAKFHKERIPIIERTWAADARNRRYYSDVADVGIPAIGTGIPNVQTGHCAKTMAILQLSLKDIGKQLDIRWLMLVDDDTLLSLHLIHTHLPTSVPRVSALLCRHNATELVYLGQRYGYRLHAPDGFNYHTGGAGIVLSLPLVRLIVQRCSCPSASAPDDMILGYCLQALGVPAIHVAGMHQARPQDYAGELLQLHAPLTFHKFWNTDPEHTYRRWLGGSMVNRSAPLAAHKEQPAAGPLHMTMGRHSLAAGVGLLQQTGLGKHLDL

SEQ ID NO: 19534 - DNA, 2242 bp, DROSOPHILA
gcggcacgagacttcaaagtctccggagcagccccaatccgagtaacaatgccactttgtccagacgcgagaagacaaagaagagcccacaaaagaaactagattgtaaataaataaataaataacagtcatactcggggcccaaactgaaaaatgaaaaggcgactgtgtgccgaactacagaaaaatctgttccggtctgatttaacaattgttaaacagcttatgcattggccacggtctggagtccaaagggaggagtacgagtaggtggctaatggctgcacgcaacccagcgagtggccaacttactttcagccatacccgaaaaagaaatttctttcttcacgcgattttgcggtggcaaagccattctttttgccacctccttatggacttagacttccttctttcaaaactgcatcacagccacattagtcagtccatcaccagatgttggacaccttgacgggcactgacaaatgaagcaattgcttgctggcactgggattggtattgggtaaccgcactggggcaataatggcatggaggggccctgagcctcgggcctttgttagacccagactaattgaagccaatgggccaccgagccgagaggctgaagggccataattgagatctgagatcaaaagggcaattggccaaacaaacagtcctccgtatcaccaaagctgcttccaccaattggcatccattcatagcaggtggacttgaaacttgtaatacgtcaaaacaactgcgagggggttcaccgacgaatttccgtaagactttattcatattatcgaatacttcactcgaattatcaatggaattatcaatatggtctgattaccaagagattctttgcgacacgtccagattacccacacccatcaatactgtgaaaatactccacagataacactacggctagataattttccggctataaaagcgccctgtccacaggaatcccacatcagtttcaattcgaatcatgaaggctttcatcgttctggttgccctggcctgtgccgccccagctttcggtcgcaccatggaccgttgctccctggcccgcgagatgtccaacctgggcgttccccgcgaccagctgaacaagtgagcctgcattgccgagcacgagtcctcctaccgcaccggagtggttggtcctgagaactacaacggctccaacgactacggaatcttccagatcaacgactactactggtgcgcaatcgttttaatcggggtcaaaatcagtttagaagcagtcatcgatggacggcaaccatccgctgcagtagtgccaggtggaccaggcggaccatccctgctggctgaggaccttctgggcacaacggacggagtgggtgatgtcgtcggtcaggagagcgttgcagctcaatccgcattcgttgtaggagaagcgaccgctgggaggagcgcaccagtagtagtcgttgatctggaagattccgtagtcgttggagccgttgtagttctcgggaccaaccactccggtgcggtaggaggactcgtgctcggcaatacaggcccaacgagccaattggtcacgaggaacgcccaggttggacatctcgcgggccagggagcaacggtccatggtgcgaccgaaagctggggcggcacaggccagggcaaccagaacgatgaaagccttcatgattcgaattgaaactaatgacgggagggagcgtaggccgtgcttttatagggcggtattatcttaactggtagatcttcacaatgttattatctcaagtgcgccgcgaagtctttagctacttatgtatattatcgcaagtgcacacgagacagtaaataactggctattgcaaatggccagacgcaagctcatcaatctacatcgcttatcagcacctagcaaatggtctcaagccgctccctgaagattcgcaagcatagacgtaggtaaaaagtagattagccccatcccagccagcaagacccttgggtttttagagcaagtggtattaattttctgacttaaacgttggctatccgagccattaaccttgttagcatctccgctagcttttggagtgggcaattacgagtcgttggtgggcagaagctccactttggtgcacctgagtgagctgtaactggacagagagtgcgagctaaaaagaactctatttggtgcgggctggttcatctcttgtaacgggcgtgcgttcaatcgccaagc

SEQ ID NO: 19535 - DNA, 242 bp, DROSOPHILA
atgaaggctttcatcgttctggttgccctggcctgtgccgccccagctttcggtcgcaccatggaccgttgctccctggcccgcgagatgtccaacctgggcgttccccgcgaccagctgaacaagtgagcctgcattgccgagcacgagtcctcctaccgcaccggagtggttggtcctgagaactacaacggctccaacgactacggaatcttccagatcaacgactactactggtgcgc

SEQ ID NO: 19536 - protein, 42 aa, DROSOPHILA
MKAFIVLVALACAAPAFGRTMDRCSLAREMSNLGVPRDQLNK

SEQ ID NO: 19537 - DNA, 3916 bp, DROSOPHILA
tcgaggatatgcgacagctatcagtgagttttccaaacattcggcccatttaagctgagctaactccatttatatacacttgcagcatgcctcagcggtaacttcgccgccacctgcgccagctgcccaagtggcgccttcagctgcgcccctagtcagctccacgttccttagctccagcacgcctcagcgacagatgctattcgacatgtatgcgcccgtgggtgccaatctcacgcactccagtaagaagagaaccttcaacagagccatgagacagctccactaagttaatcgtttcttgtagtaaatggcgccgacttgaatcgcagctatctggaggcaaacaaatcggattactcgctcaacgacataagcttgtggttcgaccagcgtcgctcgagtgtccagccaggacaaggacctggttccctgccggctcctctgccgctgcccatgccgctgggtgctctactggaacagcagccggcaaacggcggagatggccgcgacaccgagatggtgaactttaagctgctgctgcacaaggtcaaggagatcgtcgaggactcgtacagcgataatgccgaactgtcggcggccacgcaaaatctggagaacgttctcgatagcatcatcaagagcgaggagcagcagcggcgcatcagcacgtgaggatccggatcggataccaactcccatcgattccagccagaccaagtccacttagctttaagttgtaaagttgttctaaagtaatcgtgacaaaatgacacaaccgagtcatgcatttattatatccttcttccttttcccatgtgctttaacattcgcgtaaatgctttaatttgtaaacttacaactctgacaagaatgcaatacaacaaaatgtttttataaaaatatacaatgcaaaaaacacattgttaacaaagcatttacatacaaaatatcaactttgtagattttccaatgcaaagagaagaaaaaaaaaacgcatttacgccccattgtcatcatcatcatcggtgaatagcatagaagccaacacatcgctggccatttgtgccttgtggagctgcgtcagctgctcccggcgctgctccacactggctgccggctcactcaaaaccttccaggcgtccatctcctcgaacagactgtttagcaactccatctccatgtcggcaggcgacatgttgtgctcagcgacctctagcacattgaggttgcagtgcagctggaggagatcgcgcgtcaggcgatgcagtagcagacgcaatcgatcgtccgttctggcgtacacatgccaatgctttccgggatcgtcgcgaagcagcaaggtgtcacaccactgtgactgcggctggcgattgtagaaaatacgctggacaggatcggcggcgatgttggaagactgaaagtgagacccaggctcactgtcgtccagcaagtcggaagctgtaagggattatgagttaaaagggacaacaagtggtcttgacaaagctactcactcggctccttgtttgcttcctgggcttggatcaactgaaactgcagcgtggagacgagtagctgctcgaatgtcgtgcaatcctgggccgactggaactccaatttcagggagcaacgtgccgtgtgcgtcataataacggccaaaaagtcttggtgcagcgtggcgggcgaaaatgtgggtgccaacgattctgttttatcgagcagtttcttcacatcgaaggtaatgagatggatttgcctaggggatgcatcctcgcccatctcgtacgttgccatcaatatgagtttctctgcctcaagaagatcgaccagacgcaggctcactaccatcgcggcagatcgttccggcggtagtattctttccttctccaccggtcgccatttgagacgcctgctatgctgatcctggcaggcccaaaactgcgccagctggtcgtagtcctcgggtggttggccatccgcctgcagaggcagctcgtacaggcggtgctccacgctaaagtcggtgtgtggttcgattacaacaatcggatacaactccttgactatggtgaggcgattggtgccagttatgttgactagcagagtgccacaaacaaaataatcgccgcagatccgagtccatacatcgccgagtcgtcggagcggctgcttctcctcaaggagcagcgaacgctggcccggcgtgccgaagtatagaaggtcttggacgtgggctaattccttctggttttgcattcgctggctgtcgagctcggcttgggcgcggtgcacctcctgcagcaggttctcgaaatccttcgcgggcaagcccgcatttttggacgtgctgggctcctcatttaagaaatcctcctggaaatcacaacgctgacgcttgccattgccgaactccagttccacaacggcctggaaggaaatgggaccttcgaccatctggtagtccaccacatccttgtgatccgccaccagttcgaagttggccccgtgatccttgggcctctttaggacgacgagatgcttccagcactgaattaacaggtagatgccctcccgttgccacacaaactttccaaatttgaggggcaaatcctccggcggatccagcatgctccagtccaccttttcgtcagtgggttcctgcttggacagaaagggacaaaccggtccgtcgtaggcctccagttgggtggctatttgctttagtttcgtgaccttcaaatcgatgtagtgcaccagatccttgcgccggaattcgtagaactttaggtttctcgctaaaaccaatgtagtggggtcatcccgcggtcggcccacgtgaagattggcgcagaaggccaaccgggccggctggagcagcatctccggcacattctcctggacaaacggcagcatggatgcggaagccacaagatggatgtggcgcccttgactcgaaagcccttcgaatcgatagctattgaattcaagtagtagttatcgatgcggtgaacgatattaggctattttgaaatggaaaaaccaatattaatcgagtttcgaatgctccttttagcgagaggtaagtctttaacaccgcataaacacaatcagtgttgcctaaccaatctgtgccctccactttctctcataatcaagcaatttctcataaaaaacgcacatcgataagctgataacgttggccctcgactaacaccgattattcaacaagttgtgtcaatcggcggagcagctgatcgttgtaagtagcaagaagaagacgccacacaaacattgcactccgctccgcccgcgcgttctcatttcccatctctctcactctgtctctcgcgctcaccgtctctctctctcgctccgcctcgcaacccccacagcgctccacaaaccgggccccacattcttgtgtgtgatttctggttcaggttctgatttcccgcgtgtccttgtgtgtgtgcgcgctgcagtgtctgtgtatctgttactgttgctgcatcttctgcatcaactgcaacgttaccaaaaatcaaaagacaatcgcctgcaaaagcttaattttgttgctcagtgttttaagtattagctgtttgcaagcagcacacacacgtaagaaacaacaagaacaacgataaaagacaacaacacaaatgcagagcatttgaagcgcaaacacacacaagcattcggtgcggctgtaagagcgagacacaaaataaggctaatttataaaagaaaagtgtgctgcaaggaatcgataaataacgggagtcgaggagcggaataggagtaaccaataaatataaatactgtaaatgcgatattaaaaagcgacaacaacaacaaaaagcagctgtgaatcactccgtcccgctcccccgcgctttcagtcactccagtt

SEQ ID NO: 19538 - DNA, 1860 bp, DROSOPHILA
atgctgccgtttgtccaggagaatgtgccggagatgctgctccagccggcccggttggccttctgcgccaatcttcacgtgggccgaccgcgggatgaccccactacattggttttagcgagaaacctaaagttctacgaattccggcgcaaggatctggtgcactacatcgatttgaaggtcacgaaactaaagcaaatagccacccaactggaggcctacgacggaccggtttgtccctttctgtccaagcaggaacccactgacgaaaaggtggactggagcatgctggatccgccggaggatttgcccctcaaatttggaaagtttgtgtggcaacgggagggcatctacctgttaattcagtgctggaagcatctcgtcgtcctaaagaggcccaaggatcacggggccaacttcgaactggtggcggatcacaaggatgtggtggactaccagatggtcgaaggtcccatttccttccaggccgttgtggaactggagttcggcaatggcaagcgtcagcgttgtgatttccaggaggatttcttaaatgaggagcccagcacgtccaaaaatgcgggcttgcccgcgaaggatttcgagaacctgctgcaggaggtgcaccgcgcccaagccgagctcgacagccagcgaatgcaaaaccagaaggaattagcccacgtccaagaccttctatacttcggcacgccgggccagcgttcgctgctccttgaggagaagcagccgctccgacgactcggcgatgtatggactcggatctgcggcgattattttgtttgtggcactctgctagtcaacataactggcaccaatcgcctcaccatagtcaaggagttgtatccgattgttgtaatcgaaccacacaccgactttagcgtggagcaccgcctgtacgagctgcctctgcaggcggatggccaaccacccgaggactacgaccagctggcgcagttttgggcctgccaggatcagcatagcaggcgtctcaaatggcgaccggtggagaaggaaagaatactaccgccggaacgatctgccgcgatggtagtgagcctgcgtctggtcgatcttcttgaggcagagaaactcatattgatggcaacgtacgagatgggcgaggatgcatcccctaggcaaatccatctcattaccttcgatgtgaagaaactgctcgataaaacagaatcgttggcacccacattttcgcccgccacgctgcaccaagactttttggccgttattatgacgcacacggcacgttgctccctgaaattggagttccagtcggcccaggattgcacgacattcgagcagctactcgtctccacgctgcagtttcagttgatccaagcccaggaagcaaacaaggagccgacttccgacttgctggacgacagtgagcctgggtctcactttcagtcttccaacatcgccgccgatcctgtccagcgtattttctacaatcgccagccgcagtcacagtggtgtgacaccttgctgcttcgcgacgatcccggaaagcattggcatgtgtacgccagaacggacgatcgattgcgtctgctactgcatcgcctgacgcgcgatctcctccagctgcactgcaacctcaatgtgctagaggtcgctgagcacaacatgtcgcctgccgacatggagatggagttgctaaacagtctgttcgaggagatggacgcctggaaggttttgagtgagccggcagccagtgtggagcagcgccgggagcagctgacgcagctccacaaggcacaaatggccagcgatgtgttggcttctatgctattcaccgatgatgatgatgacaatggggcgtaa

SEQ ID NO: 19539 - protein, 619 aa, DROSOPHILA
MLPFVQENVPEMLLQPARLAFCANLHVGRPRDDPTTLVLARNLKFYEFRRKDLVHYIDLKVTKLKQIATQLEAYDGPVCPFLSKQEPTDEKVDWSMLDPPEDLPLKFGKFVWQREGIYLLIQCWKHLVVLKRPKDHGANFELVADHKDVVDYQMVEGPISFQAVVELEFGNGKRQRCDFQEDFLNEEPSTSKNAGLPAKDFENLLQEVHRAQAELDSQRMQNQKELAHVQDLLYFGTPGQRSLLLEEKQPLRRLGDVWTRICGDYFVCGTLLVNITGTNRLTIVKELYPIVVIEPHTDFSVEHRLYELPLQADGQPPEDYDQLAQFWACQDQHSRRLKWRPVEKERILPPERSAAMVVSLRLVDLLEAEKLILMATYEMGEDASPRQIHLITFDVKKLLDKTESLAPTFSPATLHQDFLAVIMTHTARCSLKLEFQSAQDCTTFEQLLVSTLQFQLIQAQEANKEPTSDLLDDSEPGSHFQSSNIAADPVQRIFYNRQPQSQWCDTLLLRDDPGKHWHVYARTDDRLRLLLHRLTRDLLQLHCNLNVLEVAEHNMSPADMEMELLNSLFEEMDAWKVLSEPAASVEQRREQLTQLHKAQMASDVLASMLFTDDDDDNGA

SEQ ID NO: 19540 - DNA, 3999 bp, DROSOPHILA
aggacacagttgtggcctccagtgacaaactcacctcccttgggttctggcgacgcagttgctcgagcaggccgcgcaacgaagacacacgcgtgttgtgttgacaccatataatccattccgtgcgcgcacccagcacacgtgcctgggctcttagatgaggcagtgcgtccagcatggtccaggagttaaagagctcatgcatcacatggaccttcaggacaaagtcctcggggaagatccccgccagttccagtgcccgttgctgctccagcacgttgtgcgataaggctaaacaatcacttctggcctgctgaggatgcgggggacaggcgataaccaggagcacctctcctggcttgttactaccgcagcataagcttgcgaggcacagaagcccaaacagcacacatatcctagtaggcataactaatatctattgcggaactctaagagttccgaacgcatttcctgatattttacaaacacctgcccttttcctaccggaaatcggaacacgtctgtcccaatgaacgtgcgatgtcgtactgaggcagctgtgatttaattttggcgcaaagccgaaatgttttgtgtcctgtggtgtcaaaagtgggattcgggatttaacgtgcgtagtccaacgcgcaggcgcctctatgaagcggtgtttatgaatgaatcacaaggagcgtgcaacagttggtcacctgtttaggtatctttttgacatccaaactagtttaaggcacatataaaagtagctccactgagctgcgaaaacgctatacgatttgaactatatgatgttattcatgaaataattaaaacattctcagacatttaacactttaattagattcgataatgtggttcaatgatacaatgttgaatcgactagttttccatttaagaaaaacttttatttggaattagaacgtagttcacaatacgtgcactacatatgcgtacaagtagggggaataaaaaagcaatactattagtgcataggcgaggccagtcgcgtagttgtctgcatgctgttgctgcggttgttcgacttgagccgcagctcgttgacgagcttaaagagctggtcctgcttggatagcagttcgcgggttcgctggcagccatgctgaggagcgcacagaccaggattccagcgacagtataggcccttccacaagcggaccgatctcacgctggcaatcggacgcagcactagctcggcgccgtgcgtgaacgagggaaagagtggattcaaatactggtccagcgacgagttgatgtgcgtccacagggatgttgtcttgtgcttgagatctacaataaatgtgaaaattacttccaagcccatgcaaacagcaatcagtctaaccttcggccacacgctcggcctccgtgttgcagaggaaggtgccgaagcggcacgagtacagatgatccacgatggttatcaggaagtgctcgttgaactcaaatgcgttgttgaactgctggctaacctgccagacgctatcgataaattgcaggaacaccggagatctgtctgcatccgagtgcttgttgtcgccgtgaccaatgcgttgttggaacttgtggccaaaggagagccactccttctcaatgagaacctcgaaaccgcgcactgtgcgatagtgcggatcgagcagcaacatggaaagagcagtcagctgggctgtgcgatcccagccgtcggagcagtgaactacgacggaggtgctcatggtctccaccttgtcaacaatcctaacggcgccggccaggatgcacctaatgtgctttagccacagtgtgttgtcaatagccgtctgccactttgagtcgtcggtggtggggaagcaagcctccttcactttgcgtaggctctcccgcatcacgtggatgttgtgtatgtcgaggaagttgatttccacgttcttgtacgcgtcctctgactcgtagccgccgcccttggccttgttagcaatcgcattggcgcttggtcgcgcatccatgatggtcaacttgtctgactgggcgttcgcctccatgataaagcttaggtatgcttcatcgtcggaatttcgcttgccacttacacccaccagcggctgggaacaccttgtaatggtcgcttgagtccgtgggttcatccaggacaaaaccggcaggcggcagcgcgatcggaactgtgccacgcgcctcaggaaatcatcggaggccgctttgggcacagcccacacggccggatagctgtcgcaaattgcgtaggactcgtttagcttggtcgcccgccacatatcgttgggaacgcccaagcggcgcagctccgccagcggttcatataccgcccagccgtcccagcctccgttaccgttcacagagttggccgcggcgtgggcgaatgcaaagaggcgcccactgtacgagagcggaaaggcgttggcctgcagtttctcaaacaccgtcctccgcgaatgattctgctgcttgtgggcgaatcgcaggtttcgcatgtccttgcagaaaatctcgatgccgtacgagttctcaccgcgagacgtggcacctccaatcttctccacacgcgcgatcacgcccagaggcacgtcgacgacgacgggcggctcctgatcccgcaggggaagcgaccggaagtacagacggtagttggttatggtaagagcgccgaagacggggccgcggtacggacacacgtaggtcacgtcgttcttctggtcctggtcctcttcgccctccagatagccgaagggcgtgtcccgcagaatgccgttttctccgccaccgtgcttggagcccagcgaactggacttggagctgctgtccagagagttgctgctggcagtcttggaggccaacttgtcggccaggctcgcggagggatccattttcggatggacacgagtggtgtttggctattgtgttgctggttgcagctgtgttttcttttccaattgttagctaaatgcaattcaccaaaactcatgcagcagtgctgccaactcacgcaatataaaatcatctggaataatttcccattcctccgacaaaagtaccaaagggacattatgtagtggcggaaaatttgatttttatgtattggaattaatcaacttatttcagacatttaactggtaatcaaggaaagctagaacaattccgcttttaaaaaaatctctaacatatgtatttaatgcttaataaattaagtgttagaagtggcgtcttctttaagtttacagcgcattgattgtgtgacagaaaacatcggaccatgtcctgggattataaactcgcacagttgtgccattttactgcgctcctcgcgctgcaccttctcgttttcgcttccagcgtccatccaaatgttctcatcgtcgatgtcctcgcgacgctcgaagagatctccggtgataccgacccgtccacccagctgggaattttccacaagaactgaaacgcagctgagggtgtgtcctggcgaccgcctcactaccacctcggcattcgaatctagggccagttgctcgtctggattaccactaccaaggtggtccatgtagaggtcgtgatgtgaggcacatgcgccgaccaaatgcattcgtgccttctgaaacagatagttgcaaccgatgtggtcagagtgtccgtgagagcagaccaccacgtggatgtcatcgacgcctagtccctgctggcccaacaacgaacgcaggtgatctccatcccaggccgtcagtgtgtccacgattatgttggtgccatcccggcagcggaccagtgtgcatgtgcagttagcccgcatggcggactcgtctccttcttcttggcgagaatagccgacctggagcacggtcacctggtttcgttgcgcaggatcagtgtatgccattgtttagttgtttaacaacgataacgctctagcctattaaattatttagggtcagctgcttatcagctgttgcttacaaa

SEQ ID NO: 19541 - DNA, 1944 bp, DROSOPHILA
attgcatttagctaacaattggaaaagaaaacacagctgcaaccagcaacacaatagccaaacaccactcgtgtccatccgaaaatggatccctccgcgagcctggccgacaagttggcctccaagactgccagcagcaactctctggacagcagctccaagtccagttcgctgggctccaagcacggtggcggagaaaacggcattctgcgggacacgcccttcggctatctggagggcgaagaggaccaggaccagaagaacgacgtgacctacgtgtgtccgtaccgcggccccgtcttcggcgctcttaccataaccaactaccgtctgtacttccggtcgcttcccctgcgggatcaggagccgcccgtcgtcgtcgacgtgcctctgggcgtgatcgcgcgtgtggagaagattggaggtgccacgtctcgcggtgagaactcgtacggcatcgagattttctgcaaggacatgcgaaacctgcgattcgcccacaagcagcagaatcattcgcggaggacggtgtttgagaaactgcaggccaacgcctttccgctctcgtacagtgggcgcctctttgcattcgcccacgccgcggccaactctgtgaacggtaacggaggctgggacggctgggcggtatatgaaccgctggcggagctgcgccgcttgggcgttcccaacgatatgtggcgggcgaccaagctaaacgagtcctacgcaatttgcgacagctatccggccgtgtgggctgtgcccaaagcggcctccgatgatttcctgaggcgcgtggcacagttccgatcgcgctgccgcctgccggttttgtcctggatgaacccacggactcaagcgaccattacaaggtgttcccagccgctggtgggtgtaagtggcaagcgaaattccgacgatgaagcatacctaagctttatcatggaggcgaacgcccagtcagacaagttgaccatcatggatgcgcgaccaagcgccaatgcgattgctaacaaggccaagggcggcggctacgagtcagaggacgcgtacaagaacgtggaaatcaacttcctcgacatacacaacatccacgtgatgcgggagagcctacgcaaagtgaaggaggcttgcttccccaccaccgacgactcaaagtggcagacggctattgacaacacactgtggctaaagcacattaggtgcatcctggccggcgccgttaggattgttgacaaggtggagaccatgagcacctccgtcgtagttcactgctccgacggctgggatcgcacagcccagctgactgctctttccatgttgctgctcgatccgcactatcgcacagtgcgcggtttcgaggttctcattgagaaggagtggctctcctttggccacaagttccaacaacgcattggtcacggcgacaacaagcactcggatgcagacagatctccggtgttcctgcaatttatcgatagcgtctggcaggttagccagcagttcaacaacgcatttgagttcaacgagcacttcctgataaccatcgtggatcatctgtactcgtgccgcttcggcaccttcctctgcaacacggaggccgagcgtgtggccgaagatctcaagcacaagacaacatccctgtggacgcacatcaactcgtcgctggaccagtatttgaatccactctttccctcgttcacgcacggcgccgagctagtgctgcgtccgattgccagcgtgagatcggtccgcttgtggaagggcctatactgtcgctggaatcctggtctgtgcgctcctcagcatggctgccagcgaacccgcgaactgctatccaagcaggaccagctctttaagctcgtcaacgagctgcggctcaagtcgaacaaccgcagcaacagcatgcagacaactacgcgactggcctcgcctatgcactaa

SEQ ID NO: 19542 - protein, 619 aa, DROSOPHILA
MDPSASLADKLASKTASSNSLDSSSKSSSLGSKHGGGENGILRDTPFGYLEGEEDQDQKNDVTYVCPYRGPVFGALTITNYRLYFRSLPLRDQEPPVVVDVPLGVIARVEKIGGATSRGENSYGIEIFCKDMRNLRFAHKQQNHSRRTVFEKLQANAFPLSYSGRLFAFAHAAANSVNGNGGWDGWAVYEPLAELRRLGVPNDMWRATKLNESYAICDSYPAVWAVPKAASDDFLRRVAQFRSRCRLPVLSWMNPRTQATITRCSQPLVGVSGKRNSDDEAYLSFIMEANAQSDKLTIMDARPSANAIANKAKGGGYESEDAYKNVEINFLDIHNIHVMRESLRKVKEACFPTTDDSKWQTAIDNTLWLKHIRCILAGAVRIVDKVETMSTSVVVHCSDGWDRTAQLTALSMLLLDPHYRTVRGFEVLIEKEWLSFGHKFQQRIGHGDNKHSDADRSPVFLQFIDSVWQVSQQFNNAFEFNEHFLITIVDHLYSCRFGTFLCNTEAERVAEDLKHKTTSLWTHINSSLDQYLNPLFPSFTHGAELVLRPIASVRSVRLWKGLYCRWNPGLCAPQHGCQRTRELLSKQDQLFKLVNELRLKSNNRSNSMQTTTRLASPMH

SEQ ID NO: 19543 - DNA, 11119 bp, DROSOPHILA
atcgaaaagtagttactcacaattaaatctctttgttctatggtgagaatcaacttggcgataatattgagtacactgtccaatgtatcgtctccgtacaatttgaatactccacaattgacatagttaccgccaagtgagttctttaatatcaaaaagcatatggcaattccctttagtctcatcgggtaaagtcgttcccttggaacttcctggtgcagaatgcgattaccgtatatacaaataagtttcgaggcctcgcggaataggagaatgcccatggggctggatacattgcctgccagtctttgggtgcggcaatgcaccagctcggcaaacaatttgagaattggtgtcgtaacggcaggatcgtgagcccacaggtccatcgcacgcaagagtatcggcaaatagtccgcataatatagccattcaaaaagcatggtatattgaatgcgggcgttgagcggcagtgccaatccacgaaggtctcgagccaaaccaataatgaccttcttagcctcttcattagaaaatatgttattgtccatcatcactgagccaagggactcgaattgatctagttaaaaaaaaagagaatgtaagaattgtatagggcatttcaattcgcaaactgactcgttaagggttccaaaaaattgtagaatctttcttcatcctcgcccaaatcgaacatcagtaagcggcccaatgaagtgtagaacatggtgcgacatctcatctcgctcaaagaggaattagttcctaggaatgggaaatgttcgcttgtgtgatgtgtgagcataaactggacttcttctagacgtgccagtttgcgcacagaattaaaatgcacagaaagttcggataataacataagggttttggtgataatcgactcagagcgtccccaaaactttaaatttgtaatgctgaaagatatgggttaagttatggttttaggccgattgaatttgaaatatgtacatataaatactacttacattttgcgattaataaaacttaaaagcatttgctcgtcagtcagtccaaaaacttcgctaagtctcttgttcaaattggctttctgtgcctgctcgctgctgtgcatttttcggacctggtccaaaaagctcagtatcgccagctccagcttttcgcaaccagcttgaggcaatcgagcatcggtgagggtcatcagttgcaggactcttatcactagctccgcgtccattgtgtcatgctcatcgctggtcgcgacggtgagacgacccactatggccgacccgattatatacaccaaccacgttagttgtagctcatgtatggtaatatctatgctattggcgttaggtgtctgcaacagattctcatactctcgggccttctgatcgaaatgctggacaagaagattacacgtcttgttgtactcgcacctttcgattaccgacaattgttccagctgttgctgcaccatgcaaaaatcgtcgagtggatcatctaaattgtcacggataattacaggaacagcatccaggcgcgattcaatatacgccttaataacctccggcgtgtaagtacctagcaaatgcggatccggcgacttaacatatggtacagacgcaaccatacgttgccaaagggtgagtaagtaatgtacactgttcggtgcaaaaagccatagctgagggtagaaaattcgtgttagatttaaccaggcccacaatatttatgtacatacgtgcagggattcaacagtaaacttagctatcagttgaattgcttctggataacatggcaccgctataagttcacccaattgataattagacttaaggcgagccagcaaacggcagaactcgtgatagttatctgggtcactcaagccctgtaagaaatcgttagcgaaatatgtctaggatagcgtttcgacgagtacttacgtgcagagttgttaaaatatctttgactccttcgaccaagtgcgttagaaattttgttctttcagaattattaaaaagtgagcgacgcacagatgtaatttgaaccaggcaggatatggagtagctagctaaaccattgggcaaaatttgatataaatcaaaaaagagtttaagtgtgttcgaatctaagaatgcaggacgccaagctgtgggtatctacatacaaggtcaatttaatagagaatccaaatatattagttgcatttgcgtacatacctgaacgttgttcatatcatcagcagattcatctgtcgaactgccaatgaagtcgaagctcagacaattcttcgttaaacgtaagacgtgtgatattaacctaaaataacaaaaacaacaaaaaataagtaatcatgtaaaagcattgccgagtagtaatcgtgccctttttaagttataattagctgtgggtcacctttctgcttagcttagttaaaaattaagcattgctaagcatatgcattacaactgacggacggacggacggactaaatggcaaatcttattcagacccattggatattatactacatcatagttaactcacgcttgctgcgactcatccatgaagcttatgtttttgctgttatcacgggccgagaccagtagagagcaggatagcaaaaaggtttctaggagttgctggtcccgaaaagatgtggctattttgcgcattttggaaaaggacacctgcacgtccatctcgacaactgagttcatctcacacaccagttgtgatagaatttggacgccaatggtgcagtgctcaacggagccctagaatcgattaatcattctagttagaaatagttctttaacaacaaagaatatgccggatacctgcaagaacttcttgacatcttccaagaggttttggaagaccatttcctccttgtacgaatcgaaccatccgtactttgtgagcttcgccagcagactgaccaatgcctggacaacgaagtgctgcagattcggcacagtggccagatagttgagggcatagctgcgaatgtcgatccgctcctgtagactcaatccctgaatgagtttggtaagtgtggaagcggccagcaactgggcgtagctggaatcggctctttgcagcagcaactggcatttgggcagcgcatcctggctgcttacgaatgtgactagggctttttccgcctcggaacgaattctgatgtctgtggcttcgtagagttgcttgcacagcacctccagttgttgtatatcctgtgaacgaaattaattcgcttatgtgtacttactctatgtcagcaaggcgcattaaataccatactataacgctgaacaccgcaattcgcttaaaaataaacttgcaaattgtggaaacaaacaaacaagtgtgaccaaggcatccaagtttaaaagagtcgcggtattcttgcacttgttgaactgcgacgcaggaacggagtattatcttggtggcgagtttttgttggcaatcagcgctttgctgatcgaccaaagggaaaacaaaagatttgctacgtcgagacttgtgtcgatatgttgaaatttggggcgaatgtgagatgaagtagtacagaaaactacgtggttgctaaattaaaatagtttagcccagcctaataatactagatttcgtgaaaagtagaaggaagcggttcacatttttaatcttgtaatatttctatcgattggccaaaaaaatttcacgcccacactttgaaacaatttttatgattttcttattttattccccaatatctatcgatatccaagaaaaatgatctaatttcgcgttcgcattcacactagctgagtaatgggtatctgatagtcgggaaactcgactatagcactctctcttgttttaaattacatagaactttataacaactggagcttcacattttcaaaagattccatccgttcccttcagttgttcgatgtgagagtattgcattatgcgaaaactgcaggtctgcaacgtttcgcatttattaaaaataccattcgttccaaaacactctgcttatagcatcgcataataaagaggagatgcaccgaatacaatatacactttgttggaactaaaacaataattcataagaattctcacagttgttatcgatcacatttcattttatttaacttaaaacaataaaaattttaagagaataagcaatgagaaagaagttgggggtaaagtctaaaagtttattcgaatcaaatcaataataatttagtaatgtttttctacggaatatggatcgggtgaggtgaacatactgctggtcgccaagaggttcttcagtcatccatacgcatctgtgatcagctgattgccaattaaaaactcatgccaaggcataagctttgttaatcggaatataaataaaaagggcgaggatcgaagttaagtcggctcgtaggaccagtatagtgtgccattctttgtccgttatggaattccaaaacctgtaagcacgaaatgttagaaacttagctgcttccgccttcagaagtgaactaaacaaaacaaaaggcctgcccacgaaaaaaggttttttgaaatttgataaacaaatcaatactggccccattaatactttatttctttatttaaataatccactaagtggatcaccattcataagttcattgttacgtacaaaactcagtatggttttatagtattcgttgtttttgacaaaaaattaagtagatgacattttgtatacatcaaaaataaaatggatatattacaaatataaagattaaaatatcatacacacacataatgttatatgaccttcattaatacagtagcttaatgtaaaacagatttcattcagggttcaataagcggttttataattttatttagttcgtcaagtagtatgcttttctgaagagctgggttttattgtcctcacagaccgagcgcacaagccttattccgtggcaagcagcgaaaagttctcaaaattcagcttaccttgtatggactcatcgtccaggtcttcggtgctgttggtaatacgtgctgtcaacaaatgataatgaattattatttaagtttgtacaagttattatgtatgtatatatttatatacgcacctctagaacccttggttgaactcatgcccatggaactttgtaagcccccatttcgaccgtacagaacattctccaagtagggcagaccattgttgttcacaatgtttaagccaaggcacgtctcgatttgcttccagcgatgcagtcgttcttgcagctcgtttgttacatctccgagggcattccgtgcctcaacaatcgaccgatccacatcatcaatactctttccgtgcgtggaaacgaacgcacccaccaaacttgaccgtttcttacgcaatttctcacaagcctctctggccgactgtagctgcttctcagccgacgtgcgcttcttctgatgattcttactttctagttcatatgtgtattgaagccatgattgcagttgtggcggcggtgaccagcagttgtctactagctcgaattcggcgcgggacaattcgttgcgcaacatctcgatttcctttttcagctgctgaacttccaaatccgagttcgatgaactgagagtgggcgcttcttttagacgacgctccaaatctagtttttctgttgccacattttcctgctccattctggcccgttctagttcctatagtagcattgaagcaatgcattagttaaataatagcattagttaataattacttaataccaaccttctgcatctcctgtagactttgctcagccctctgcaatccctccatatcctgggccattcgacgcagatgccgtttggcattcttattttgctgataggcgtaccaacaaccaataatagcactaagcaacagtgttaccaatatgtagtctttccagcgggtaccagtttctattaaatgacaaataaatatatatccaataagtactttatctattctgtaagactataagcttcttacctcgcggtggcccaaacagaaccacatccattgccttcaatgagattttttgtttgtgtatagggtctttgatgccaagtacattgccaacatactgaagattattcacagccaatctaaaacgccgaaaatagttgaaaagaatgtgaaatgcatcaagtaattaattgttaaataactacaattttaaaaatttatcaactttttccaaaagaataagtagttcttcaaaagtagaagacacctaagggaaaacataggattaattaatacatttaaactttggcttgccaaagatagcttcctttcttgatttctacaattgccacagggttttaaagtttttaaagagcagtaaaacaacctatagttatggattatgatgcacaacttatttataaatgggacaattgaacttgaaatcattaaaatgatgaaaacccaacgctgaactcaaattaaaaatgatttatagcctaccttggcaaggcagcgccagtaaccttgtgtaatttgaacagatcaacgtattgcggcagctgaacggactgagccagccaatcggtggtctgctcgatggtccaattatgcacctccgatctgagccaggcctcccaaagttctttgaccgatatatgcatatcgtcattgaagtgaaacgctttctgccgcttttcgtagcccgagtcgtacttcaattcctcccgcaaaaactggaaaaattcgtttaaagatgggaaaataaaataaaggatgtgaaatgttgcaaatttaaaattgataatgaaagatgaagtaacaaagtgtgttcctacattaaaggtcatactgaatgaatgagttgattttaaacatgaacgataatattatattatatatatctgcctatagtataggttgaccagttaattgagatcgggctggtagttactaattataataatcttatcgaaattacttttttttgagtaacaagaaaggaagctcagttcggcaagccgagtttgatacatcgttgtaatatttaactatatacacatttcaatggaaccaaattttagataagtatacgtaaaataaacaacattctttgaaaaacaagaacgcacgcctatgatactgctcattgaatgataataatctgaataatgaaatttctatatgctttctagtgtataatttgtgtcagcttaacgagcagcgatttctagtcatggaaacatgattctcatatactttggactttcggttcaaataacttttaaaacatacgtcatcggactcgctcagatcgatgtttccattatcgtcatcatctagctgacgatgcaagctggcaatagcctccatgccaaagcgatcctgaacacttccactgtagcaatcaaaatcatcagcagcacacgctccatccgctgaaccacttcccatggaacctgttgaaagtgcatcggttagcaaaatatatataaaagaagctattacatctaatcgagaagaggctatttaaatcaaaacataataatacatactgttcaaacccgtccatcagatgatagctagcgaaagtgtgttaaaacacaacaaaataataatgaaaaggtggtaactttggcgagccaaagttcaaataccgatgcagttagaaaagaaaaagtgcaggttgttatagtcgttcgattttcccacaatttgcaatcttgtcctaaaatcgccctgaaaattcccatataatatatgggcaacggaaattaaactatgacaagtatattgctgagctcctacaaaacgaatacacatcgagtataaatttaacaaagataagaaatagaaatcaataaaaagcaagaaatttcggaataaaatttaaatcacttccaaaaaaaaaaaaaaaaagaacaacgaagttttaccaatttggccagattgtcctatatgtaaatagtccgatcgttcacatggcagctacatatatgaaatagtcgtctgatctcggctgtttcgacctatatactacctgcaatagaaagaagactatatttaaagtttcaaccagttggcttcaaaatggagtgactggtttgtttaacaacggacagacagacaaacatacggacatgcttatatatactataactatctactttacaagattggaatattcgtcgcggcgttgcaagcgtctggccaaattgattgataatgacccgctgcaagggtatatcaagttcagtaactatataaatatatatatacatgggctctaaatatccttaaacatgcttcaaatctaccttatagtaacgcagaaatagctcacaaattggatgctcttcttaacttgcaagcttaagcttatgcatagacttagtacgtgctattaatgactggttttggcagatcccgattagaaggtgctttgcctcgtgcgcaacttactaaattcattgctgacagcctgggacatggcctcgctcagaagattatatgagctcctgtgcagattttgcgccaaatgagtggagtgctctccgccgcttccggcgtgcgatgcggcaatatgggtgacatgttccgattgcgaattgtgtaaactctgaccagattcgtgggatgagtgacgttgtgaggcaacattgggattttgcttatactgatgctgtgtgttgtgtcgattcgaatcgactgatactgtgtgcgggccatgatctagcgtacttatgctcttcagcacacagcagaagaatattaaagagtagttccaaatggtattctttcgcattgttacgaattgtgtgcggacttcttcaatacaaattatcgcatatgtctcctttaaatcggtaaatcggctcggtttcttataagtttacaaatcaaatttgttgctcgcgaaagtcatagttttcaactgatgatatcctgcaatgatatatgaaacagagatgtcagaaatgtggcagatctagatctcaacttaaaaacttagtaatatggggctgagtaatacgcaaagagtaagctttttttgccctgtaaagtatatatatgtatttctaatcagcatgcagtttcgggagtaattatggtatatttcagggatcctcttaacaagttaacaagctttttattgttatattgcaatctttgtcaatggatctttacatctggaaccttttctctcgactttataacgcatattccatattctattaaattccatagtgaccgaagcgtatagtacgtaaagaaaattgattaaataatcaagcaaatccaactgtgtgcgaaagtattattgcattggccaataaataaagatttactgggcacagacttacgaggcttttatttgtcaatgagattcagttttaggggtctttaaagataaccgcctgagcgcaaatttactgagaaatgcaaatattagggaaacggcatgagtaataaaatggttgagttttcggttcgccaacataaaattaatttttgggcagttattttagatttggatttgcgtttttgttaactagtgtaagtttagctgcggatgctgtagcaaaacattttcgacacctaactagacttatactatcattctgatctattatattataccaatgtgcgttttacatctgtgtagttacaatacatttgggatagtttttgatctccaatttgaaacaaataaatgcgtaaaatacaatgaattcctacagatatcgttgcaaagacagcacataacggtacatttagatggcagcagtaaatggattcaaaatcatatgcaaaccttactgtgtaactgttttcttcatttttttacaatattttttaatattagacattgatactatatacgaatgtagatatgtaagttgtggaaggcatcagcatttgtttacttctaaaaacgcagaaaactgggaatttcaacaatgtctggttggatccggctgcgttatgactgcacaatttacaatgtcaaagccaagcacttaataaccacacatatgcggatgcccaatggtaaacttccataagttttttttagacctcaaataaaaataaaagcactcaccctaaaattcccgagtcagtttgggttgaacggtgtgaccagtcgactgaaagcgaaaaatgtacacttcaaattttaagctgcaaacacttgtcatgtaagagctattgtatattttgccgaataggttaaagtttttgtatgcaacataatatattagcaaaaggacaatagaagaaatatatgcaacgtataatagtgatacatacattgtaaagtatccgttaatacactgtttccactttttagggcatttcgataattaccgataattcttcaaaaatatcctgtaacggccttacctcaaatattgatttgtattttctattctattatttaatatttatcctgttagcttatggttggctttttcacatttaaagatcgatatgcttgcgttcggcaattttcgcttagtggatataaaagcggaacgactggaattttttcgcatatgaaacctgttatcccaccgatccctatctatattttaatatttcaatataaatagttttgtttccgcgataattcagctaaaaaaaattttatcgattgcatgcattaagtaactgaaaaattaacaacaaactttaatataaaaaaagcccggtacatgagaatcatttactcagaaacgcgtttatgaaacgcttgcaattcccagcaattatgcctaacgcgtagtttaaataacaattgattgctacagaagcagacagcgcgaaagacaatattaagtttataatttaaatatagcttgaaggcagagttaaaaaaggcagatactcagcgcataacgtgcaaatcgatttggcactttaatttgccgtttatttgtttatagtctgtcaaaacaaacagttgtacataaaaaaaggaaatataatcgcgcgcatgcagcatttctggttaaaataaacattaataaagcaacgaattgaatgggactcacggacaacgatgagggattgtaaatagagacattggttaatgcctgaaatgtacatatttttttgtgttgt

SEQ ID NO: 19544 - DNA, 3223 bp, DROSOPHILA
aaactgactcgggaattttaggatgcgaaagaataccatttggaactactctttaatattcttctgctgtgtgctgaagagcataagtacgctagatcatggcccgcacacagtatcagtcgattcgaatcgacacaacacacagcatcagtataagcaaaatcccaatgttgcctcacaacgtcactcatcccacgaatctggtcagagtttacacaattcgcaatcggaacatgtcacccatattgccgcatcgcacgccggaagcggcggagagcactccactcatttggcgcaaaatctgcacaggagctcatataatcttctgagcgaggccatgtcccaggctgtcagcaatgaatttagttccatgggaagtggttcagcggatggagcgtgtgctgctgatgattttgattgctacagtggaagtgttcaggatcgctttggcatggaggctattgccagcttgcatcgtcagctagatgatgacgataatggaaacatcgatctgagcgagtccgatgactttttgcgggaggaattgaagtacgactcgggctacgaaaagcggcagaaagcgtttcacttcaatgacgatatgcatatatcggtcaaagaactttgggaggcctggctcagatcggaggtgcataattggaccatcgagcagaccaccgattggctggctcagtccgttcagctgccgcaatacgttgatctgttcaaattacacaaggttactggcgctgccttgccaagattggctgtgaataatcttcagtatgttggcaatgtacttggcatcaaagaccctatacacaaacaaaaaatctcattgaaggcaatggatgtggttctgtttgggccaccgcgagaaactggtacccgctggaaagactacatattggtaacactgttgcttagtgctattattggttgttggtacgcctatcagcaaaataagaatgccaaacggcatctgcgtcgaatggcccaggatatggagggattgcagagggctgagcaaagtctacaggagatgcagaaggaactagaacgggccagaatggagcaggaaaatgtggcaacagaaaaactagatttggagcgtcgtctaaaagaagcgcccactctcagttcatcgaactcggatttggaagttcagcagctgaaaaaggaaatcgagatgttgcgcaacgaattgtcccgcgccgaattcgagctagtagacaactgctggtcaccgccgccacaactgcaatcatggcttcaatacacatatgaactagaaagtaagaatcatcagaagaagcgcacgtcggctgagaagcagctacagtcggccagagaggcttgtgagaaattgcgtaagaaacggtcaagtttggtgggtgcgttcgtttccacgcacggaaagagtattgatgatgtggatcggtcgattgttgaggcacggaatgccctcggagatgtaacaaacgagctgcaagaacgactgcatcgctggaagcaaatcgagacgtgccttggcttaaacattgtgaacaacaatggtctgccctacttggagaatgttctgtacggtcgaaatgggggcttacaaagttccatgggcatgagttcaaccaagggttctagagcacgtattaccaacagcaccgaagacctggacgatgagtccatacaagcgaattgcggtgttcagcgttatagtatggatatacaacaactggaggtgctgtgcaagcaactctacgaagccacagacatcagaattcgttccgaggcggaaaaagccctagtcacattcgtaagcagccaggatgcgctgcccaaatgccagttgctgctgcaaagagccgattccagctacgcccagttgctggccgcttccacacttaccaaactcattcagggattgagtctacaggagcggatcgacattcgcagctatgccctcaactatctggccactgtgccgaatctgcagcacttcgttgtccaggcattggtcagtctgctggcgaagctcacaaagtacggatggttcgattcgtacaaggaggaaatggtcttccaaaacctcttggaagatgtcaagaagttcttgcagggctccgttgagcactgcaccattggcgtccaaattctatcacaactggtgtgtgagatgaactcagttgtcgagatggacgtgcaggtgtccttttccaaaatgcgcaaaatagccacatcttttcgggaccagcaactcctagaaacctttttgctatcctgctctctactggtctcggcccgtgataacagcaaaaacataagcttcatggatgagtcgcagcaagcgttaatatcacacgtcttacgtttaacgaagaattgtctgagcttcgacttcattggcagttcgacagatgaatctgctgatgatatgaacaacgttcagggcttgagtgacccagataactatcacgagttctgccgtttgctggctcgccttaagtctaattatcaattgggtgaacttatagcggtgccatgttatccagaagcaattcaactgatagctaagtttactgttgaatccctgcacctatggctttttgcaccgaacagtgtacattacttactcaccctttggcaacgtatggttgcgtctgtaccatatgttaagtcgccggatccgcatttgctaggtacttacacgccggaggttattaaggcgtatattgaatcgcgcctggatgctgttcctcaacagctggaacaattgtcggtaatcgaaaggtgcgagtacaacaagacgtgtaatcttcttgtccagcatttcgatcagaaggcccgagagtatgagaatctgttgcagacacctaacgccaatagcatagatattaccatacatgagctacaactaacgtggttggtgtatataatcgggtcggccatagtgggtcgtctcaccgtcgcgaccagcgatgagcatgacacaatggacgcggagctagtgataagagtcctgcaactgatgaccctcaccgatgctcgattgcctcaagctggttgcgaaaagctggagctggcgatactgagctttttggaccaggtccgaaaaatgcacagcagcgagcaggcacagaaagccaatttgaacaagagacttagcgaagtttttggactgactgacgagcaaatgcttttaagttttattaatcgcaaaatgtaa

SEQ ID NO: 19545 - protein, 1066 aa, DROSOPHILA
MRKNTIWNYSLIFFCCVLKSISTLDHGPHTVSVDSNRHNTQHQYKQNPNVASQRHSSHESGQSLHNSQSEHVTHIAASHAGSGGEHSTHLAQNLHRSSYNLLSEAMSQAVSNEFSSMGSGSADGACAADDFDCYSGSVQDRFGMEAIASLHRQLDDDDNGNIDLSESDDFLREELKYDSGYEKRQKAFHFNDDMHISVKELWEAWLRSEVHNWTIEQTTDWLAQSVQLPQYVDLFKLHKVTGAALPRLAVNNLQYVGNVLGIKDPIHKQKISLKAMDVVLFGPPRETGTRWKDYILVTLLLSAIIGCWYAYQQNKNAKRHLRRMAQDMEGLQRAEQSLQEMQKELERARMEQENVATEKLDLERRLKEAPTLSSSNSDLEVQQLKKEIEMLRNELSRAEFELVDNCWSPPPQLQSWLQYTYELESKNHQKKRTSAEKQLQSAREACEKLRKKRSSLVGAFVSTHGKSIDDVDRSIVEARNALGDVTNELQERLHRWKQIETCLGLNIVNNNGLPYLENVLYGRNGGLQSSMGMSSTKGSRARITNSTEDLDDESIQANCGVQRYSMDIQQLEVLCKQLYEATDIRIRSEAEKALVTFVSSQDALPKCQLLLQRADSSYAQLLAASTLTKLIQGLSLQERIDIRSYALNYLATVPNLQHFVVQALVSLLAKLTKYGWFDSYKEEMVFQNLLEDVKKFLQGSVEHCTIGVQILSQLVCEMNSVVEMDVQVSFSKMRKIATSFRDQQLLETFLLSCSLLVSARDNSKNISFMDESQQALISHVLRLTKNCLSFDFIGSSTDESADDMNNVQGLSDPDNYHEFCRLLARLKSNYQLGELIAVPCYPEAIQLIAKFTVESLHLWLFAPNSVHYLLTLWQRMVASVPYVKSPDPHLLGTYTPEVIKAYIESRLDAVPQQLEQLSVIERCEYNKTCNLLVQHFDQKAREYENLLQTPNANSIDITIHELQLTWLVYIIGSAIVGRLTVATSDEHDTMDAELVIRVLQLMTLTDARLPQAGCEKLELAILSFLDQVRKMHSSEQAQKANLNKRLSEVFGLTDEQMLLSFINRKM

SEQ ID NO: 19546 - DNA, 2687 bp, DROSOPHILA
ttgggcacagcccacacggccggatagctgtcgcaaattgcgtaggactcgtttagcttggtcgcccgccacatatcgttgggaacgcccaagcggcgcagctccgccagcggttcatataccgcccagccgtcccagcctccgttaccgttcacagagttggccgcggcgtgggcgaatgcaaagaggcgcccactgtacgagagcggaaaggcgttggcctgcagtttctcaaacaccgtcctccgcgaatgattctgctgcttgtgggcgaatcgcaggtttcgcatgtccttgcagaaaatctcgatgccgtacgagttctcaccgcgagacgtggcacctccaatcttctccacacgcgcgatcacgcccagaggcacgtcgacgacgacgggcggctcctgatcccgcaggggaagcgaccggaagtacagacggtagttggttatggtaagagcgccgaagacggggccgcggtacggacacacgtaggtcacgtcgttcttctggtcctggtcctcttcgccctccagatagccgaagggcgtgtcccgcagaatgccgttttctccgccaccgtgcttggagcccagcgaactggacttggagctgctgtccagagagttgctgctggcagtcttggaggccaacttgtcggccaggctcgcggagggatccattttcggatggacacgagtggtgtttggctattgtgttgctggttgcagctgtgttttcttttccaattgttagctaaatgcaattcaccaaaactcatgcagcagtgctgccaactcacgcaatataaaatcatctggaataatttcccattcctccgacaaaagtaccaaagggacattatgtagtggcggaaaatttgatttttatgtattggaattaatcaacttatttcagacatttaactggtaatcaaggaaagctagaacaattccgcttttaaaaaaatctctaacatatgtatttaatgcttaataaattaagtgttagaagtggcgtcttctttaagtttacagcgcattgattgtgtgacagaaaacatcggaccatgtcctgggattataaactcgcacagttgtgccattttactgcgctcctcgcgctgcaccttctcgttttcgcttccagcgtccatccaaatgttctcatcgtcgatgtcctcgcgacgctcgaagagatctccggtgataccgacccgtccacccagctgggaattttccacaagaactgaaacgcagctgagggtgtgtcctggcgaccgcctcactaccacctcggcattcgaatctagggccagttgctcgtctggattaccactaccaaggtggtccatgtagaggtcgtgatgtgaggcacatgcgccgaccaaatgcattcgtgccttctgaaacagatagttgcaaccgatgtggtcagagtgtccgtgagagcagaccaccacgtggatgtcatcgacgcctagtccctgctggcccaacaacgaacgcaggtgatctccatcccaggccgtcagtgtgtccacgattatgttggtgccatcccggcagcggaccagtgtgcatgtgcagttagcccgcatggcggactcgtctccttcttcttggcgagaatagccgacctggagcacggtcacctggtttcgttgcgcaggatcagtgtatgccattgtttagttgtttaacaacgataacgctctagcctattaaattatttagggtcagctgcttatcagctgttgcttacaaacagaaatgtcaactcgtcaacaacctgttgaaaactagagttgccactatgaaacttttgacgaaataaacaaattacttacgaattaagtaattacttatctaacttgtataccgctaatcacagttcagaaattattttaagtttttttttacacattgattccattattggtttcagtataatggaaattaggatttcatggcaacaccgacaccagctgatcgccaaaaattcactcacatgtttatacggcgtaattttgttattattcaacgatttctgaataagcgtgagataaagtggcatgtatctgaaccacctgccgcggacacaatggaagtacctacaataccttctgcgagtgcgtcagcttcagctcctgcgacggcacgttaacattggcgcaaagccgcccatccaaacagctgccttgctgccggcattgggccaaaaactgaggaagcactcgcagctggtgaacggagatctccaagacaagtttggcgtgccacgggaacaggatgctcttctaacccgactggaggaggccaagacgggtaaccagattttagatgtgttggagagctgtgacggcctgcagagctcccatgtggtgatgggaatctcactgctgtggaacatctatcacgacgcggagcaggcaagtaaagatgccatcacggatcgcgtgctgcttaacgtgctcccaaagttggccccttatgtacaccaactggagatcgatgatctcagtagatgctacctgtacctgcgcaaaatgcatataccaaactccgaggcagtcgtggaggccgtgctgacgagatctcttcaattaatcgagtcacaagttgatgacgaagtcattcccttgacctccttgtctcgcctctcggtgggcatcaacttggaacgcg

SEQ ID NO: 19547 - DNA, 687 bp, DROSOPHILA
atggcatacactgatcctgcgcaacgaaaccaggtgaccgtgctccaggtcggctattctcgccaagaagaaggagacgagtccgccatgcgggctaactgcacatgcacactggtccgctgccgggatggcaccaacataatcgtggacacactgacggcctgggatggagatcacctgcgttcgttgttgggccagcagggactaggcgtcgatgacatccacgtggtggtctgctctcacggacactctgaccacatcggttgcaactatctgtttcagaaggcacgaatgcatttggtcggcgcatgtgcctcacatcacgacctctacatggaccaccttggtagtggtaatccagacgagcaactggccctagattcgaatgccgaggtggtagtgaggcggtcgccaggacacaccctcagctgcgtttcagttcttgtggaaaattcccagctgggtggacgggtcggtatcaccggagatctcttcgagcgtcgcgaggacatcgacgatgagaacatttggatggacgctggaagcgaaaacgagaaggtgcagcgcgaggagcgcagtaaaatggcacaactgtgcgagtttataatcccaggacatggtccgatgttttctgtcacacaatcaatgcgctgtaaacttaaagaagacgccacttctaacacttaa

SEQ ID NO: 19548 - protein, 228 aa, DROSOPHILA
MAYTDPAQRNQVTVLQVGYSRQEEGDESAMRANCTCTLVRCRDGTNIIVDTLTAWDGDHLRSLLGQQGLGVDDIHVVVCSHGHSDHIGCNYLFQKARMHLVGACASHHDLYMDHLGSGNPDEQLALDSNAEVVVRRSPGHTLSCVSVLVENSQLGGRVGITGDLFERREDIDDENIWMDAGSENEKVQREERSKMAQLCEFIIPGHGPMFSVTQSMRCKLKEDATSNT

SEQ ID NO: 19549 - DNA, 4514 bp, DROSOPHILA
tgcggcccgcaatgggaacgagcccatctgcaagctgcttctcgacgagggcaaggcagacgtgaatgctgtgaccaaagcaggagccaccgcgctgcatcgtgcagccatgatgggtaacaaccattgcaaatcgcagttatgatcaatcaatactacgagttttaatctgacggcaggccacttggaaatcgtgaagctactggtcgagcacaaggctaatcttctgctgcaggacgagagcggacagaccgctttgcatcgagcagtgatgcggggccacctggaggtgtgtcgcattctgctggcaaaggagccaacacttaagctggtcaaggataaaaaggacaaaattgcatttgagtacatcatggagaacgccaatgatgattttaagctgctgctgaagccctaaagggcttgtcattccccgttcaacatattcgtattcgttacggtttaaatatctttgtttattgagtctgttaacacgttttctataaaattgcacccgatatcgttgtaaaatcctacttagaaattgcatacgtccttatttgtttgcattgtgtgcgagatcgattgtatatgggaaaagtaatcttaacgtttgcgtagtcaaattaacatagtggatacatacatcgtttaaatcttctatatagactatatacacatgcctagtaaacataaaatgtgcaagtaatttagtgaaaactctgtgcccaacaggatgtgcacacggaactcgttttgaaaaatgcgagatttgcgtgaaaattctgttcaaaatttgtaatacatcgtaagaaaattaatatcacattggagtccgtgtatcgaagttgttaattaatctggcgttgaaattgaaattaaggaaactattgcagaaccttcctacacactcgtcgccaatttacaaaaactatacgctacctatcattatagcaaacatataaaacctatataatctgaaaataaaattcctaaagcgcaatcaatcccaagactcagtccatttaacaacaggtatatcgaccggctccatacccctcaccggcggcagttcgtcaaagtcgctgaggtaacgcttcaaggtggcgggtatggcgaactcatccacaatcctccccagcgatgaccgctcctgagtgggaagatacctttcctgcacctccggccgcgtttgcaggcatctcaggagactccgacgaatctccaggcgagcgagagactgcaaggagcgtggctgggtgccaagcaaacacatttcccgctcgaattccagccgcgctggtggccagtccttgggcaggggtcggtgcttgtgcggaaactgaaagccagcgttgcctatggacaataggaaatgaaaataactaccatgtacttcataggaactaagatcagagtaagcaacttacatagcaacctggcaaaggccaatcgtgttggtgtgcaattcgatctgagctcattcaccacatgttcccggcaaatctgcgccagattgcagccctcgtggatgaggaattcggccacctccaggcggtgcaggttgatggccctggacaacggagtgtgacaataaatcaggccacaaacgattgtcggagcacacgagtcatagaaatcattacgagcgctgggcgatttggcaagcaatacacgcagtatgcggctaaactccttaacccaaaaattctgctgcacggcaaacagaaccaagccctcatcgtggacatccgagtagagtccgagcttgcgctgttcctcagccacgttcagcagatactcaagcatttcgtgacgcccccgatggatggccagcatgatgggtgtgaagtttttgagattccatacggacaaactctcgccgtactgcagtagaagctccaccagttccttgacattggactcaacggcgagatgcagcaggtgttgggaggccaggcgccgtgctccgcgctctaagagcaacttggccatctgggtgtgacgacccctcaccgcgtactgcaaggccgtgtgattctgcttgtcctggatattgatgcgagcaccacgcttcaccagctcttcagctacgtccaacatgctgcaggcaatggccgccatcagtggtgtctcgccatcatcatccgtgtcattgatgttgatgttcgtttgaagcagtagacgggcagattccgcacacttgctttcgatggccatatgaagcgccgtcttgccatcactcagggttttggcattcaccaaggctccgtgcttgatcagtagctcggtgacaccggcgaaaccggcacccagatggagtggcgcgtatccatcgttattgaggacattgataggtgcgttgtgttccaacaggatgcgcacacactcctcgtgaccccagtaggcggcgtagtgcagcggagtggccacatcggcatcgtagagatgcggatcatgttcgcgacaggagacacagcactgggatgatatgaactctccggtggtttcgaaggttttcgcataatactgatacaattggctatcctcttcgccgctgcccgctccattctccgcactattctcgaactcatccacccactccagtttctccataccctcgggcgtccgctcgatctcgaggctatccgtgttcgctgcaattcaaaaccaacgtgaaacgttctaagaaagcagtttttgaaaatctttttgctaagacagtatgaagtacaggtttcaggtttgacaagattttcgttacttgccacatagaactagccgtgtctactgtgtctggttgcagttggaacccattgtcgagcattgttatcagccggttaactggccaaccgataaccggttttccggccttcacttacttttctctgtgcttgcattatgttggatagacccgaaaagagaaaagaatgcacaacaagaaattgagtacgtacaaaattaaccgactaaaattggatcattcaacttagtgggagtattaaaattataataaattctgtatagtattatatatactccaaaagtgaacaaacgaactggcacttcatttaaaattttcttgtatctaactaattcgtttcctggatccattgattattattattattatttatgtttatgttttacctttgaacaatatacatacacattatctagcttacccacagcatttttttttctaatgttctctatgtgtttgtttttaatgcaattaaattttccgaaagttagtttcgtttgttttcagaacgaaccagtggaaggaaaactcacactgatgaaagacattcagctcgggctcctcgcaggattgaagcagcagctccaacagttcggcatcgcccagaatggccgccgtgcccacggcagtgcgtccgcaagtgggcgatacatacgaggcctgggcaccttgcatgatgcagcccagagcctgctcgaaatctccgctctgtacggcggttagcaggcgttcgttgaggtcgtaggacagcattttgccatcgggttagtaatttagttagttaggctaactgaagctggttagcgaaaaggcgaagcgaaaagaacaaaccaaatgataagcagctgcttgtggggtggtgtgaaaagtgcgtcgatgtcgtcagtggcagcaacactcccccggaaagtctcatcgagaagtgaaaccaaacatccggcgtgcgcagaagcagtaccaatttttggctgcatagcgggtggtggttttctttttttggggcggtttgaattggccattctattgagcaaatggagagtacaataaagaagaaatcagctggcagttcgcttccaagcccactcatcgcttgtttggtttattttcgacgtctgtgtgtgcagttgctatgtttgtgggtagtgaatgttgttgcctcagcttaaaaaacgcttaacattagctaatctatttggtttcctttgcttccttggcaatttgcagcgattccgtgatgaagagtttggccagcgattgcgaacagaattgtgcgatatgctgggcgtgggtattgatctggccagaggttatggtggccgtcaggcggttgggcgcagtcatggggcggaactgtttgatcacttcctcctctggcaccgtgggctctcccttcgatgtgcgaacggcgttctcggcggccagcttagccagagcacggtgcttctcctaaaaaatataaatgcaaggaaagcgattaggaatttttacatatttaattatattgctacgtaccgtatcctgcttgaagaccacctgctggtacttgttatagcgcactgcctcctggtacaactcgtcgacgcgctcgatcaggctacgcatttggttctccaatacggtggcggtgcccaggtccaggaagttgtgccccttgtcctcgggcagcagctcgttcagctcgctcatcataatgttggtcagcggcgagttcttgatcacaatgggaatctcggcgaagaggttctcgtagccg

SEQ ID NO: 19550 - DNA, 1803 bp, DROSOPHILA
atgctgtcctacgacctcaacgaacgcctgctaaccgccgtacagagcggagatttcgagcaggctctgggctgcatcatgcaaggtgcccaggcctcgtatgtatcgcccacttgcggacgcactgccgtgggcacggcggccattctgggcgatgccgaactgttggagctgctgcttcaatcctgcgaggagcccgagctgaatgtctttcatcagtcgaacacggatagcctcgagatcgagcggacgcccgagggtatggagaaactggagtgggtggatgagttcgagaatagtgcggagaatggagcgggcagcggcgaagaggatagccaattgtatcagtattatgcgaaaaccttcgaaaccaccggagagttcatatcatcccagtgctgtgtctcctgtcgcgaacatgatccgcatctctacgatgccgatgtggccactccgctgcactacgccgcctactggggtcacgaggagtgtgtgcgcatcctgttggaacacaacgcacctatcaatgtcctcaataacgatggatacgcgccactccatctgggtgccggtttcgccggtgtcaccgagctactgatcaagcacggagccttggtgaatgccaaaaccctgagtgatggcaagacggcgcttcatatggccatcgaaagcaagtgtgcggaatctgcccgtctactgcttcaaacgaacatcaacatcaatgacacggatgatgatggcgagacaccactgatggcggccattgcctgcagcatgttggacgtagctgaagagctggtgaagcgtggtgctcgcatcaatatccaggacaagcagaatcacacggccttgcagtacgcggtgaggggtcgtcacacccagatggccaagttgctcttagagcgcggagcacggcgcctggcctcccaacacctgctgcatctcgccgttgagtccaatgtcaaggaactggtggagcttctactgcagtacggcgagagtttgtccgtatggaatctcaaaaacttcacacccatcatgctggccatccatcgggggcgtcacgaaatgcttgagtatctgctgaacgtggctgaggaacagcgcaagctcggactctactcggatgtccacgatgagggcttggttctgtttgccgtgcagcagaatttttgggttaaggagtttagccgcatactgcgtgtattgcttgccaaatcgcccagcgctcgtaatgatttctatgactcgtgtgctccgacaatcgtttgtggcctgatttattgtcacactccgttgtccagggccatcaacctgcaccgcctggaggtggccgaattcctcatccacgagggctgcaatctggcgcagatttgccgggaacatgtggtgaatgagctcagatcgaattgcacaccaacacgattggcctttgccaggttgctatgcaacgctggctttcagtttccgcacaagcaccgacccctgcccaaggactggccaccagcgcggctggaattcgagcgggaaatgtgtttgcttggcacccagccacgctccttgcagtctctcgctcgcctggagattcgtcggagtctcctgagatgcctgcaaacgcggccggaggtgcaggaaaggtatcttcccactcaggagcggtcatcgctggggaggattgtggatgagttcgccatacccgccaccttgaagcgttacctcagcgactttgacgaactgccgccggtgaggggtatggagccggtcgatatacctgttgttaaatggactgagtcttgggattga

SEQ ID NO: 19551 - protein, 600 aa, DROSOPHILA
MLSYDLNERLLTAVQSGDFEQALGCIMQGAQASYVSPTCGRTAVGTAAILGDAELLELLLQSCEEPELNVFHQSNTDSLEIERTPEGMEKLEWVDEFENSAENGAGSGEEDSQLYQYYAKTFETTGEFISSQCCVSCREHDPHLYDADVATPLHYAAYWGHEECVRILLEHNAPINVLNNDGYAPLHLGAGFAGVTELLIKHGALVNAKTLSDGKTALHMAIESKCAESARLLLQTNININDTDDDGETPLMAAIACSMLDVAEELVKRGARINIQDKQNHTALQYAVRGRHTQMAKLLLERGARRLASQHLLHLAVESNVKELVELLLQYGESLSVWNLKNFTPIMLAIHRGRHEMLEYLLNVAEEQRKLGLYSDVHDEGLVLFAVQQNFWVKEFSRILRVLLAKSPSARNDFYDSCAPTIVCGLIYCHTPLSRAINLHRLEVAEFLIHEGCNLAQICREHVVNELRSNCTPTRLAFARLLCNAGFQFPHKHRPLPKDWPPARLEFEREMCLLGTQPRSLQSLARLEIRRSLLRCLQTRPEVQERYLPTQERSSLGRIVDEFAIPATLKRYLSDFDELPPVRGMEPVDIPVVKWTESWD

SEQ ID NO: 19552 - DNA, 3650 bp, DROSOPHILA
ttatgtgcatatggcatgcaatctttttgtgcttggcggctgttttttctttcagtatccttgcgtttattgcattttttgaaaaggttttttgcttcaatccttacgttttagcaatgtaactttgggttttaaccaaaaatctgccgtgtgatttgcttttatctaactttatcttagtttaaaactttagaacatttgatatatcgcctgcatgtgaacagcttcttgagctatacgctactcaatcctgacacaactaacatactttctcaacgatttcccatccaaatcagcactagacagcggagcggagtgcagcgtttgcggatcgacgggggagaactgggtgtgcctgagctgcaggcatgtggcctgcggtcgctatgtgaacgcccacatggagcagcattcagtggaggagcagcatccgctggcgatgagcacggctgacctgtctgtgtggtgctacgcgtgctccgcgtacgtggaccatccccgcctgtatgcctacctcaatccgctgcacgaggacaagttccaggaaccgatggcctggacacatgggtgtgcgtggcgcgaggatggctgctatgcgacggggcccgatgggcgagatgaggatgacgatgatgataatggcgccggtagcagcatttgcctgcgactggagcgcaacaactgacccttagccatccgcgtgctggacgccctcacggactacttgtgcgcgctctgcccgccactaaggcacctaatccatttcctggccgagcacctctggccgctgctggagcgcatttaccttaacctgttgcactacttcctggcccactgagcaccccatatccaatcctctagcccgcacccacaactgatctgaaaactgctgcaactggcagccggtcggtcatcccctggagatcctggcaccagtcaccataccatttatacaaatgcaaattgttaaagttatcaactaatgatctaataaataattcaagtgttttttgagtttattttcgaatacagtttctagtttcgttaatgagatcgaacttcttaagttcagaggtatttattcataattctgttcatcccagccaaatcgacagttcatccacggttttatttaatctatatttctagattaactcaatatttgttgagtcataacgttggctactaaaaattacttctttttctgctgctttgccttccccttagaagctggagtgggttgctgctcgcgcttcattggcttcctcttccggtggccgtgatcactggagacatcgctgtcgctgtcggagaagtcgtcgttctccttgtcttccgatgagttgctttcttctgaggattcctcgtctttcttgttcttcttcttttccttcttcttctcggcatccagtttcttatcctgctcgtactcgatggtcacgaatccccgaggtgctgccggcttggcactttggtcagactccactttcgcctttggtttctcctccactttggtgcgttgttccaccggtcggacgttgccgaactggcggagatccagcaggcccaagtcggtgggtcggcagtccatgaagctgcgggcaatctcctccagcttgcgcgtttccatgtcgatcttccagactttgatttgaccagcgctggaaaagataaatttgtatatataaaaacgaataatgtgatgggtgttcttagttatctgggtgtagcttggatttttatagaataactcacatggagacggtggccaggaattcgttcagataggcgatggccttgacccttacctcgtgtgcaagaatgaaggtgggctgcaaagaaagcgcatttaagtatcatagataacaggctgagaaagtgcaattcttactggtgtatcatcctcgtccttgagggaaatccaggcaatgttgccgttgtccaggccagttaaacactcgttcccatccagccaggtgatgcaaatgggtttcgacggcatctcaatgcgacgcataacatgggcgttctcgatgccccagatctccagaaccaatggaccgctcagtgtgaagtgatcgccctgcttggaccacgacaaacagcccgtttggaaatccagcgtagccttgttctttaaattggtcttgtgggcgacgcagccattgaccagattccaggtgttcagcacctggtcgccgcccaaagataaggccaacttgctgctgggatggcaactgacatgggtgacggcctggccggcatgggccttctgccaatcatactctttggtccagctgcccacgcgtgtggcgatcatatggccatcatcgctcccggagagcaagagcgacaggtcaggcgtgaatttcagtgtgttcactcttccggcgtgcgagagtatgatctgcgactgtttccgcgtgcgcatgtcgtagacgaagatcctgccgtcggtaccgccactggccacccaaggccactgcacggccagcgatgtaatggatcttgcataggagctgtctgcaaaagtctgtttcagctcgaatttgacggaatcggtgaagccgtcagtcggcgatttgatgagcttgaagcccagcaggagctcctcgttggtggcctctatgatctccatttccggcggcatggcagcggtttgaaatgaaaatggaaatggaaaattaaatggatttgtcgaataagtcactaaattctattcaagaatttatttctgctgtcaaaacgtgttccagcggcaaggactattcgaagttagaggcggagaaactttttacgccaacatcgatgacatcgatgttttcgaaatatcagaaacatcgatgtttttctaggaatgttaagaacaattgctggaggatgaaaaggttgtcaccaaatactgcctttttatttaaaatattaaaaaataatccttaaataaaaaagatcaatgatcgaaaaagattaaagataaaaaagattgtttatattttataacaacatctatgtttttcgccaaaaacatcgaaacatataaataatttgaaaaatggttttatgtctcatgttatatattcaatatcgtatttactattttatttaaacgggaaagttgtttgaaatgcaaatagtgaaataccctataaatctgaaaaaaatcaggaaatactttacaggaagtgctattattttgaccaatttgcttaatgatttatgtgcatttagtatcttgtgtttattgagttttttgaaaagtatttttattgaatccttactgaattgaaatccatgcgaaaattacgttttagcaatgtatcttcgggttttaaccaaaaatctgccgtgtgatttgcttttatctaactttatcttagttcaaaacagtagaacatttaatatattaccagcaccagtcaccctaccatttacacaaatgcaaattgtttaacaatttcaactaatgatctaataattaatttaagtgttttttttagttttttttttcaaaaacagtttctagtttcgttaatgagatcgaacttcttaagttcagaggtatttattcataattctgttcatcccagccaaatcgacagttcatctatggtttttttatctatatctctagattaactcaatatttattg

SEQ ID NO: 19553 - DNA, 1497 bp, DROSOPHILA
atgccgccggaaatggagatcatagaggccaccaacgaggagctcctgctgggcttcaagctcatcaaatcgccgactgacggcttcaccgattccgtcaaattcgagctgaaacagacttttgcagacagctcctatgcaagatccattacatcgctggccgtgcagtggccttgggtggccagtggcggtaccgacggcaggatcttcgtctacgacatgcgcacgcggaaacagtcgcagatcatactctcgcacgccggaagagtgaacacactgaaattcacgcctgacctgtcgctcttgctctccgggagcgatgatggccatatgatcgccacacgcgtgggcagctggaccaaagagtatgattggcagaaggcccatgccggccaggccgtcacccatgtcagttgccatcccagcagcaagttggccttatctttgggcggcgaccaggtgctgaacacctggaatctggtcaatggctgcgtcgcccacaagaccaatttaaagaacaaggctacgctggatttccaaacgggctgtttgtcgtggtccaagcagggcgatcacttcacactgagcggtccattggttctggagatctggggcatcgagaacgcccatgttatgcgtcgcattgagatgccgtcgaaacccatttgcatcacctggctggatgggaacgagtgtttaactggcctggacaacggcaacattgcctggatttccctcaaggacgaggatgatacaccacccaccttcattcttgcacacgaggtaagggtcaaggccatcgcctatctgaacgaattcctggccaccgtctccatcgctggtcaaatcaaagtctggaagatcgacatggaaacgcgcaagctggaggagattgcccgcagcttcatggactgccgacccaccgacttgggcctgctggatctccgccagttcggcaacgtccgaccggtggaacaacgcaccaaagtggaggagaaaccaaaggcgaaagtggagtctgaccaaagtgccaagccggcagcacctcggggattcgtgaccatcgagtacgagcaggataagaaactggatgccgagaagaagaaggaaaagaagaagaacaagaaagacgaggaatcctcagaagaaagcaactcatcggaagacaaggagaacgacgacttctccgacagcgacagcgatgtctccagtgatcacggccaccggaagaggaagccaatgaagcgcgagcagcaacccactccagcttctaaggggaaggcaaagcagcagaaaaagaagtaatttttagtagccaacgttatgactcaacaaatattgagttaatctagaaatatagattaaataaaaccgtggatgaactgtcgatttggctgggatgaacagaattatgaataaatacctctgaacttaagaagttcgatctcattaacgaaactagaaactgtattcgaaaataaactcaaaaaacacttg

SEQ ID NO: 19554 - protein, 434 aa, DROSOPHILA
MPPEMEIIEATNEELLLGFKLIKSPTDGFTDSVKFELKQTFADSSYARSITSLAVQWPWVASGGTDGRIFVYDMRTRKQSQIILSHAGRVNTLKFTPDLSLLLSGSDDGHMIATRVGSWTKEYDWQKAHAGQAVTHVSCHPSSKLALSLGGDQVLNTWNLVNGCVAHKTNLKNKATLDFQTGCLSWSKQGDHFTLSGPLVLEIWGIENAHVMRRIEMPSKPICITWLDGNECLTGLDNGNIAWISLKDEDDTPPTFILAHEVRVKAIAYLNEFLATVSIAGQIKVWKIDMETRKLEEIARSFMDCRPTDLGLLDLRQFGNVRPVEQRTKVEEKPKAKVESDQSAKPAAPRGFVTIEYEQDKKLDAEKKKEKKKNKKDEESSEESNSSEDKENDDFSDSDSDVSSDHGHRKRKPMKREQQPTPASKGKAKQQKKK

SEQ ID NO: 19555 - DNA, 3550 bp, DROSOPHILA
tatcagccggttaactggccaaccgataaccggttttccggccttcacttacttttctctgtgcttgcattatgttggatagacccgaaaagagaaaagaatgcacaacaagaaattgagtacgtacaaaattaaccgactaaaattggatcattcaacttagtgggagtattaaaattataataaattctgtatagtattatatatactccaaaagtgaacaaacgaactggcacttcatttaaaattttcttgtatctaactaattcgtttcctggatccattgattattattattattatttatgtttatgttttacctttgaacaatatacatacacattatctagcttacccacagcatttttttttctaatgttctctatgtgtttgtttttaatgcaattaaattttccgaaagttagtttcgtttgttttcagaacgaaccagtggaaggaaaactcacactgatgaaagacattcagctcgggctcctcgcaggattgaagcagcagctccaacagttcggcatcgcccagaatggccgccgtgcccacggcagtgcgtccgcaagtgggcgatacatacgaggcctgggcaccttgcatgatgcagcccagagcctgctcgaaatctccgctctgtacggcggttagcaggcgttcgttgaggtcgtaggacagcattttgccatcgggttagtaatttagttagttaggctaactgaagctggttagcgaaaaggcgaagcgaaaagaacaaaccaaatgataagcagctgcttgtggggtggtgtgaaaagtgcgtcgatgtcgtcagtggcagcaacactcccccggaaagtctcatcgagaagtgaaaccaaacatccggcgtgcgcagaagcagtaccaatttttggctgcatagcgggtggtggttttctttttttggggcggtttgaattggccattctattgagcaaatggagagtacaataaagaagaaatcagctggcagttcgcttccaagcccactcatcgcttgtttggtttattttcgacgtctgtgtgtgcagttgctatgtttgtgggtagtgaatgttgttgcctcagcttaaaaaacgcttaacattagctaatctatttggtttcctttgcttccttggcaatttgcagcgattccgtgatgaagagtttggccagcgattgcgaacagaattgtgcgatatgctgggcgtgggtattgatctggccagaggttatggtggccgtcaggcggttgggcgcagtcatggggcggaactgtttgatcacttcctcctctggcaccgtgggctctcccttcgatgtgcgaacggcgttctcggcggccagcttagccagagcacggtgcttctcctaaaaaatataaatgcaaggaaagcgattaggaatttttacatatttaattatattgctacgtaccgtatcctgcttgaagaccacctgctggtacttgttatagcgcactgcctcctggtacaactcgtcgacgcgctcgatcaggctacgcatttggttctccaatacggtggcggtgcccaggtccaggaagttgtgccccttgtcctcgggcagcagctcgttcagctcgctcatcataatgttggtcagcggcgagttcttgatcacaatgggaatctcggcgaagaggttctcgtagccgaccttcagggtgcggaatgcctctggagtgaagtcgccatccttgtacatctgaatggcctgcggagtaaggcggtaggccttcaagcacaggaatccgcgggatgacttctgcgtatcgtagacgacaacgacggactcttcaatgctggtctggtagtggtactgcgattccaacagagccattgacaggctgttgcccacgtcggagctctggtaccagcccacatggagatgatctacgttgacgcgacgcaggcgacgcatcacggtcagctggtacatctcctcgtccatggtctcatcgccgctcttgggaaacgggaagcagttggtgatctccaggcacttgtctaccaccagaccgagcagggcgccctgggcgaggtccatgttgctcgactcctcatggcagtgcttcaccatcttcatgacggcctgcaaggtaaagtgatcgtagtaattatgttccaaaatcaattagcgacagacaactatttgcatttgaacaggggcgtggaaagtagatatatttcggactttcttttaatagtttctctgaagaaaacatttgactgaagttttttgtgctatggtaatgaagagaccggcccccttttccttatagctctacgcccatgtcctcacgaacacccatacaaacacacacaaagcacgcaaatttctgagacagcgcgtggcattaacttttccggctttcgcgccggttcccacgggccaatctcggccaggtcttttggccaacagcactactcaccagtccgtcgcattggacgtagttaatggtattatccgaatcctcggtgcgagcagcatgacgatttgcgcgatttgccatgttgacgaattgtaagcgaaaagacccacgacgtgaactcggctgcagtggtaaaagggcgtttcgcaacaccacaatttttgtgtgggttgaagtgttgaaaagcgtgcactgctttaaaatcagctgttcgggcgagcgataaaaaaaggcccaaaatatattttgtttatcagtggaaaagcaacagaaacaaactcaaaattgtacttcctagaaaaccgagaaacggcccacttgtcacgaacgagcggaacggtactgataactgcggttgccgcaacttgtagctagtcttagttctcttcgcattagcaacgcaacgctggcagtacgaagaccgcagaaatgtcaactaattggcgtgaattgttccccaccaagctcacatttgtgatcttcctgttgtacatgtccctattcataggacagggtatgcagctgccttattaaggctttttacgcaagccaaagccgcaccctaattcctgtctattttgcaggcatctttgtcacagcatctcaggaatcgaataactcctatggctacaataccgtcacggttgtgctgctaaccgaggtctttaaattgatagtctccacctgtctgtattgccgagagtgagtaggagtggaggcgctcctttgtctcgctattaaaccgcgatttcattcacagcaacaacctacgctccctggtgcgcgatgttcagaaggatcggaatgtattgggcttgtacatggtgcccgcctttctctactgcctgtacaacaatttggcctttgtcaacttggccacattcgatcccaccacctactatctgctactgcagctacgtgtcgttgtcacgggcatactattccaaattatcttcaagaagtacctgtcgcaaaggcaatggatctccctcatactgctgacactcggctgtatgatgaagcaggtcgatttcggcagcttctacagcgatgcgaatgatgacagcgagtccgcagccatacagc

SEQ ID NO: 19556 - DNA, 1144 bp, DROSOPHILA
tcaacatggcaaatcgcgcaaatcgtcatgctgctcgcaccgaggattcggataataccattaactacgtccaatgcgacggactggccgtcatgaagatggtgaagcactgccatgaggagtcgagcaacatggacctcgcccagggcgccctgctcggtctggtggtagacaagtgcctggagatcaccaactgcttcccgtttcccaagagcggcgatgagaccatggacgaggagatgtaccagctgaccgtgatgcgtcgcctgcgtcgcgtcaacgtagatcatctccatgtgggctggtaccagagctccgacgtgggcaacagcctgtcaatggctctgttggaatcgcagtaccactaccagaccagcattgaagagtccgtcgttgtcgtctacgatacgcagaagtcatcccgcggattcctgtgcttgaaggcctaccgccttactccgcaggccattcagatgtacaaggatggcgacttcactccagaggcattccgcaccctgaaggtcggctacgagaacctcttcgccgagattcccattgtgatcaagaactcgccgctgaccaacattatgatgagcgagctgaacgagctgctgcccgaggacaaggggcacaacttcctggacctgggcaccgccaccgtattggagaaccaaatgcgtagcctgatcgagcgcgtcgacgagttgtaccaggaggcagtgcgctataacaagtaccagcaggtggtcttcaagcaggatacggagaagcaccgtgctctggctaagctggccgccgagaacgccgttcgcacatcgaagggagagcccacggtgccagaggaggaagtgatcaaacagttccgccccatgactgcgcccaaccgcctgacggccaccataacctctggccagatcaatacccacgcccagcatatcgcacaattctgttcgcaatcgctggccaaactcttcatcacggaatcgctgcaaattgccaaggaagcaaaggaaaccaaatagattagctaatgttaagcgttttttaagctgaggcaacaacattcactacccacaaacatagcaactgcacacacagacgtcgaaaataaaccaaacaagcgatgagtgggcttggaagcgaa

SEQ ID NO: 19557 - protein, 307 aa, DROSOPHILA
MVKHCHEESSNMDLAQGALLGLVVDKCLEITNCFPFPKSGDETMDEEMYQLTVMRRLRRVNVDHLHVGWYQSSDVGNSLSMALLESQYHYQTSIEESVVVVYDTQKSSRGFLCLKAYRLTPQAIQMYKDGDFTPEAFRTLKVGYENLFAEIPIVIKNSPLTNIMMSELNELLPEDKGHNFLDLGTATVLENQMRSLIERVDELYQEAVRYNKYQQVVFKQDTEKHRALAKLAAENAVRTSKGEPTVPEEEVIKQFRPMTAPNRLTATITSGQINTHAQHIAQFCSQSLAKLFITESLQIAKEAKETK

SEQ ID NO: 19558 - DNA, 6636 bp, DROSOPHILA
agatctaaaatgtaatctttccatcagagattttgaccagatgagcggtttatcggttgtccaggcttgtctagcactgtgcttttacaaatcaataccagagcagctaatcaatcaagtattctgcgtgaaattcattcagcgaatcgaggatgagatacaagtatgctactcaaaagcaacgtatccggagagggtccttaacctggttatgcaactgaatcgcacagtatgcctggactttcccgaggcgaatgtgccctggtttcaacaaaactacatcgaggcgcagatcagcaaaagtaacatataactacaattctgtattaggcgttctttatcatattatctttttagaatccttaatacccagtgagtccacaacagaggtgaagcagctgctgcatcagcttcttcaaaatgacaagcatttccgctgcaaccacactacaccctacggctaccaaatagactttgtgatacatttcgatcgggataaaaatcccatcccagcacctcccgtggaggcaaccatgttggatcgcataaccaagtaggcacacaaatggaagttaccttattcaggtacttcattaatgactccaatttcagagtggcaatactactgctcaagctcgactctttttgtgaaaacgatctgactgcattgcggggtcctgaatctttgaagatgcgacatctagagatgatgggctacaaagtgatgcagatcaacgagcacgactggaactccaagtatatggcgtcatcaacagccaaggccaactaccttaaatgcttgttacaaatttcacattagctttcatttctattcgttgcgacgacattactcataagtacgcttatttgagttttaaagttgtttgagtgtttaagtttattttataaaaatagtaaacaaattcgtgtatatagtatttagatatatcaggtcataaatgccaagaacctatttaactgctttcaattcatctagaatatctattgattcgacttgacacaccaattgtacgcgttgttaaacataatctgccaaggactttccgattgtgtgggggaaacttcgaatgaagatggcacatagggccactggtacatggaggagcatcgctcgggatgtggcatgagggccaagtgacgtccatccgacgagcaaaggccagcaattccctgaggactaccgttcgggttaagtggatacagttccgtcggtttgcctacatcatcaacatattgcaatgtcaccagctgttccgactgcaagtggctaatgagcttctcgtcgcggaatgcaaagcgaccttcgccgtgagccacccaacagccaagaaccagatccttcatacttccgagcatgatggagcgattgcttggaatcttcacggtggcccaacgacactcgaaccgctgcgatttgttatggagcagggccacgtcgggatctgcgcccacctcgctctttgcactgccaacaaatcctataagtgtcatcagctggcaaccattgcaaatgcccaaggagaacacatcttgacgacgcttgaaagcctcaaactgaggcaacaagcggggattgtggaggatgtttgctgcccagcccttggcggatcccaaagtgtccgcatagctgaagccgcccgggaaaattagtccgcggtattgggacacgcttgcggtgcctgaaatattaaattatttgctttagtacttccccctttattagaatttaccattgagtttaccttgaagaagatccgacatggtcacatcgtgcacctcgaagttagccctcagcaggcaggccatcatctcgcgctcactattgacaccctcctcacggagcacggccacgcgaactggggcggaggatcgcttgagagtaagctcggcctgcacattctgaggtcccctatactgaggtgcttggcgatactcaaggctattgtactctgcctcggcgcactcagggttggcctgaagcttttccagctcgtaactggttctctcccatttcttgtagagcacacggagtggctggtccagcagctctgacttgccgttcttgagtaccactctggaatccagtccgaatccctcggtcacgcccaaatagtagtttggtactcctgccttttcgtaggtagatcgaactcgttccaggtctgtgtccaggacttccaccacccatccacactcctcggcgaagagaacagctagttcgggacgattaagtttctcgacagacttatcgaagttcttgagcttggccaagggctccgatagatccactctaaggccactcagtcctccgatggccatctccaatacgcaaacaagcaatcctccgtcgctgacatcgtgtcctgcttgaataagtccatctcccaacaacgattgagtcacagcaaatgctttgcccagcacatcactccttgtcaagtttggcgtatctttgccctgctgcgcgtatgcctgagccagagccgatccacctaggcgagcgctgttctccagatttatccagagcagggaagtcttcgaccccgcgccgggtcctttaagatcaggcgttacctttagccgcacatccggacagggagcataggtggagatgacaagagtacccggggactttattgtctcaccgcccaccttagccgccatggacagggagtcctttccgccatcgatggcgatgtgaagttcctcaagaatctgacagagctccttgcaggcgtcgaacatccgggcaccctcgccgggcagctttgcagcccacatccagttgccagagcacttgacatcagccagttcgctgatctttacaaacacaaggttactcaacgcttcagccacacacatcctggccattgcggcgggatcaagcagtccttttagtggctgtgtaccaattgaagtggcgattccagagtgactaaagtgggagacggtggttaacgcgtagtccgctagtggagcttggagcggtcccacgcactgttgctgtgcaatcaatccaccgacgcagcgatccaccttgttggtcaggaagcgcttgctaccgactgccaccaagctaagaactctctccaaggcctcgtccagaaggagacctttcggcagactcaactccttgagcggcgtctgttcgcgtttcaagtcgtacgttctcttgggcatgtcgcccaaaacgtacttaagttccaagtcgaacggtgagacttcgctgcgattggacgcattcaacgcctgttccagatccttgggggcaggcttctccagcagcgttactcgcccatctccggtcaccactcccacgaagctgatgggacagcgttcacggcggcagatcttttccagcagttcgcgttgatcagcgttgcaaagaatggcattgttttcctggtactcggcaccccacagttcgagggcagtgatcgtgggatcgccgagttggaactccttggagaagataacagctccggcaaagcctggttccactagctccttgaggacattgccgttgccgccagccccctggtcatggatggctaatatggggttttgctcgcccaggtctagacaggctcgcaccacacggttcaatttattctccatttcggcgtctcctcgctgtacggcattaaaatctagctcagcatctccggatccttgtatctccacagagcttgcggcgccgccacccactccaatcctgtacactgggcccccgatcttggccagcaactgaccgcgtgccggcggcagcttctcgcgcatggtagcgggcatggtgcccaagccaccgctgaacatgatcggtttcacgtactcatcccgctggctggcatcggcagcactgttcagtccataggagagggcaaaaccagagatcactggctcgccgaacttatttccgtagtcggaggcgccattgctcgcctcaatgagcacctgaagtgggggcgcaaacgtcgcagggtatttaaagtccaaaggctcgtacggctgtttgtaacctgcgacgacaagaaagtcgtgatgtataataaaaactaataggaactaaatactcaaaaaaaaagcaatgctcacctggaatgtgaagagcgccaacacagtagccagcggtgccggcgatcggcacgcctcctctgcccacgccctggacatcacgcagtcgtccgccagtgccggtggtggctccgctgaaaggcgccactgcagtgggcatgttgtgggtctccgccgtgaaaatcaggtcagactgcacgctctgcagacgcactgcgccgggagcgaccacggaggacggaactatggtctggtgatcgaatcccaccatggcactgctgttgtcgctgaacttaatggtgttgttcgggttcgtgtgggcctgcgtgtccatgatcatgcgaatcagcgacttgggctgctccacgccgtcgatcaccatacgtccgcggaaaaaccagtggcgcgagtgctcactgttgctctgggcgcaatcgaagagctccacagtggtgggattgcggcccagctccttggcaaacaagtcgtggtagtagtccaaatcgtagtcgttgaaggctaagcccagctcctgattaatccgctccagtgccgccctaccctcctccaaaacgggcacgaaatgccagttggcctggcgctcaggtagctgctcgtcaaagctcgccttgggggtattctcctcggtgtacaagcactgggtcatgcggtcaccgagcagaggaacaaacctggctgcctccggcgcctttgatccctcgccaaaagtaaccagatagcgggtggaggtttccatgcgacgcacctctgagtacccgagattctggaatatgttcacgcagttcgtggagtacggcgtggagaagttaaaacgcggcccgatctccaggagcaactgactcgacccagttgactgcagggcaggttgcctggacaagctctggcctttgctcagcggttgcttgaccagccacaccagcagctcgtccagggccagtgagtgctctgcctgagcgctgtactccagatgatagcagcgctccatgcgcacggacaccacggcgccgtcttcctcgcgcaaccgacgcaggacactctcctcctcggccgcggagtgggcctgcacatcgtagtagcgaaggatgaccatgtcgtggggctgcaagaaacgaaaaatgcggattgagtacagacagtgtgcactccttgctcgtcgaatcgagaatgatcttgggagttgcgaagcggttgacgaccagtgggtccgtgcccacgctgggggttatcaactggcggcacctataccacagccacacagcccacaacccacagcagcggatcaggttacagccgagcgaaatcgatggaatcgcctgcagcaatcgctgcactggcgtcacaacttgtttttgtttttccccggctgggagtttgctgataagccggcgtaaacatattttccattacgaacggaaacctgcgttgctgaatggtcggaatttaggtaaataattaacgccaaataccccaaattgaagcacaataacactaacactgagcggagcacacgtgcgtcttagctgcaaattacgatcgttttgaggctccagctcggtttcccctcatttcgcggctcaatccaccacagcgttcggttggccagtgctgcacagcgactgccgctggaattcaaattaacccttaggcgaattgagctttaaaagctttcgtaaattgtacccattgcgtaacttgcaagggttaatgctacacgggttcaatgaaccaaatagtttaattgtaattcgtaaggattacttgtttattttgattaaaagcttacgaaaactgctaaataaataagttacttcttttgataagttaggtaaaagtatttcaccttgtccctagaacacctgctgtttgatcatcaacttgtttccaagcacccactttccccttcaatcacattcttcgcaactgttgaaccagataagggacatatcagtttccatgtctgcgatgctaactaggtacacagttgttgagccactaggcacgtgggcttttgatgataagcgaataaaacagacgccaaaaatcgctaatcaagtatgtatgtagagaaaaaacccacaaatcgactttcttgggttttatttatacacagaatgcttaaaattgctgcagttgcacatgcgaacgtcatgcaaatgcaaaaaaaaaagacgcagtacaagtgtgctgcgaattaaaattaaacaattgaacttgacactggctggtcgtaggcaaatatgtcgtttaattgctcctctcgttcttcgaaatctgcggcggcttacaaagcttacattgactatgtactttaggtttatatatatattgatctgcatgaatgggggccagcattagcgcgagttccttccagttcagccattcgggggcacttctttatcgacatgactcattagcagtcgattcgttcgaaggggagtaataattataaaatatatgcattgaatggcttgagaatagaggaaggtgttgctgtcccacatgttgctgtccatgtccatc

SEQ ID NO: 19559 - DNA, 4121 bp, DROSOPHILA
ctaagacgcacgtgtgctccgctcagtgttagtgttattgtgcttcaatttgggatggtcatccttcgctactacgatgtgcaggcccactccgcggccgaggaggagagtgtcctgcgtcggttgcgcgaggaagacggcgccgtggtgtccgtgcgcatggagcgctgctatcatctggagtacagcgctcaggcagagcactcactggccctggacgagctgctggtgtggctggtcaagcaaccgctgagcaaaggccagagcttgtccaggcaacctgccctgcagtcaactgggtcgagtcagttgctcctggagatcgggccgcgttttaacttctccacgccgtactccacgaactgcgtgaacatattccagaatctcgggtactcagaggtgcgtcgcatggaaacctccacccgctatctggttacttttggcgagggatcaaaggcgccggaggcagccaggtttgttcctctgctcggtgaccgcatgacccagtgcttgtacaccgaggagaatacccccaaggcgagctttgacgagcagctacctgagcgccaggccaactggcatttcgtgcccgttttggaggagggtagggcggcactggagcggattaatcaggagctgggcttagccttcaacgactacgatttggactactaccacgacttgtttgccaaggagctgggccgcaatcccaccactgtggagctcttcgattgcgcccagagcaacagtgagcactcgcgccactggtttttccgcggacgtatggtgatcgacggcgtggagcagcccaagtcgctgattcgcatgatcatggacacgcaggcccacacgaacccgaacaacaccattaagttcagcgacaacagcagtgccatggtgggattcgatcaccagaccatagttccgtcctccgtggtcgctcccggcgcagtgcgtctgcagagcgtgcagtctgacctgattttcacggcggagacccacaacatgcccactgcagtggcgcctttcagcggagccaccaccggcactggcggacgactgcgtgatgtccagggcgtgggcagaggaggcgtgccgatcgccggcaccgctggctactgtgttggcgctcttcacattccaggttacaaacagccgtacgagcctttggactttaaataccctgcgacgtttgcgcccccacttcaggtgctcattgaggcgagcaatggcgcctccgactacggaaataagttcggcgagccagtgatctctggttttgccctctcctatggactgaacagtgctgccgatgccagccagcgggatgagtacgtgaaaccgatcatgttcagcggtggcttgggcaccatgcccgctaccatgcgcgagaagctgccgccggcacgcggtcagttgctggccaagatcgggggcccagtgtacaggattggagtgggtggcggcgccgcaagctctgtggagatacaaggatccggagatgctgagctagattttaatgccgtacagcgaggagacgccgaaatggagaataaattgaaccgtgtggtgcgagcctgtctagacctgggcgagcaaaaccccatattagccatccatgaccagggggctggcggcaacggcaatgtcctcaaggagctagtggaaccaggctttgccggagctgttatcttctccaaggagttccaactcggcgatcccacgatcactgccctcgaactgtggggtgccgagtaccaggaaaacaatgccattctttgcaacgctgatcaacgcgaactgctggaaaagatctgccgccgtgaacgctgtcccatcagcttcgtgggagtggtgaccggagatgggcgagtaacgctgctggagaagcctgcccccaaggatctggaacaggcgttgaatgcgtccaatcgcagcgaagtctcaccgttcgacttggaacttaagtacgttttgggcgacatgcccaagagaacgtacgacttgaaacgcgaacagacgccgctcaaggagttgagtctgccgaaaggtctccttctggacgaggccttggagagagttcttagcttggtggcagtcggtagcaagcgcttcctgaccaacaaggtggatcgctgcgtcggtggattgattgcacagcaacagtgcgtgggaccgctccaagctccactagcggactacgcgttaaccaccgtctcccactttagtcactctggaatcgccacttcaattggtacacagccactaaaaggactgcttgatcccgccgcaatggccaggatgtgtgtggctgaagcgttgagtaaccttgtgtttgtaaagatcagcgaactggctgatgtcaagtgctctggcaactggatgtgggctgcaaagctgcccggcgagggtgcccggatgttcgacgcctgcaaggagctctgtcagattcttgaggaacttcacatcgccatcgatggcggaaaggactccctgtccatggcggctaaggtgggcggtgagacaataaagtccccgggtactcttgtcatctccacctatgctccctgtccggatgtgcggctaaaggtaacgcctgatcttaaaggacccggcgcggggtcgaagacttccctgctctggataaatctggagaacagcgctcgcctaggtggatcggctctggctcaggcatacgcgcagcagggcaaagatacgccaaacttgacaaggagtgatgtgctgggcaaagcatttgctgtgactcaatcgttgttgggagatggacttattcaagcaggacacgatgtcagcgacggaggattgcttgtttgcgtattggagatggccatcggaggactgagtggccttagagtggatctatcggagcccttggccaagctcaagaacttcgataagtctgtcgagaaacttaatcgtcccgaactagctgttctcttcgccgaggagtgtggatgggtggtggaagtcctggacacagacctggaacgagttcgatctacctacgaaaaggcaggagtaccaaactactatttgggcgtgaccgagggattcggactggattccagagtggtactcaagaacggcaagtcagagctgctggaccagccactccgtgtgctctacaagaaatgggagagaaccagttacgagctggaaaagcttcaggccaaccctgagtgcgccgaggcagagtacaatagccttgagtatcgccaagcacctcagtataggggacctcagaatgtgcaggccgagcttactctcaagcgatcctccgccccagttcgcgtggccgtgctccgtgaggagggtgtcaatagtgagcgcgagatgatggcctgcctgctgagggctaacttcgaggtgcacgatgtgaccatgtcggatcttcttcaaggcaccgcaagcgtgtcccaataccgcggactaattttcccgggcggcttcagctatgcggacactttgggatccgccaagggctgggcagcaaacatcctccacaatccccgcttgttgcctcagtttgaggctttcaagcgtcgtcaagatgtgttctccttgggcatttgcaatggttgccagctgatgacacttataggatttgttggcagtgcaaagagcgaggtgggcgcagatcccgacgtggccctgctccataacaaatcgcagcggttcgagtgtcgttgggccaccgtgaagattccaagcaatcgctccatcatgctcggaagtatgaaggatctggttcttggctgttgggtggctcacggcgaaggtcgctttgcattccgcgacgagaagctcattagccacttgcagtcggaacagctggtgacattgcaatatgttgatgatgtaggcaaaccgacggaactgtatccacttaacccgaacggtagtcctcagggaattgctggcctttgctcgtcggatggacgtcacttggccctcatgccacatcccgagcgatgctcctccatgtaccagtggccctatgtgccatcttcattcgaagtttcccccacacaatcggaaagtccttggcagattatgtttaacaacgcgtacaattggtgtgtcaagtcgaatcaatagat

SEQ ID NO: 19560 - protein, 1354 aa, DROSOPHILA
MVILRYYDVQAHSAAEEESVLRRLREEDGAVVSVRMERCYHLEYSAQAEHSLALDELLVWLVKQPLSKGQSLSRQPALQSTGSSQLLLEIGPRFNFSTPYSTNCVNIFQNLGYSEVRRMETSTRYLVTFGEGSKAPEAARFVPLLGDRMTQCLYTEENTPKASFDEQLPERQANWHFVPVLEEGRAALERINQELGLAFNDYDLDYYHDLFAKELGRNPTTVELFDCAQSNSEHSRHWFFRGRMVIDGVEQPKSLIRMIMDTQAHTNPNNTIKFSDNSSAMVGFDHQTIVPSSVVAPGAVRLQSVQSDLIFTAETHNMPTAVAPFSGATTGTGGRLRDVQGVGRGGVPIAGTAGYCVGALHIPGYKQPYEPLDFKYPATFAPPLQVLIEASNGASDYGNKFGEPVISGFALSYGLNSAADASQRDEYVKPIMFSGGLGTMPATMREKLPPARGQLLAKIGGPVYRIGVGGGAASSVEIQGSGDAELDFNAVQRGDAEMENKLNRVVRACLDLGEQNPILAIHDQGAGGNGNVLKELVEPGFAGAVIFSKEFQLGDPTITALELWGAEYQENNAILCNADQRELLEKICRRERCPISFVGVVTGDGRVTLLEKPAPKDLEQALNASNRSEVSPFDLELKYVLGDMPKRTYDLKREQTPLKELSLPKGLLLDEALERVLSLVAVGSKRFLTNKVDRCVGGLIAQQQCVGPLQAPLADYALTTVSHFSHSGIATSIGTQPLKGLLDPAAMARMCVAEALSNLVFVKISELADVKCSGNWMWAAKLPGEGARMFDACKELCQILEELHIAIDGGKDSLSMAAKVGGETIKSPGTLVISTYAPCPDVRLKVTPDLKGPGAGSKTSLLWINLENSARLGGSALAQAYAQQGKDTPNLTRSDVLGKAFAVTQSLLGDGLIQAGHDVSDGGLLVCVLEMAIGGLSGLRVDLSEPLAKLKNFDKSVEKLNRPELAVLFAEECGWVVEVLDTDLERVRSTYEKAGVPNYYLGVTEGFGLDSRVVLKNGKSELLDQPLRVLYKKWERTSYELEKLQANPECAEAEYNSLEYRQAPQYRGPQNVQAELTLKRSSAPVRVAVLREEGVNSEREMMACLLRANFEVHDVTMSDLLQGTASVSQYRGLIFPGGFSYADTLGSAKGWAANILHNPRLLPQFEAFKRRQDVFSLGICNGCQLMTLIGFVGSAKSEVGADPDVALLHNKSQRFECRWATVKIPSNRSIMLGSMKDLVLGCWVAHGEGRFAFRDEKLISHLQSEQLVTLQYVDDVGKPTELYPLNPNGSPQGIAGLCSSDGRHLALMPHPERCSSMYQWPYVPSSFEVSPTQSESPWQIMFNNAYNWCVKSNQ

SEQ ID NO: 19561 - DNA, 3215 bp, DROSOPHILA
cactaatcctctcgagaattccccttacccaggtgtggggaagacctccctgacgcacctgatcacccacaacgaagccctcatccggcccggctggacggtgggctgcaacatccaggtgaagatgcatccgttcagggagggcaccgctcgcgagtgtccctacttcgtggagctgttcgatgttgggggatcgctgaaccacaagaacacgcgcagcgtcttctatgcgggcatcgatggaatcattctggtgcacgaccttaccaacgccaagtcgcagaggcagctaatcgactggctgtacgagatcgtcaacaaggagggcaaggatacgaacaaatcgaacggagcctccatgccgccatcgccgcccagcccgctgagcagcttctcaacggacaacctcggaacggacggccacattctcttcgacatggaggagtttctgggcgccacgcaaacgcctatcctggtcatgggcaccaagctggatctcttggacgagaagcgccatcccaaaatgggggtgaagaagccgggcggaataggtgcctcctaatatgacatttaacaaatgcttcctcctaacgtttatctatttcaatatccctcagccgacaagtgtggagccgaggagatttggctaaattgccgcaacagtcgcagcctggccgctggtaccactgatgccgtgaaactgtcccgcttctttgaccgcgttatcgaaaatcgcaaagcgctgcgcgcagccctagcattcggagtgagcagctccaacgccgtcagtccgcccgacaggcgacgttttggcccgaccagtgccaaaatggaagacagcgtcttgcccctcctggatacccaagacctcaagtgactaatgcactcaattcagtagttctaagttgtagttatcgtacgggaagcattacaaaaagaaacgattaattcccattataaaatcagacttgctgttgtttagaaaatgttatgcattgccttaggagcgcgttttgagcaaatctcgataccagttgggcaggatttgatgttccggaccgcgcagcacttcgtagctggcgtgcttatttaaaaaagtcacctggaccaccgcaaacggatcgttaatgttcaccagcagcttcttaagattgcgcagaaactgttccaggtaccaagccattgccgatgcactccacggtttgttgcgggccagtgttgccacatcgatctcatcgatcctctgcagcatgcccttggtgtcgcggagtcccacgtagagcgtagtgatgcccaccaggaatgactgactccaccagttggcagacttgaacgatttgaaggtgcgaatttggtgagggttcatattgaagacgctggtctttagctctacgaatttcaatgagtcgagcactctgcaatctttgaagtcactaatgggattcgtgtaagtgtatacacaaataatgaatggatggaacattaatcattcataagtatttaaaccctggaccactcacactggctccttgctgtccacacagtccagttcggcgccgtatagcatcaaaatcccggccaggttcgtgcggtacacgcccatgaactcctctgcctcgttgaccggcacattggtcaccggttttccctgcgcctgggcactggtcaggtactgctcgaacttgaagccccaggagcacatgacccgctgtgccctgctcatgttcgcgttctccagctgctgctctggggtttcctccttgcacatgtagacgttgccgttcaggagcgtcgccttgacgcggaatgagcgattatcatactgcaggcacattatctgccgcaaaataccgcgcagtgttacaaagtcgctgtccaggcgtagatttctcgcatcggagctactctgacggagcagctccttctggtgttgcttaatgtaggtcagcataatttccagatcccgtttgccgttctcgacgggcttacggatcacatcctctatacccccgttaagatcgaacggcagcggtggccacggttggccagccaagtagctggcgcagctggcgtcgtccacaaattcccggctagcgtttatgctgcacacaccgatgcacttcgggcggcttatcgagggaaacggcgtattgtacatcgcgcccagcttgtgctgcccccagggcacactgatgaagcccgcgttctcggccatttccttcgcctccgcggattttccaagttcaaactataattatccggaaaataacgctaatatttattagaggtggagaaaaatcgcaaacatcgatgtttttcgaggaatcatcgattattttctttctccactgcgcaactaaatgggctaagaccttgggaaatggttgtggtgagaatcaagtgtaggcgattagtatcgaaagctaaattgtattaaaaatgggatgatgatgtgcttattaattttaatgtaataagtgaacgctaatgatgatagtacctcgatgaagagaaaaaattttgactcttagatttgctttatgttctgtttgagcacgtctattcaccacgaggtatttgcaagcttaaatcaaacaatttgtgtgaccacagtcatgggaatctaagaatatactaaataccaaaataacacgaaatccgattcggttttgttcatagatttgtttttatgtttatttgtaaccaccaaacgtggctggccaatgaagcatctcctggaggatccctcggtcctggccgagctgcaggtgctgccggataagaccggtggtgtacaggatcgacaggaggccgccaagaatcctgcagagaattccgtgcccgacgaagatttgccggctgcaggaggcgatttgctacgcgttaaggatactctgggccagctggcctgcagtctgcacaagctgtccaaaaacgatcacatagtcatcgatcggtgggtagtaatccctattttttggagctttcattcaccttctctgatcacgttccgtgatcttttattcctgtgcagaaagcgccatcaggtgattcgcacagatgcggctacgcaacaattaacgatttaccgctgtccggatcccgccgtcatggggattcgcccggcgatagagaaaaatgcccagaatccgcctgccaaagtgggtagaccatcgaaaagagcctgttcggttgccaccgctcctgtggcgaag

SEQ ID NO: 19562 - DNA, 1128 bp, DROSOPHILA
atggccgagaacgcgggcttcatcagtgtgccctgggggcagcacaagctgggcgcgatgtacaatacgccgtttccctcgataagccgcccgaagtgcatcggtgtgtgcagcataaacgctagccgggaatttgtggacgacgccagctgcgccagctacttggctggccaaccgtggccaccgctgccgttcgatcttaacgggggtatagaggatgtgatccgtaagcccgtcgagaacggcaaacgggatctggaaattatgctgacctacattaagcaacaccagaaggagctgctccgtcagagtagctccgatgcgagaaatctacgcctggacagcgactttgtaacactgcgcggtattttgcggcagataatgtgcctgcagtatgataatcgctcattccgcgtcaaggcgacgctcctgaacggcaacgtctacatgtgcaaggaggaaaccccagagcagcagctggagaacgcgaacatgagcagggcacagcgggtcatgtgctcctggggcttcaagttcgagcagtacctgaccagtgcccaggcgcagggaaaaccggtgaccaatgtgccggtcaacgaggcagaggagttcatgggcgtgtaccgcacgaacctggccgggattttgatgctatacggcgccgaactggactgtgtggacagcaaggagccagttgacttcaaagattgcagagtgctcgactcattgaaattcgtagagctaaagaccagcgtcttcaatatgaaccctcaccaaattcgcaccttcaaatcgttcaagtctgccaactggtggagtcagtcattcctggtgggcatcactacgctctacgtgggactccgcgacaccaagggcatgctgcagaggatcgatgagatcgatgtggcaacactggcccgcaacaaaccgtggagtgcatcggcaatggcttggtacctggaacagtttctgcgcaatcttaagaagctgctggtgaacattaacgatccgtttgcggtggtccaggtgacttttttaaataagcacgccagctacgaagtgctgcgcggtccggaacatcaaatcctgcccaactggtatcgagatttgctcaaaacgcgctcctaa

SEQ ID NO: 19563 - protein, 375 aa, DROSOPHILA
MAENAGFISVPWGQHKLGAMYNTPFPSISRPKCIGVCSINASREFVDDASCASYLAGQPWPPLPFDLNGGIEDVIRKPVENGKRDLEIMLTYIKQHQKELLRQSSSDARNLRLDSDFVTLRGILRQIMCLQYDNRSFRVKATLLNGNVYMCKEETPEQQLENANMSRAQRVMCSWGFKFEQYLTSAQAQGKPVTNVPVNEAEEFMGVYRTNLAGILMLYGAELDCVDSKEPVDFKDCRVLDSLKFVELKTSVFNMNPHQIRTFKSFKSANWWSQSFLVGITTLYVGLRDTKGMLQRIDEIDVATLARNKPWSASAMAWYLEQFLRNLKKLLVNINDPFAVVQVTFLNKHASYEVLRGPEHQILPNWYRDLLKTRS

SEQ ID NO: 19564 - DNA, 3888 bp, DROSOPHILA
tatgtatatataatgacctgatcccgattgcgaacctctcaaataaggtgaaaccataaaactgatcgtttaattcaattccgatttcaaacaatgtgagtcgagttaaaaaatgggaaacaggtgcatagatctgcattatttctggtattcccatacaaggtaggggatgtgaaacaataggatcgttggggaggggatggtaatttggaatagagttaacaataaataagattggcatgtagtgcgtcctatcgctcatctgcggaatgtccttgttttacgtgcgtgtgtaagtactcaaaagttgaatatttcactttagtttagctgttgcagtgtttgtgttcgtgtgtaaattgatttaaacttagtttgcatttttataattgcattatctcgacgttaacaaattacattttagtataatttccatataaattatcgttactttgacttatacaattaacaaccaggctaaatagttcgctacagatccccgcccactgagaactctgcccacgctcatcgtactccttcaattagagcgagatgcaactacgcaggcagacagagagagagagagagtgagggagagggggagagtggtgggcggggaaactaatacacaatttcaattgaattataaatctttaactttaacgcgtgacgcctttgctgaatgttatgttcaatcttttggtcttgttcaaaacgataataatttgcttgcaaatggtgaataaaaaaaaaaacatctggagtcttaaaacataaagttctgggtgataggagcgcagcagcagcagcagcaggaggaacaggatgatgtatatctagaactgcacccagttggcgttggccgagttctgttgtccttggttgccactagaaaaccaagaattcgcaatgtaaagcagatatagttgggaataatcccagttacaactcacccggctgatgcgtagtcggtccattcggatcctccagcggcgggtctgtgggcgggcgaaacgccgggactttgccgtaccgtcgtgtttgcggcggctgcggccggtggcggagcgatcttgccaaggccaccgggcggcggtggcagcacgcccgaggagcctttgttcttgccagtgcgcgaggatccctcggagccgtcctttttctgaaacaaacaacgaagttcccatccattaaacaagttcggattcaacggttttttaggtttgaaaacgttatcttcggccacaaacacaatgatcaagtttcaacatctcagaaactcagatatgctgattaagcaaaatgagtggtttggatggggaagtcttctttcccagaaaaatagctgatatagcagcattcaaagtacatgcagctacacccaccgttatccgcatgttgatcttgatggtctcgccctccttgaatcccagatcgagctcctgcttgggctccgtcttctccttctcgatctgctcctggttctttacccacttgaagtgatcctgcagcgcaacattcagatcgaacgaatcggatcgatcgccgaatccgaggcccagaaatgccgatcgcccattatcgtcctgcacgcggatgacaaaatagcgggagctatctgaaaccgcctcgatggccacgccgggatatgtgtcgatggggcagttggcgaacagggcaccactggtcttgtcctccagcttgaggacaacggcggtgcccttggccaccagtcgcatcctgcccgtccaggtgggctcctttaagttccaatctcccgctctgcgaataggataaatcacttagaatggttctcgcttcttctggcgaaaattgtatgcgcacaatgataaggaaagttcaatatattatttaggtctaaagatctgacagaaaactaacgaaatggactttatctagcgtttctagtctaagaatgcttttagtttccatgttatctgcaagaacttccattttttgttgtagttgtaagaagttaatagatcaagatgataaaggatttgtgaggaaatcatgcatattatgatcccaagatgatatatatatacagaaagaattaactatctcgtaagataattgatattacgatatatttaggccataatttggaatggaaaaaccggtggaatgtggttcttgtggattaattcgcttggcattcgattaatgggtcgttcgtagtagctttttaattatggtatacccccaatatttgagttattccgataatttgtgttatttgcccacctgagcgcagttaactgtgaaatgaacagcaacaaaaggaaaacaaagagagtggctgcaaatagcaacaattacacgcacgccagcgaagctttttcgctgccccccgtttctttctgtgtgtttatctgtttttttttttttgtttttgttcttggctccctgatacgtgtaagtgaaaatgttcaacaataattccaggaaaaaaaatcaattggatttgaacttcacagcctcagcagcagaagtcgcgctgcctttaaccttgactttttcttagaaaaacataattaatgcattcccacacccccagtggatatatgcacatatatatttagttatatgtgcagtgagtgggcgttgaaatgcacgaagaactttcaattttgatggcagaaaatccaaaagcaaggggcgaaaaaaagtagtcacctggtttgccagccgatttgtcgacttacctataaccacgattgctcgcacggggtggtattttgtagataaacacctccggcttcacgatcagcacactttcgtattccatcttattcgaagttcagataaatttgattttgtttattatctgaatctttccaagtgtttttttaagctttagccagtgtgaccggcgggcgatagtctgcatatgccaagcgaccctcgaaaatataccaacacaaaagtgttgaacatcatttttaaattcagatttaaaaactattaaattgattaaatgattaaacattttaagttcaaatctaatgtttttttggaaaataacattatcgtagtttaactatcactgaaatttgtgtcattattaacatttcttagtagttagtagtagtcattgaatgctagtgtggctgcaaccaataaaatgagttccaatcaaatggcgatgaataatcgagtgcgaattgttgtggttggcgattcgggtaaataatggacgtcaaacgctttccgtggcactaatcctctcgagaattccccttacccaggtgtggggaagacctccctgacgcacctgatcacccacaacgaagccctcatccggcccggctggacggtgggctgcaacatccaggtgaagatgcatccgttcagggagggcaccgctcgcgagtgtccctacttcgtggagctgttcgatgttgggggatcgctgaaccacaagaacacgcgcagcgtcttctatgcgggcatcgatggaatcattctggtgcacgaccttaccaacgccaagtcgcagaggcagctaatcgactggctgtacgagatcgtcaacaaggagggcaaggatacgaacaaatcgaacggagcctccatgccgccatcgccgcccagcccgctgagcagcttctcaacggacaacctcggaacggacggccacattctcttcgacatggaggagtttctgggcgccacgcaaacgcctatcctggtcatgggcaccaagctggatctcttggacgagaagcgccatcccaaaatgggggtgaagaagccgggcggaataggtgcctcctaatatgacatttaacaaatgcttcctcctaacgtttatctatttcaatatccctcagccgacaagtgtggagccgaggagatttggct

SEQ ID NO: 19565 - DNA, 872 bp, DROSOPHILA
ctggctaaagcttaaaaaaacacttggaaagattcagataataaacaaaatcaaatttatctgaacttcgaataagatggaatacgaaagtgtgctgatcgtgaagccggaggtgtttatctacaaaataccaccccgtgcgagcaatcgtggttatagagcgggagattggaacttaaaggagcccacctggacgggcaggatgcgactggtggccaagggcaccgccgttgtcctcaagctggaggacaagaccagtggtgccctgttcgccaactgccccatcgacacatatcccggcgtggccatcgaggcggtttcagatagctcccgctattttgtcatccgcgtgcaggacgataatgggcgatcggcatttctgggcctcggattcggcgatcgatccgattcgttcgatctgaatgttgcgctgcaggatcacttcaagtgggtaaagaaccaggagcagatcgagaaggagaagacggagcccaagcaggagctcgatctgggattcaaggagggcgagaccatcaagatcaacatgcggataacgaaaaaggacggctccgagggatcctcgcgcactggcaagaacaaaggctcctcgggcgtgctgccaccgccgcccggtggccttggcaagatcgctccgccaccggccgcagccgccgcaaacacgacggtacggcaaagtcccggcgtttcgcccgcccacagacccgccgctggaggatccgaatggaccgactacgcatcagccggtggcaaccaaggacaacagaactcggccaacgccaactgggtgcagttctagatatacatcatcctgttcctcctgctgctgctgctgctgcgctcctatcacccag

SEQ ID NO: 19566 - protein, 246 aa, DROSOPHILA
MEYESVLIVKPEVFIYKIPPRASNRGYRAGDWNLKEPTWTGRMRLVAKGTAVVLKLEDKTSGALFANCPIDTYPGVAIEAVSDSSRYFVIRVQDDNGRSAFLGLGFGDRSDSFDLNVALQDHFKWVKNQEQIEKEKTEPKQELDLGFKEGETIKINMRITKKDGSEGSSRTGKNKGSSGVLPPPPGGLGKIAPPPAAAAANTTVRQSPGVSPAHRPAAGGSEWTDYASAGGNQGQQNSANANWVQF

SEQ ID NO: 19567 - DNA, 3246 bp, DROSOPHILA
caactggcggcacctataccacagccacacagcccacaacccacagcagcggatcaggttacagccgagcgaaatcgatggaatcgcctgcagcaatcgctgcactggcgtcacaacttgtttttgtttttccccggctgggagtttgctgataagccggcgtaaacatattttccattacgaacggaaacctgcgttgctgaatggtcggaatttaggtaaataattaacgccaaataccccaaattgaagcacaataacactaacactgagcggagcacacgtgcgtcttagctgcaaattacgatcgttttgaggctccagctcggtttcccctcatttcgcggctcaatccaccacagcgttcggttggccagtgctgcacagcgactgccgctggaattcaaattaacccttaggcgaattgagctttaaaagctttcgtaaattgtacccattgcgtaacttgcaagggttaatgctacacgggttcaatgaaccaaatagtttaattgtaattcgtaaggattacttgtttattttgattaaaagcttacgaaaactgctaaataaataagttacttcttttgataagttaggtaaaagtatttcaccttgtccctagaacacctgctgtttgatcatcaacttgtttccaagcacccactttccccttcaatcacattcttcgcaactgttgaaccagataagggacatatcagtttccatgtctgcgatgctaactaggtacacagttgttgagccactaggcacgtgggcttttgatgataagcgaataaaacagacgccaaaaatcgctaatcaagtatgtatgtagagaaaaaacccacaaatcgactttcttgggttttatttatacacagaatgcttaaaattgctgcagttgcacatgcgaacgtcatgcaaatgcaaaaaaaaaagacgcagtacaagtgtgctgcgaattaaaattaaacaattgaacttgacactggctggtcgtaggcaaatatgtcgtttaattgctcctctcgttcttcgaaatctgcggcggcttacaaagcttacattgactatgtactttaggtttatatatatattgatctgcatgaatgggggccagcattagcgcgagttccttccagttcagccattcgggggcacttctttatcgacatgactcattagcagtcgattcgttcgaaggggagtaataattataaaatatatgcattgaatggcttgagaatagaggaaggtgttgctgtcccacatgttgctgtccatgtccatcgtgccatcgattaattagttgtactaaaacgacgaccgcgcgccatctaaataattcactagtgaacagcccccgcgcgaccttgcactgtcgccttgtcgacacctacgtaatgtgcatcgccttcgccgccttggcggcctgcgcactgatctcgtccatgctcttccgcgcgctctccgtcacctcgtcgatggagcgccgtgtgttgtgcagaagttcgtcggtgccgcgagcgatgcccttgacctccgtgttgatcagcccgatcacccactccaggccctggcgtcccttgccggcatttgtgctaatggtcgaggtgagcaggtcctccatgtagtgggacagcggcacaccaaagacggtcacggtggcctcctgcttgagcagcgtcttgctggcatccgacggatgcggctcatagtagagcacctcgtccacgctgatgttgcggcagaaggtgaggttgtttgtcttcagcaccatctgtttgcgctccgggtccaccgtggagcgttcgctggcgaaacaagttttggccgtgccgatcagcgcgtgcgtccacttggggaagtaccacttggactgcaccaggcgatgcgtgtgcaggacgccgtccaccacacggcgctcgaccacgtccgtgccaatgatggagggcgtcatcggattggggtacttgcgccacgccgcctgcgtgaccgtctcccacgggtggttgaatatgtgctccgatgtccagattttcattatgcaagcgccgttgtcgtcaccgtccggggagggctttatatccttaattggcagccgagatgcgggctgagctgagcctgcgggggcagacggaacggaattaaacagggggagcgttagctgaagtacacgactcgaattttgacggcaatctcggaattattgaatatttccgagacaagttacgagagctgacctttactcgtgctgtgctgctagagatgacagtggctccgatagatggggctatcgctggccagtgcatgggctagggtggtcacactggcgcagtaagagaaaatgaaagtgccgcaggcaccctgtagcggtaacttatttattaaatttataaactaaattaattctaaaagtaatggcggcactttgacattgcacgtgcagcttcctattgcggcccgaaggtacgtacgtatttctcgtagggccgtttatccaatcgctgtagtcggctctccacgagctcccgaaagttgtgtattacctcggcatccgcctcgattagtttcctctcctcgttgatgatctcggccagctgctcgtcactgtccgccgccgcccgacgtgacaccgagccctccagacgagtgctgatctggttgactatcttctcgctctcgtagtccattatcttggccagcgccttggccggcgtgcgccgcgcatagcgtgactcgggtatggtgggggcatccaggtacgactcctcctgcaccgccagcgtgtgcggctcctgctgttgcgcgtcttgcttcagctcctcatttgtgtactcaatgaattcctgcagggagggctcatcgggatgcgtttcgctgagcgtggagttgttttgaaaattggtcaggtggaatgtgccattggtgtcgtagaacttgtagcccagcatctccagcgcgatttccgtgagtaagtacgacatttcgcaggattcaaaattcgtttatgtttgcaatctacattgaaaactagaaattccgcacccagcaatcgataaccggtggaggtgtggcagcactggccatcagctgttcgcgcagcgtcaattgtttctcgctttgcattttttttacctgttcatcacaataataagagacgaaaggcggaaataggacacccatatttgcttcgaatgcagcccgagacagtgcagccatgaagatcaacgagaagaacct

SEQ ID NO: 19568 - DNA, 1246 bp, DROSOPHILA
gtcagctctcgtaacttgtctcggaaatattcaataattccgagattgccgtcaaaattcgagtcgtgtacttcagctaacgctccccctgtttaattccgttccgtctgcccccgcaggctcagctcagcccgcatctcggctgccaattaaggatataaagccctccccggacggtgacgacaacggcgcttgcataatgaaaatctggacatcggagcacatattcaaccacccgtgggagacggtcacgcaggcggcgtggcgcaagtaccccaatccgatgacgccctccatcattggcacggacgtggtcgagcgccgtgtggtggacggcgtcctgcacacgcatcgcctggtgcagtccaagtggtacttccccaagtggacgcacgcgctgatcggcacggccaaaacttgtttcgccagcgaacgctccacggtggacccggagcgcaaacagatggtgctgaagacaaacaacctcaccttctgccgcaacatcagcgtggacgaggtgctctactatgagccgcatccgtcggatgccagcaagacgctgctcaagcaggaggccaccgtgaccgtctttggtgtgccgctgtcccactacatggaggacctgctcacctcgaccattagcacaaatgccggcaagggacgccagggcctggagtgggtgatcgggctgatcaacacggaggtcaagggcatcgctcgcggcaccgacgaacttctgcacaacacacggcgctccatcgacgaggtgacggagagcgcgcggaagagcatggacgagatcagtgcgcaggccgccaaggcggcgaaggcgatgcacattacgtaggtgtcgacaaggcgacagtgcaaggtcgcgcgggggctgttcactagtgaattatttagatggcgcgcggtcgtcgttttagtacaactaattaatcgatggcacgatggacatggacagcaacatgtgggacagcaacaccttcctctattctcaagccattcaatgcatatattttataattattactccccttcgaacgaatcgactgctaatgagtcatgtcgataaagaagtgcccccgaatggctgaactggaaggaactcgcgctaatgctggcccccattcatgcagatcaatatatatataaacctaaagtacatagtcaatgtaagctttgtaagccgccgcagatttcgaagaacgagaggagcaattaaacgacatatttgcctacg

SEQ ID NO: 19569 - protein, 215 aa, DROSOPHILA
MKIWTSEHIFNHPWETVTQAAWRKYPNPMTPSIIGTDVVERRVVDGVLHTHRLVQSKWYFPKWTHALIGTAKTCFASERSTVDPERKQMVLKTNNLTFCRNISVDEVLYYEPHPSDASKTLLKQEATVTVFGVPLSHYMEDLLTSTISTNAGKGRQGLEWVIGLINTEVKGIARGTDELLHNTRRSIDEVTESARKSMDEISAQAAKAAKAMHIT

SEQ ID NO: 19570 - DNA, 5788 bp, DROSOPHILA
ccacaacccacagcagcggatcaggttacagccgagcgaaatcgatggaatcgcctgcagcaatcgctgcactggcgtcacaacttgtttttgtttttccccggctgggagtttgctgataagccggcgtaaacatattttccattacgaacggaaacctgcgttgctgaatggtcggaatttaggtaaataattaacgccaaataccccaaattgaagcacaataacactaacactgagcggagcacacgtgcgtcttagctgcaaattacgatcgttttgaggctccagctcggtttcccctcatttcgcggctcaatccaccacagcgttcggttggccagtgctgcacagcgactgccgctggaattcaaattaacccttaggcgaattgagctttaaaagctttcgtaaattgtacccattgcgtaacttgcaagggttaatgctacacgggttcaatgaaccaaatagtttaattgtaattcgtaaggattacttgtttattttgattaaaagcttacgaaaactgctaaataaataagttacttcttttgataagttaggtaaaagtatttcaccttgtccctagaacacctgctgtttgatcatcaacttgtttccaagcacccactttccccttcaatcacattcttcgcaactgttgaaccagataagggacatatcagtttccatgtctgcgatgctaactaggtacacagttgttgagccactaggcacgtgggcttttgatgataagcgaataaaacagacgccaaaaatcgctaatcaagtatgtatgtagagaaaaaacccacaaatcgactttcttgggttttatttatacacagaatgcttaaaattgctgcagttgcacatgcgaacgtcatgcaaatgcaaaaaaaaaagacgcagtacaagtgtgctgcgaattaaaattaaacaattgaacttgacactggctggtcgtaggcaaatatgtcgtttaattgctcctctcgttcttcgaaatctgcggcggcttacaaagcttacattgactatgtactttaggtttatatatatattgatctgcatgaatgggggccagcattagcgcgagttccttccagttcagccattcgggggcacttctttatcgacatgactcattagcagtcgattcgttcgaaggggagtaataattataaaatatatgcattgaatggcttgagaatagaggaaggtgttgctgtcccacatgttgctgtccatgtccatcgtgccatcgattaattagttgtactaaaacgacgaccgcgcgccatctaaataattcactagtgaacagcccccgcgcgaccttgcactgtcgccttgtcgacacctacgtaatgtgcatcgccttcgccgccttggcggcctgcgcactgatctcgtccatgctcttccgcgcgctctccgtcacctcgtcgatggagcgccgtgtgttgtgcagaagttcgtcggtgccgcgagcgatgcccttgacctccgtgttgatcagcccgatcacccactccaggccctggcgtcccttgccggcatttgtgctaatggtcgaggtgagcaggtcctccatgtagtgggacagcggcacaccaaagacggtcacggtggcctcctgcttgagcagcgtcttgctggcatccgacggatgcggctcatagtagagcacctcgtccacgctgatgttgcggcagaaggtgaggttgtttgtcttcagcaccatctgtttgcgctccgggtccaccgtggagcgttcgctggcgaaacaagttttggccgtgccgatcagcgcgtgcgtccacttggggaagtaccacttggactgcaccaggcgatgcgtgtgcaggacgccgtccaccacacggcgctcgaccacgtccgtgccaatgatggagggcgtcatcggattggggtacttgcgccacgccgcctgcgtgaccgtctcccacgggtggttgaatatgtgctccgatgtccagattttcattatgcaagcgccgttgtcgtcaccgtccggggagggctttatatccttaattggcagccgagatgcgggctgagctgagcctgcgggggcagacggaacggaattaaacagggggagcgttagctgaagtacacgactcgaattttgacggcaatctcggaattattgaatatttccgagacaagttacgagagctgacctttactcgtgctgtgctgctagagatgacagtggctccgatagatggggctatcgctggccagtgcatgggctagggtggtcacactggcgcagtaagagaaaatgaaagtgccgcaggcaccctgtagcggtaacttatttattaaatttataaactaaattaattctaaaagtaatggcggcactttgacattgcacgtgcagcttcctattgcggcccgaaggtacgtacgtatttctcgtagggccgtttatccaatcgctgtagtcggctctccacgagctcccgaaagttgtgtattacctcggcatccgcctcgattagtttcctctcctcgttgatgatctcggccagctgctcgtcactgtccgccgccgcccgacgtgacaccgagccctccagacgagtgctgatctggttgactatcttctcgctctcgtagtccattatcttggccagcgccttggccggcgtgcgccgcgcatagcgtgactcgggtatggtgggggcatccaggtacgactcctcctgcaccgccagcgtgtgcggctcctgctgttgcgcgtcttgcttcagctcctcatttgtgtactcaatgaattcctgcagggagggctcatcgggatgcgtttcgctgagcgtggagttgttttgaaaattggtcaggtggaatgtgccattggtgtcgtagaacttgtagcccagcatctccagcgcgatttccgtgagtaagtacgacatttcgcaggattcaaaattcgtttatgtttgcaatctacattgaaaactagaaattccgcacccagcaatcgataaccggtggaggtgtggcagcactggccatcagctgttcgcgcagcgtcaattgtttctcgctttgcattttttttacctgttcatcacaataataagagacgaaaggcggaaataggacacccatatttgcttcgaatgcagcccgagacagtgcagccatgaagatcaacgagaagaacctgtacgtgttcgcgagaacgccgcccttcgacatggaaggtatgcaagcgagccctttcgctcgtctattaataatcataatccatttatcacacaccgatacgccttgcaggcttcctcaacaaacggggcgaggtcaacaaggccttccagcgacgctacttcgtgctgaaaggcaacctgctcttctacttcgagtcgcgcttggacaaggagcccttgggcctcatcattgtcgagggctgcaccattgagctgtctaacgaggtggacaactactgcttcgagatcgccttcaacggcaatcgcacctacatcctcgccgccgaaaaccaagacagcatggagacgtggatgaaggcgctaacatgcgccggctacgagtataagcgcatcatcctggccgagctaaaacgccagttgcaagagatggaggacgcaagaaacagtgagactgcacaatggctaatcctacaatccctgtgcactaatccgctgcgttctttaacctacagagatgctcggcagcgccttggacggaccacaaaatgcatcggagagtgcgaagcctagaccgccgcccaggcggacaaatccattcaacagacccgctcctcctccaccagacagttcgctgaggggcggagtagtcatgtcgcccctgccatttatcaacggatacttcggatcgagcaacgcgcgcctgcagcaggagaagctaatgagcaagcaaggtatgaacacgtactcttaaaatggatgtacaatgctgtgggtatagtaatgcaaaaattaactgaacggaagtgaccaaattgaaagacgaaatgaatcaccatgttcggggctttgagttttaaaagctaattttaagtgggaaacttggccaatagataaccgcagaactacaactttgcctaaatacaatcatacggcatttttcggccccaaagccagctgtttgtttgtcccaatacaatgtgagtctaccgttagtagaagctagagataagagcagagtgctctcagtataatccgaacttcgattgccagcttatcgttgccatttacccagagccgatctaatttagtcagcggaatgccactaagcgacattctctgcaaaatctgttgcatattcccaaagccaggctacaggcactttctacttgcagacgcaaacggaaacggaagccccagcggaacgcccagggcccagcgccgtcccacgcccgctcctgccatcgcgaacagcgtcttctatcccgatgtccgggatccgggagcggccaacaataatcacagcaccgtcaacggtgctgagcgccagcgtcgccaggtcaaagcactggaggagttcgcacgcaaccacgagcgctttcgcagggaactgatgccggatgtgtccgcttaccgcgagcgccagggtcagccgctcatccagttgtgatgtaggagtgggctgctccgacaaaaagccaatgtattacccgttttgtgctaaatcaaatacgtttcaaatgaactatgcttaatttccatacatgtttgtttcaataaacaaaactttagatataacaaatttcggcgatcatggcgcactcagttatgtgggcatactaataattgggttttttaggttatttgttagaattgaaggactaagttggttttaaagttaaacataatgttgggattactcaaatggataacttaaagaaacctaatttttggatgacaaagttctacatatgaaagaacaaaactttttttgtccaaatgaatagaccacatattaattgttatttagaacataatattttttaaaaattcgatagacacaaaacccagtgtgaacggcgaaaataatcgataactgctaagaaaacaaaaacatcgacgttggttgctttgtggaaacatcgataatcgcgagcagccatcgatacatgttccagctctgtaacctagcgttgttgtttgtaatttagctgtgaaaagtaattaagccgcacacagaactgtaagttcacccgctagataaatatatttgagtaaaagaacacaacccgaaatggttaaaagactgcaagaagtcagcaaacttatttgattcgttgaagccgtgaaatgtctctgtgtttgtaaagtgacgctaccattttaaaggtgaattttgcgccgggcattgtcttttctgtaacttcggcatggacttttttagtttgaaagccaaaactatgaacacaatgcgtagtttttcgggtatcaagaactcatttatcaaaggctaggaatattcactatatctgttggcgtcgcttgctgcggctttcattttgtttctgtgcaaaaaccaccacacaaacacagggtcacacagacgcgagcacagcaaacacacaccaccaagcggccgagagcggcttggttttggaccgtttatgcgaagctgagctcatgaaaaccggaattaccgttttgaaaattatgtttagttgatattttgaaacactatttccaaatatagaaatacataacgtaaaaacgtaacgtgtttttaaatttaatattac

SEQ ID NO: 19571 - DNA, 2791 bp, DROSOPHILA
gttcttcgaaatctgcggcggcttacaaagcttacattgactatgtactttaggtttatatatatattgatctgcatgaatgggggccagcattagcgcgagttccttccagttcagccattcgggggcacttctttatcgacatgactcattagcagtcgattcgttcgaaggggagtaataattataaaatatatgcattgaatggcttgagaatagaggaaggtgttgctgtcccacatgttgctgtccatgtccatcgtgccatcgattaattagttgtactaaaacgacgaccgcgcgccatctaaataattcactagtgaacagcccccgcgcgaccttgcactgtcgccttgtcgacacctacgtaatgtgcatcgccttcgccgccttggcggcctgcgcactgatctcgtccatgctcttccgcgcgctctccgtcacctcgtcgatggagcgccgtgtgttgtgcagaagttcgtcggtgccgcgagcgatgcccttgacctccgtgttgatcagcccgatcacccactccaggccctggcgtcccttgccggcatttgtgctaatggtcgaggtgagcaggtcctccatgtagtgggacagcggcacaccaaagacggtcacggtggcctcctgcttgagcagcgtcttgctggcatccgacggatgcggctcatagtagagcacctcgtccacgctgatgttgcggcagaaggtgaggttgtttgtcttcagcaccatctgtttgcgctccgggtccaccgtggagcgttcgctggcgaaacaagttttggccgtgccgatcagcgcgtgcgtccacttggggaagtaccacttggactgcaccaggcgatgcgtgtgcaggacgccgtccaccacacggcgctcgaccacgtccgtgccaatgatggagggcgtcatcggattggggtacttgcgccacgccgcctgcgtgaccgtctcccacgggtggttgaatatgtgctccgatgtccagattttcattatgcaagcgccgttgtcgtcaccgtccggggagggctttatatccttaattggcagccgagatgcgggctgagctgagcgtatttctcgtagggccgtttatccaatcgctgtagtcggctctccacgagctcccgaaagttgtgtattacctcggcatccgcctcgattagtttcctctcctcgttgatgatctcggccagctgctcgtcactgtccgccgccgcccgacgtgacaccgagccctccagacgagtgctgatctggttgactatcttctcgctctcgtagtccattatcttggccagcgccttggccggcgtgcgccgcgcatagcgtgactcgggtatggtgggggcatccaggtacgactcctcctgcaccgccagcgtgtgcggctcctgctgttgcgcgtcttgcttcagctcctcatttgtgtactcaatgaattcctgcagggagggctcatcgggatgcgtttcgctgagcgtggagttgttttgaaaattggtcaggtggaatgtgccattggtgtcgtagaacttgtagcccagcatctccagcgcgatttccgtgaaaattccgcacccagcaatcgataaccggtggaggtgtggcagcactggccatcagctgttcgcgcagcgtcaattgtttctcgctttgcattttttttacctgttcatcacaataataagagacgaaaggcggaaataggacacccatatttgcttcgaatgcagcccgagacagtgcagccatgaagatcaacgagaagaacctgtacgtgttcgcgagaacgccgcccttcgacatggaaggcttcctcaacaaacggggcgaggtcaacaaggccttccagcgacgctacttcgtgctgaaaggcaacctgctcttctacttcgagtcgcgcttggacaaggagcccttgggcctcatcattgtcgagggctgcaccattgagctgtctaacgaggtggacaactactgcttcgagatcgccttcaacggcaatcgcacctacatcctcgccgccgaaaaccaagacagcatggagacgtggatgaaggcgctaacatgcgccggctacgagtataagcgcatcatcctggccgagctaaaacgccagttgcaagagatggaggacgcaagaaacaagatgctcggcagcgccttggacggaccacaaaatgcatcggagagtgcgaagcctagaccgccgcccaggcggacaaatccattcaacagacccgctcctcctccaccagacagttcgctgaggggcggagtagtcatgtcgcccctgccatttatcaacggatacttcggatcgagcaacgcgcgcctgcagcaggagaagctaatgagcaagcaagacgcaaacggaaacggaagccccagcggaacgcccagggcccagcgccgtcccacgcccgctcctgccatcgcgaacagcgtcttctatcccgatgtccgggatccgggagcggccaacaataatcacagcaccgtcaacggtgctgagcgccagcgtcgccaggtcaaagcactggaggagttcgcacgcaaccacgagcgctttcgcagggaactgatgccggatgtgtccgcttaccgcgagcgccagggtcagccgctcatccagttgtgatgtaggagtgggctgctccgacaaaaagccaatgtattacccgttttgtgctaaatcaaatacgtttcaaatgaactatgcttaatttccatacatgtttgtttcaataaacaaaactttagatat

SEQ ID NO: 19572 - protein, 296 aa, DROSOPHILA
MKINEKNLYVFARTPPFDMEGFLNKRGEVNKAFQRRYFVLKGNLLFYFESRLDKEPLGLIIVEGCTIELSNEVDNYCFEIAFNGNRTYILAAENQDSMETWMKALTCAGYEYKRIILAELKRQLQEMEDARNKMLGSALDGPQNASESAKPRPPPRRTNPFNRPAPPPPDSSLRGGVVMSPLPFINGYFGSSNARLQQEKLMSKQDANGNGSPSGTPRAQRRPTPAPAIANSVFYPDVRDPGAANNNHSTVNGAERQRRQVKALEEFARNHERFRRELMPDVSAYRERQGQPLIQL

SEQ ID NO: 19573 - DNA, 13484 bp, DROSOPHILA
cctcggagattgactataacaactacgagagctactgggtgggcatggttactgtgccattgtcccacctgatccttttattagccatggcattgactatttccacatgttacacgatggcataatcaacgtgaagtcgaaggttgagctgaactgaaaggaggcctcggagtacatcactcgcaatccgaggaagtagctgtgccgcattgttccgattctggaggagcacaaggatctggcacgccgatagcgtcagcaataaagtgaaacttgcgataggcatgcgaattcaattggatttgtttgtttcgtttattttatacaagaaaatttataaaattaattgtcatacataataattaaattgcttttatttaaattacaaaataacgactatatttgatttgctttttacagcactcgcgcatttgttcaacaagcttggacaaactaaatggtttggaaaaatctatctttatatatatatatatatattagcatatatgtattgcaatttggtaccgcgtcaagcatggtaagttcgagtttcttgtataggtaaataatacttaagattaaaccaatatttcatttattaaattacgcataagttcgacttaatttcatgtagtttgcatacctaaagagcacatatgggagttactattactcgtataaaagccatctcatctccgcttgactttaatcgccaaaagccttgcattaagtcacgtaatatccgagatgggggactatagatggatcgtagatggatcgccgaatattacgttgattcaatgcaaggctctccagtgagtattcttcggcgcgggcagtgggcggcgtcactgttctgacagtgagttagctgctgcaacccattcgttatttatgaccacattttacacattaaagcagctggttatctgtagtttatcgtcgttctactgcacttcgctatcactatcactcttctctaaaaataatagataatacttcaatatggaagattcaatggtaaggtagcaatggtaatcgtacccttcttgcccgtgtaggcgtgacgtttcagtcggtcgtataagtcttctttagttccatagagcgaggcattcgatctggccaacgtgctcatcttaccgccatgcagacctattgagaattagaataaagcaagaattgacaatgctacttcgattagggataactcaccatccttcatgtacgtttcattgtagaagttgggcatctcccagccatcctcctcgtcgtcgtagtagtgcgcatatgtgctgtgatgcgatggcgcgatggactccgcgtagggcgtgtgggcgccgtagtagaagttcacctgcgagccggtctggtcaatcgcaggtgttagcatcttcttgggatccctgcgcttcgtggagcgcacgcaaatcatccagatgagcaggacaatgatgatgataaagatcaccgctccggcaatgccaccggcgatgtaggcaaactccgagcgttccgcacagtggggacccgtaaaggagcccacacagcggcaagatggtgtgcccttcaagtccttgacacacgcaccagagttctcgcagaagccatcgcacacatccgtgcaggccatgcccgttccattgaatcctggcttgcattcgcacttaaagtccgacgtctccggcaccatgatgcagtaggcattgacatcgcagtgcggcttgccctctgcaatgtgctcgcacggattggtgcactcgctcttcgaggtggcgccagtgatcttggtactgtggttcggtgggcactgcagacaggaggtctgctgcgactccgattggtagtatcccttgcggcactcgatgcacatattctgtgtggcattcaggtacgtacccgccgagcagacgggcagtgtgcactcctccaccgaactggcgcccaccttgggcgtcgtcctgcccagcggacaggcggcgcaggatggctgcacgccctgcaggcggtatgttccacgtgggcagggctcgcagcgtccatcggcacccagttgctggccagagctgcactcatcgcgacactccttgcgtgacgtggcctccgtggagcgcgttgtctgtcccagaccgcatagctcacagctaaaggaaccctcgttgggctggtagaatccatggccgcaggagcggcacagacccgtttccgcgtcaaagtacttgccagctgggcagcgctccttgcagtccgccgcggagcgtgctcccggaccggcagtcactcctggtcttccagcaatcaccgggcacttgctgcactgcagctgacccgcctccgactggtaggttccgcgcgagcaggctatgcacgtcttgttggcgctgtcgtagaaggtgccgatggcacagggtacacagtcgggtatcatcaccacctggcccacgggacaggcgtactccgagcccagttccagggaagccggatcaggcactgtgttgggcagaatctcctgcacggcgaactgatcgtcctcgaggatgagcttctccagcagctgcttgacagtgcttcgttcgcccgtcgatgtgtgcaccacgggatcactgaagatgaatggaaacaaggtggattagtttcggttcaaactaaagatcataatcttgtgattagagaacatatgttaatgtccagatatagtgttacaagatgggattattagactgggttacatgtgtggacacctaacactgttctggacacttggaggtaagccttaaacttggattagcacgcagacatgcggtatggtgttaggcaagcatagggttaggtcatttgagtttggttcgattggatggattttagtttagactgagacgattgctggtagtattgggtgcagatttgatgctgggcagatcgggtgcatattggtcggatgtggttatgcgtggggttaaccaacataggtgtgctagacatacttcgcagccgggaaggctatctccagggtgtatgtatcgccgccagtttgttggcgtccctggcgacccgtcaatgtcagatcgtcatcatcatcgctgcaaattgggttaacgaacacacaaaacacatatagcatatacacagtgtacacggatgatccttaagcggatcagaggacatgctggttgggatctaggttctcatgcaactacttacttgaccactggcaattcggcctccatcacatagactccgccatccttggcctgacgacgcacacgattgttctgcgtacctcggtagtggtcgcatttcacatcgatctgaatgtccttgcattccctgcaaattccaggatggaaaaaatggattagggatggagcaactaatggagaagggccacaacaaaccttgttccctcgatggcataggagcagaagttccagtccctgttcaggccattaaccgagttggtcaccttctgacggagcaccgcctgaccagccttgttgcacagcacgtccgaggggaagagcatcttgatgcggaacacccgctgggcgggcttcgatggtgagcaggatgggtagacgagtggcatcgagggttccctagttggtcgccaaaagccttcggctccgcaggtatagaactcaggcaccggctccgagaatcgaagacccgcattacaggcgatctcgcagaccttgaactgaccaccggcaccccaatccttgcaaacctgtgatccaccaacgggatcagccaacgctggacagaagtcggctgcaaaatagatgcattgcaattaaatcaacatcaaaaggagcttcgaaattttccttgtggaatacttactcagcagagaaaccttgaagctgcacgatgcagtatttccagctgcatcggatgcaatgtaggtgatgtcgtaggtgccccatagcaatgtagttccagatcggtgtccatttcgctcgtagatcttggtcacgccaatgttgtcgctgaagtgcggctcatcccaggagaccaccgcggaaccgttcttggcaatcacccacagatctccggggcagtgctccaccacaggtggttccttgtccacgaccagttgctggcaattggcgcccgtgtagcccactgggcacttgcgttgtccgcatagggagggcacattgcgctccactccgcctgaggtcacctcgtatcccgcccagttgaggatgaggccgggatagagaaccggttcagaacggcagtcgcgcacctgcttctggatctctgacgtgatgtctagggctctggcccacacttgagccttggttattgtgccctggaatccggaatccgagtaggccagctcattactaagtccatacggctgtgggagtcccagcactgcccagagataaccgggcagagagccgccggctccgtactccatcttgctggcaatcagtccctctgtgatcaattgaagctgcccggagattccgtcccagaccacggctacatgatgccactggccgtcgttgacggaagtgtactccccaaagctcaggaaggcatcgggttggtcctcaaacagtgaaacctggactccactggagtgcgcctggagcagcatgcggcgctgctgggtcatgcgagcggattgcacgccgtagagggtgaagaagatgccgcgatcgtccttctgggcaaactgcacccacatggcgacagtcaggctgttcgcctctcccgtggggaagggcaccacctgggcggcggtggatcgcgatggatcgctgaagtacagatcgtagtccacttggatggccttgcggcaatcgtctccggtcatattgaaggggcactgacagtagaagccgttggttagatccacgcacgtggcgcccggtgggcaagagttgtccttgcagtccacgatgtcctgttcgcaattgcgaccggtgaagccaggtgggcactggcagctgtagccagcaccattgtccacacaagtggcgccattctgacagacatgctcctcgcatgcgtcgtactcgtactgacacccaatgcccgagtaatccgcagggcaactgcagttaagaccagagccaaagtcctggcacttgccaccgtgcatgcaaggatcaccgatgcagcgttccggagcggtctcgcagttcttgccatcggtgccgctgggacacacgcagaagtagtcctggaacaggtcgatgcagctggcatcgttctggcacggcgcctgagctccgcacgtggtcacctgctgctcgcagcgcatgccactccatcctggctcgcagccgcactcaaagccaccgacgcgatcccgacagatgccgttgttcagacacggctgcgcctcgcagtcatcgatgtccgtggcgcacaggggtcccttgaatccgtcccggcacacgcactcgaatttgttgtccagatcgaggcagcgctccgtgcccaccggattgcaggggtcgctcagacactcgtcgatctcggcctcgcaggagagacccacgtagccagggcggcatttgcagctgaagccatccagctggtccacacaggtggcgccgtgctggcagggattcgaggcgcagtcgtcgatggtgtgctggcaattcttgcccgtgtagccgggttcacagttgcagctatagccgtcgaccaggtcgacgcaggttccctcattggcgcagggtcggttctcgcagtcgtcgatgttgatgtcgcaggcggatcccgtccagcccggatggcaaacacactcgtgatcgaacagacgatccacgcaggtgccatgcttgcatggttccgataggcagagatcgatcttttgctcgcatcgcttgcccgtaaatcctggcggacaggcgcactggaagtcattgaccagatctgtgcagttggcgcccaacaggcagggattctccgaacagtcattgatattctgctcacagtggatgccctcccatccgggcacacactcgcacttgtagcgaccctgctccaaggcctggcagctggctccgtttccgcacggattgccattcgccgtgcacggatcgatggtcacgtcgcactgatcgccggtgtagccactgcggcacagacaggtcacgttcttgtagcccggctcgttcttgcacatggccctggccggacaggtgtcgttgccacagtcactggcctcctcctggcaattgatgcccgagtatccagccgggcactcacagcgatagccctgcggcagatccttgcactgaccaccattgtagcagggctgggaggcgcactcgtcgatgtcctgttcgcagcgacgtccagagaatccggccggacagaagcactggatgtcatggcccatgggcacacacagtccgccgtgctggcaagcaccttcaccacataccaccggcttgcactgttcgcgtcccttggaggcgggtgaatcggttctcatgttactcggacactcgttgcagctctgcgcacccgcggctccctggtaatgatgcagtgggcagggcgagcagggtgccagtccggtggcggagtacgttcccggcgcacacttggcgcgacacagatccttgttcgaggcagccggctggtaggtgaagctctgtgccggacaggcctggcaatccttgaatccaccggttggtggttcggcagtgaatgagttacgcggacactccaggcacggcaccagtccggtgggtgagtaggtgccataaccgcagacgggaatgcagtccgcctgcgacttggtgccctcctccttggtgtaggttccggccgggcagcgcaggcaggttccctggcggtcacggttctggtagtagcccctcgggcagtaggtgcagctgttctgaccctctgacacatacgttccggcgggacagtgcaggcaacgcggcacatcgctggtgtccatgttcagtacctcgcccacattgcagttaaatcctcgcgagatttgcgacttgagggcgcgtagcggaggacactggttaccgatgttggcaatgttcaaaaggtcatcgatcacggcactggcatagggtacactcagatcaaagatcaggttcagcgtggagccgcacaggtcgtacagctgcggctgacgcacagcgggcagaatggagaggatgaagtccatcttgaccacattctcctccagcagcatgggcacagacttcacaaaggtcacattcatgttgacattcacggcggagcagcgctgcgagagcaactggttgagtccgccatagtgctgtgccagcacctcctggtactgacccagacaggattgggccactgctccattggcgcggtaggtaatggaggcggtcacgtggtaggcggcctgctccgtgttctccgacacgcagtcgggcaccacggacgtgggacgccacagacgtgatgtctcgcaggagaaggtcttcagtggttcgccgtcggtgaaacggaatcctggcttgcacgtggcaatgcattcgataccacgatcaccaggcaggcaattgatggcaccattcgccggcggctggagctcccagtccacgcagggtgaagccttcacagagacctggaagtggcaggcggcgcggttgttgtacttatccgttgccgtgacggtcacgttctcgaagtttccgatcttgatgttggcactctcggggctgaactgcaacctcacatctcctgtgtcgtcggaggtcttgatcctcttccgggtatcgttgaagttcacagtgtagctgtcctggcgatccactagctcaatcacatagctctgggggcactgcagcagtggtggtgttacatcgggcaccgtgatgttgatctcgcagatggccacattgccatcgtagtcaaaggccacgtactttacaaccgtatccttgaaaatgtagctgggtgtgcggaagttctgtggcttgatctccaggcgggcaatcgatccggagttgtccaccgccgtgggttcggtgaagttaacgggtagtactcctccattctcatcgcgtcgcaccacaattggttgctgcgggcagttttggaagatgggtggttcgttgtccacgcacggggagtagccgtagtcgtagccgaggagtggttcctgtttcggctcctcgcagcccatcaactcgaacttcagacaggcgttgtccatgtagctcactattccaaggatcacaaagcgagcctgcacgaacttgggcagcgtgatcatggccagctcgccgtagttgcctggatctcgcatggtcagattgaaattggggaagtacaccacgtagttctcgctctcagcttgtttgtagaagaaccgaatctccgtgggcctgcccacaatgtcgttggtaaccacacccttcaccagaatcgccttgactcgatagatctgacccagatccacgctcacataggtgaaggcctcctgcttgccacaccagccagtggccgagttgagacggatgttcttggcctcgtaattgggtcgctccgaggtggcattgatggccgaatccggaatcctgccggaacttaatcccaaaggcttgatgaccttgcactctggctcgcgtatgcatgtaatgggtcgcggattgatcaggatgtagccaggacgattgcagccgaagtacacctccgagctctgctcatagctgcgtgcaatctggcgaccatctgccggtcttcccggatcctcgcacacaggtccctcacagcgaagatctccaaagtcccagataccatcggctccacaacgaaccacattgtcgtgacgacccgtctgtccagccaacttaaaggtgttctggcagccaaagaagaagctgctctgatagcgagtgtccacaaactgtccgtattctgcgccgggcgttggcatgggtgagtagcaatccactcggggacaagagggctgcattccggatagccagtaatcgggcagaccgggcttgggatcgtacacgcactgccggaaaccagaggaagcggtggctctcagttggcgtcccggcgatccgcacgtaatggtcacattgtcacggaagggcactagaacggattcgggatcggggcgggccacagtcagaccctccaacttgtcatcgggcagggaaacgcatttggcatctgaaaagtgaccatttcgttgttagtaaaatgggaattcattgagaatctgaatgtataacacttacaattgcactccggtacgctggcgttccactgaccgctggagaggcacagggccgccgagctgccgctcatgatgtagccaaagtggcactggaagcgcaccacatcgccaaagtgatagtcgttcttgtcgctcaggagttgaccattctcgggcgcctccagttcgggacacatgagaggaacacaggtcttgttgcgctgataggtgtcaccatcacgttcgccggattcggagcgttcgatgtgatagccagccgtgccgttggaggtgtacagctggtagccagtgttgcagccacaggcaaatccgcccggtgagttgatgcacttctggtcacagccgccattgttcttgctgcactcgttgatgtccacgcaatccaagcgcgtgcagcccatcagctccatgcgcagacagggcgcacccacgtagtcctggatgcggaagcgaatatagcgagcttcgatgggcaggggcaggtttaagatggagagcgtgggctccaggatgcggaattcgacggcagtgccgtcgggattggcataatccttgaacacatccgtcagatcgttggtgtactgcagacgcaccgccgagctgaaggccacattgccatcgggacgctgcacggacatggtgcggaagccacgcagaatggtgggtgccttcaggtcgatgagtatccagttggcaccaggctccgaagagccaccgcaccagccattcgtgttcaagcgcagctgctccttgctgtagcccggctcactgaccgaggtggtgatgctgtcatccggtatgcctccattacccaagcccaaatcaccgacgggccgacactcggtggtagccgtgaatcccgtcctgcactggcagtggaaggagccgttcgtgttctggcactcggtggtggttaggtcgcactgcgaggagctgcactcgttgatgtcctcgcacgtcggcggctgctcgaacttctgggcctcgctgcagcgcatgatgttgctgccgatcagtttgtagcccttgaagcactgcaccctggcctcatcgccgaagaggtaggctcgcgtcgagtccaccacaaagccgttggcaatggtcgggaattcgaagcaccgcttgcgcgtgcatcttggtacatcaccactccaggtgccgttcgacatacaggtcagcacgggatggccattgcgctcgtagcccggctcacactcatactggacaatggtgccgtagctgcgaccacctccattcagcagggtgacgttggcgtgtgccacttccggcagcgctgcgcactgggaggccatgcagtggggctgtcgctcccaacggccatccggcagacaggagatcttctcgatcggagcacccgaggcgaaggcaaagccggcgtagcactggtacattgctataccgcgataggttacgttcgaggagccaatggagaaaccgttgtcgatttgtggcacaggaccgcagtagacctctgtggaagggattgcatatcgattagttatggaatccaattatggaataggtaggcacactcaccctgacacttgggtatgtaggagacactccagttgccaccgcgcagacattcggtaaccagtcgcgtcttgccggtggcaaactcctgtccaatgggacatgtaaagctgaccagcgtaccgaaagcggtgtcgcgactggaggccaaggctccaattccgggttgcagctccgggcaatcggccgagaatgtggccgaccatctagaagattcaagattgaagattagtgattgaactatgtaatctgaattataagagcacttacccagcagcattgtgcagtgcatccgaggtgaacttgatgagcatctcaccggatgaagcagtcagggtcagtttgggcgccgctgggccagtgaatccgtttccggagtgcaggcgcagaccggaagtggaggatccatcgaacacctggacattgtcgctcttgtgaacggtgaacttgtcgaacttcagggacagcggagcacgggcattgttgcgaatggtgaagtagcactcctggttcttggggtagtcggccaatccaaaggcgggtgaagtaaccgtgccatttctagcggtgatcgtggccttgcagccctggatgtaccgcaaactgaagcccttgccggcctcacccaaactggacttgaaatacaagtagagagcgttgcccgttgagatgatcacccggttgttttgggctgtctttccagtcagtttggcgatggtgcgactcataggtgattcgccatcgcggatcatcaggaaatcgcgtccatcggcgatgtccaagtcgtccacttcgatggagatgatgcgacccggctgtgctttaatcacatagagacactccagaccgccgggatattgcttcgggtagttggggctggtcaggatctgtcgctgaagcgtggccttcaaggtgccgccgcagtttttggcctccgtcttccacgtggcccggaatcccttgcgctccacactgccatccgtggtgaacttgacgatcatgaagttggaagcggatacgaagggctgcgtggtcagatcctgcttgccactgagcgtggccagcgacacggacttatcctcggtacggccgccaaccagaatctgcacggtgtcaaaggtcttctccgtttcgaagtcctggaactgcaggataatgttgctgcccagcggtccctccagcgtccacttgcacttgctcagcgcaccgtatttgtgcggatagttgggcgtctcgatcacatctcctccggactgcatgtggtagtggcactgtgctggacagtccagttcatcggtgccatcgccacaatcatcactgccgtcgcacttgaaggcctgattgatgcacttgccgttggcacagtgtagtgatccctgtggacacgcctgggcacggcacatgaacggcagcagggactcacaggtgcccagatcccagctctgcgatttgccggcaaaggcagcagccacacactctccggactcggcattcggctgatggagtgaccagtagccggagtattgcgagatcagtgctcccgatgcggactccagcgtattggtgcgcagatcgtcgagggaggccaatcccagccagtacttgtccgaagccctctggttgggatcgctggcccgggcgatggccaaggtctcgttgttctccgcatagctgtcgatggctaccagttcggcgccgtatctgcaatgttatcagattgaaacgcatcagataagaactccacagataacatcgaacctggaggatatgaccgattcagtatggctaagtttccgctgttgggggtaatgaaacttcaattatgcagctgcgctttactttctattttctgcttctatctcaattatgtggattgagggaaatcaggctcacttcacatgaaactttcgtttccaatcgctaaactcacattgatagcaatctcataatttggagttctgcgcgcccagcgagtaaaacgagtttcgtccaaataaaggcattgccacattacgcatacgccgcatgggacgtggctgcctttggcaaagcggctgcagctgtggcatgccaaaaagtaaatcgaaaaagcatacaaaattatgtatgagagacactccctgccgtcaacaattgctgcgtgccacacagagtgaaaacttcagacgcggctccgcaagtcgcgctttttaatcttttcttttttttttttggtttgctgtggcattttttatatatcttatggattgggcgtgtattaaggtaagcaaaaaaaatatgcaaaaagtttgtgtttccacttagcggagttttctttgccaaagaaatttgaaatgtacgtttactcctaatattacttcttgtgtttaccctccaattaaattttgtttattttctctaaaatttcacaaagtacgtttctaactcaacatttaattttcttttaacttccgaaactatttaaactgtgcacattagcaacttgatttttaactggtaaaagctccattaacttgaagtgttaacgccttgtccgacgattttcctcattctacccaatttcgcaggctacgcacggcaaaaagaaatttcaccgaaataagccactggaatatttcacagttaaacgaatgtctgtttgactgtgtaacgaacgacacctgtcaacgaaatcgcctcgtgttgatatgtatacacaaac

SEQ ID NO: 19574 - DNA, 10489 bp, DROSOPHILA
atacggcgccgaactggtagccatcgacagctatgcggagaacaacgagaccttggccatcgcccgggccagcgatcccaaccagagggcttcggacaagtactggctgggattggcctccctcgacgatctgcgcaccaatacgctggagtccgcatcgggagcactgatctcgcaatactccggctactggtcactccatcagccgaatgccgagtccggagagtgtgtggctgctgcctttgccggcaaatcgcagagctgggatctgggcacctgtgagtccctgctgccgttcatgtgccgtgcccaggcgtgtccacagggatcactacactgtgccaacggcaagtgcatcaatcaggccttcaagtgcgacggcagtgatgattgtggcgatggcaccgatgaactggactgtccagcacagtgccactaccacatgcagtccggaggagatgtgatcgagacgcccaactatccgcacaaatacggtgcgctgagcaagtgcaagtggacgctggagggaccgctgggcagcaacattatcctgcagttccaggacttcgaaacggagaagacctttgacaccgtgcagattctggttggcggccgtaccgaggataagtccgtgtcgctggccacgctcagtggcaagcaggatctgaccacgcagcccttcgtatccgcttccaacttcatgatcgtcaagttcaccacggatggcagtgtggagcgcaagggattccgggccacgtggaagacggaggccaaaaactgcggcggcaccttgaaggccacgcttcagcgacagatcctgaccagccccaactacccgaagcaatatcccggcggtctggagtgtctctatgtgattaaagcacagccgggtcgcatcatctccatcgaagtggacgacttggacatcgccgatggacgcgatttcctgatgatccgcgatggcgaatcacctatgagtcgcaccatcgccaaactgactggaaagacagcccaaaacaaccgggtgatcatctcaacgggcaacgctctctacttgtatttcaagtccagtttgggtgaggccggcaagggcttcagtttgcggtacatccagggctgcaaggccacgatcaccgctagaaatggcacggttacttcacccgcctttggattggccgactaccccaagaaccaggagtgctacttcaccattcgcaacaatgcccgtgctccgctgtccctgaagttcgacaagttcaccgttcacaagagcgacaatgtccaggtgttcgatggatcctccacttccggtctgcgcctgcactccggaaacggattcactggcccagcggcgcccaaactgaccctgactgcttcatccggtgagatgctcatcaagttcacctcggatgcactgcacaatgctgctggatggtcggccacattctcggccgattgcccggagctgcaacccggaattggagccttggcctccagtcgcgacaccgctttcggtacgctggtcagctttacatgtcccattggacaggagtttgccaccggcaagacgcgactggttaccgaatgtctgcgcggtggcaactggagtgtctcctacatacccaagtgtcaggaggtctactgcggtcctgtgccacaaatcgacaacggtttctccattggctcctcgaacgtaacctatcgcggtatagcaatgtaccagtgctacgccggctttgccttcgcctcgggtgctccgatcgagaagatctcctgtctgccggatggccgttgggagcgacagccccactgcatggcctcccagtgcgcagcgctgccggaagtggcacacgccaacgtcaccctgctgaatggaggtggtcgcagctacggcaccattgtccagtatgagtgtgagccgggctacgagcgcaatggccatcccgtgctgacctgtatgtcgaacggcacctggagtggtgatgtaccaagatgcacgcgcaagcggtgcttcgaattcccgaccattgccaacggctttgtggtggactcgacgcgagcctacctcttcggcgatgaggccagggtgcagtgcttcaagggctacaaactgatcggcagcaacatcatgcgctgcagcgaggcccagaagttcgagcagccgccgacgtgcgaggacatcaacgagtgcagctcctcgcagtgcgacctaaccaccaccgagtgccagaacacgaacggctccttccactgccagtgcaggacgggattcacggctaccaccgagtgtcggcccgtcggtgatttgggcttgggtaatggaggcataccggatgacagcatcaccacctcggtcagtgagccgggctacagcaaggagcagctgcgcttgaacacgaatggctggtgcggtggctcttcggagcctggtgccaactggatactcatcgacctgaaggcacccaccattctgcgtggcttccgcaccatgtccgtgcagcgtcccgatggcaatgtggccttcagctcggcggtgcgtctgcagtacaccaacgatctgacggatgtgttcaaggattatgccaatcccgacggcactgccgtcgaattccgcatcctggagcccacgctctccatcttaaacctgcccctgcccatcgaagctcgctatattcgcttccgcatccaggactacgtgggtgcgccctgtctgcgcatggagctgatgggctgcacgcgcttggattgcgtggacatcaacgagtgcagcaagaacaatggcggctgtgaccagaagtgcatcaactcaccgggcggatttgcctgtggctgcaacactggctaccagctgtacacctccaacggcacggctggctatcacatcgaacgctccgaatccggcgaacgtgatggtgacacctatcagcgcaacaagacctgtgttcctctcatgtgtcccgaactggaggcgcccgagaatggtcaactcctgagcgacaagaacgactatcactttggcgatgtggtgcgcttccagtgccactttggctacatcatgagcggcagctcggcggccctgtgcctctccagcggtcagtggaacgccagcgtaccggagtgcaattatgccaaatgcgtttccctgcccgatgacaagttggagggtctgactgtggcccgccccgatcccgaatccgttctagtgcccttccgtgacaatgtgaccattacgtgcggatcgccgggacgccaactgagagccaccgcttcctctggtttccggcagtgcgtgtacgatcccaagcccggtctgcccgattactggctatccggaatgcagccctcttgtccccgagtggattgctactcacccatgccaacgcccggcgcagaatacggacagtttgtggacactcgctatcagagcagcttcttctttggctgccagaacacctttaagttggctggacagacgggtcgtcacgacaatgtggttcgttgtggagccgatggtatctgggactttggagatcttcgctgtgagggacctgtgtgcgaggatccgggaagaccggcagatggtcgccagattgcacgcagctatgagcagagctcggaggtgtacttcggctgcaatcgtcctggctacatcctgatcaatccgcgacccattacatgcatacgcgagccagagtgcaaggtcatcaagcctttgggattaagttccggcaggattccggattcggccatcaatgccacctcggagcgacccaattacgaggccaagaacatccgtctcaactcggccactggctggtgtggcaagcaggaggccttcacctatgtgagcgtggatctgggtcagatctatcgagtcaaggcgattctggtgaagggtgtggttaccaacgacattgtgggcaggcccacggagattcggttcttctacaaacaagctgagagcgagaactacgtggtgtacttccccaatttcaatctgaccatgcgagatccaggcaactacggcgagctggccatgatcacgctgcccaagttcgtgcaggctcgctttgtgatccttggaatagtgagctacatggacaacgcctgtctgaagttcgagttgatgggctgcgaggagccgaaacaggaaccactcctcggctacgactacggctactccccgtgcgtggacaacgaaccacccatcttccaaaactgcccgcagcaaccaattgtggtgcgacgcgatgagaatggaggagtactacccgttaacttcaccgaacccacggcggtggacaactccggatcgattgcccgcctggagatcaagccacagaacttccgcacacccagctacattttcaaggatacggttgtaaagtacgtggcctttgactacgatggcaatgtggccatctgcgagatcaacatcacggtgcccgatgtaacaccaccactgctgcagtgcccccagagctatgtgattgagctagtggatcgccaggacagctacactgtgaacttcaacgatacccggaagaggatcaagacctccgacgacacaggagatgtgaggttgcagttcagccccgagagtgccaacatcaagatcggaaacttcgagaacgtgaccgtcacggcaacggataagtacaacaaccgcgccgcctgccacttccaggtctctgtgaaggcttcaccctgcgtggactgggagctccagccgccggcgaatggtgccatcaattgcctgcctggtgatcgtggtatcgaatgcattgccacgtgcaagccaggattccgtttcaccgacggcgaaccactgaagaccttctcctgcgagacatcacgtctgtggcgtcccacgtccgtggtgcccgactgcgtgtcggagaacacggagcaggccgcctaccacgtgaccgcctccattacctaccgcgccaatggagcagtggcccaatcctgtctgggtcagtaccaggaggtgctggcacagcactatggcggactcaaccagttgctctcgcagcgctgctccgccgtgaatgtcaacatgaatgtgacctttgtgaagtctgtgcccatgctgctggaggagaatgtggtcaagatggacttcatcctctccattctgcccgctgtgcgtcagccgcagctgtacgacctgtgcggctccacgctgaacctgatctttgatctgagtgtaccctatgccagtgccgtgatcgatgaccttttgaacattgccaacatcggtaaccagtgtcctccgctacgcgccctcaagtcgcaaatctcgcgaggatttaactgcaatgtgggcgaggtactgaacatggacaccagcgatgtgccgcgttgcctgcactgtcccgccggaacgtatgtgtcagagggtcagaacagctgcacctactgcccgaggggctactaccagaaccgtgaccgccagggaacctgcctgcgctgcccggccggaacctacaccaaggaggagggcaccaagtcgcaggcggactgcattcccgtctgcggttatggcacctactcacccaccggactggtgccgtgcctggagtgtccgcgtaactcattcactgccgaaccaccaaccggtggattcaaggattgccaggcctgtccggcacagagcttcacctaccagccggctgcctcgaacaaggatctgtgtcgcgccaagtgtgcgccgggaacgtactccgccaccggactggcaccctgctcgccctgcccactgcatcattaccagggagccgcgggtgcgcagagctgcaacgagtgtccgagtaacatgagaaccgattcacccgcctccaagggacgcgaacagtgcaagccggtggtatgtggtgaaggtgcttgccagcacggcggactgtgtgtgcccatgggccatgacatccagtgcttctgtccggccggattctctggacgtcgctgcgaacaggacatcgacgagtgcgcctcccagccctgctacaatggtggtcagtgcaaggatctgccgcagggctatcgctgtgagtgcccggctggatactcgggcatcaattgccaggaggaggccagtgactgtggcaacgacacctgtccggccagggccatgtgcaagaacgagccgggctacaagaacgtgacctgtctgtgccgcagtggctacaccggcgatcagtgcgacgtgaccatcgatccgtgcacggcgaatggcaatccgtgcggaaacggagccagctgccaggccttggagcagggtcgctacaagtgcgagtgtgtgcccggatgggagggcatccactgtgagcagaatatcaatgactgttcggagaatccctgcctgttgggcgccaactgcacagatctggtcaatgacttccagtgcgcctgtccgccaggatttacgggcaagcgatgcgagcaaaagatcgatctctgcctatcggaaccatgcaagcatggcacctgcgtggatcgtctgttcgatcacgagtgtgtttgccatccgggctggacgggatccgcctgcgacatcaacatcgacgactgcgagaaccgaccctgcgccaatgagggaacctgcgtcgacctggtcgacggctatagctgcaactgtgaacccggctacacgggcaagaattgccagcacaccatcgacgactgcgcctcgaatccctgccagcacggcgccacctgtgtggaccagctggatggcttcagctgcaaatgccgccctggctacgtgggtctctcctgcgaggccgagatcgacgagtgtctgagcgacccctgcaatccggtgggcacggagcgctgcctcgatctggacaacaaattcgagtgcgtgtgccgggacggattcaagggacccctgtgcgccacggacatcgatgactgcgaggcgcagccgtgtctgaacaacggcatctgtcgggatcgcgtcggtggctttgagtgcggctgcgagccaggatggagtggcatgcgctgcgagcagcaggtgaccacgtgcggagctcaggcgccgtgccagaacgatgccagctgcatcgacctgttccaggactacttctgcgtgtgtcccagcggcaccgatggcaagaactgcgagaccgctccggaacgctgcatcggtgatccttgcatgcacggtggcaagtgccaggactttggctctggtcttaactgcagttgccctgcggattactcgggcattgggtgtcagtacgagtacgacgcatgcgaggagcatgtctgtcagaatggcgccacttgtgtggacaatggtgctggctacagctgccagtgcccacctggcttcaccggtcgcaattgcgaacaggacatcgtggactgcaaggacaactcttgcccaccgggcgccacgtgcgtggatctaaccaacggcttctactgtcagtgccccttcaatatgaccggagacgattgccgcaaggccatccaagtggactacgatctgtacttcagcgatccatcgcgatccaccgccgcccaggtggtgcccttccccacgggagaggcgaacagcctgactgtcgccatgtgggtgcagtttgcccagaaggacgatcgcggcatcttcttcaccctctacggcgtgcaatccgctcgcatgacccagcagcgccgcatgctgctccaggcgcactccagtggagtccaggtttcactgtttgaggaccaacccgatgccttcctgagctttggggagtacacttccgtcaacgacggccagtggcatcatgtagccgtggtctgggacggaatctccgggcagcttcaattgatcacagagggactgattgccagcaagatggagtacggagccggcggctctctgcccggttatctctgggcagtgctgggactcccacagccgtatggacttagtaatgagctggcctactcggattccggattccagggcacaataaccaaggctcaagtgtgggccagagccctagacatcacgtcagagatccagaagcaggtgcgcgactgccgttctgaaccggttctctatcccggcctcatcctcaactgggcgggatacgaggtgacctcaggcggagtggagcgcaatgtgccctccctatgcggacaacgcaagtgcccagtgggctacacgggcgccaattgccagcaactggtcgtggacaaggaaccacctgtggtggagcactgccccggagatctgtgggtgattgccaagaacggttccgcggtggtctcctgggatgagccgcacttcagcgacaacattggcgtgaccaagatctacgagcgaaatggacaccgatctggaactacattgctatggggcacctacgacatcacctacattgcatccgatgcagctggaaatactgcatcgtgcagcttcaaggtttctctgctgaccgacttctgtccagcgttggctgatcccgttggtggatcacaggtttgcaaggattggggtgccggtggtcagttcaaggtctgcgagatcgcctgtaatgcgggtcttcgattctcggagccggtgcctgagttctatacctgcggagccgaaggcttttggcgaccaactagggaaccctcgatgccactcgtctacccatcctgctcaccatcgaagcccgcccagcgggtgttccgcatcaagatgctcttcccctcggacgtgctgtgcaacaaggctggtcaggcggtgctccgtcagaaggtgaccaactcggttaatggcctgaacagggactggaacttctgctcctatgccatcgagggaacaagggaatgcaaggacattcagatcgatgtgaaatgcgaccactaccgaggtacgcagaacaatcgtgtgcgtcgtcaggccaaggatggcggagtctatgtgatggaggccgaattgccagtggtcaatgatcccgtggtgcacacatcgacgggcgaacgaagcactgtcaagcagctgctggagaagctcatcctcgaggacgatcagttcgccgtgcaggagattctgcccaacacagtgcctgatccggcttccctggaactgggctcggagtacgcctgtcccgtgggccaggtggtgatgatacccgactgtgtaccctgtgccatcggcaccttctacgacagcgccaacaagacgtgcatagcctgctcgcgcggaacctaccagtcggaggcgggtcagctgcagtgcagcaagtgcccggtgattgctggaagaccaggagtgactgccggtccgggagcacgctccgcggcggactgcaaggagcgctgcccagctggcaagtactttgacgcggaaacgggtctgtgccgctcctgcggccatggattctaccagcccaacgagggttcctttagctgtgagctatgcggtctgggacagacaacgcgctccacggaggccacgtcacgcaaggagtgtcgcgatgagtgcagctctggccagcaactgggtgccgatggacgctgcgagccctgcccacgtggaacataccgcctgcagggcgtgcagccatcctgcgccgcctgtccgctgggcaggacgacgcccaaggtgggcgccagttcggtggaggagtgcacactgcccgtctgctcggcgggtacgtacctgaatgccacacagaatatgtgcatcgagtgccgcaagggatactaccaatcggagtcgcagcagacctcctgtctgcagtgcccaccgaaccacagtaccaagatcactggcgccacctcgaagagcgagtgcaccaatccgtgcgagcacattgcagagggcaagccgcactgcgatgtcaatgcctactgcatcatggtgccggagacgtcggactttaagtgcgaatgcaagccaggattcaatggaacgggcatggcctgcacggatgtgtgcgatggcttctgcgagaactctggtgcgtgtgtcaaggacttgaagggcacaccatcttgccgctgtgtgggctcctttacgggtccccactgtgcggaacgctcggagtttgcctacatcgccggtggcattgccggagcggtgatctttatcatcatcattgtcctgctcatctggatgatttgcgtgcgctccacgaagcgcagggatcccaagaagatgctaacacctgcgattgaccagaccggctcgcaggtgaacttctactacggcgcccacacgccctacgcggagtccatcgcgccatcgcatcacagcacatatgcgcactactacgacgacgaggaggatggctgggagatgcccaacttctacaatgaaacgtacatgaaggatggtctgcatggcggtaagatgagcacgttggccagatcgaatgcctcgctctatggaactaaagaagacttatacgaccgactgaaacgtcacgcctacacgggcaagaagggtacgattaccattgctaccttaccattgaatcttccatattga

SEQ ID NO: 19575 - protein, 3396 aa, DROSOPHILA
MCRAQACPQGSLHCANGKCINQAFKCDGSDDCGDGTDELDCPAQCHYHMQSGGDVIETPNYPHKYGALSKCKWTLEGPLGSNIILQFQDFETEKTFDTVQILVGGRTEDKSVSLATLSGKQDLTTQPFVSASNFMIVKFTTDGSVERKGFRATWKTEAKNCGGTLKATLQRQILTSPNYPKQYPGGLECLYVIKAQPGRIISIEVDDLDIADGRDFLMIRDGESPMSRTIAKLTGKTAQNNRVIISTGNALYLYFKSSLGEAGKGFSLRYIQGCKATITARNGTVTSPAFGLADYPKNQECYFTIRNNARAPLSLKFDKFTVHKSDNVQVFDGSSTSGLRLHSGNGFTGPAAPKLTLTASSGEMLIKFTSDALHNAAGWSATFSADCPELQPGIGALASSRDTAFGTLVSFTCPIGQEFATGKTRLVTECLRGGNWSVSYIPKCQEVYCGPVPQIDNGFSIGSSNVTYRGIAMYQCYAGFAFASGAPIEKISCLPDGRWERQPHCMASQCAALPEVAHANVTLLNGGGRSYGTIVQYECEPGYERNGHPVLTCMSNGTWSGDVPRCTRKRCFEFPTIANGFVVDSTRAYLFGDEARVQCFKGYKLIGSNIMRCSEAQKFEQPPTCEDINECSSSQCDLTTTECQNTNGSFHCQCRTGFTATTECRPVGDLGLGNGGIPDDSITTSVSEPGYSKEQLRLNTNGWCGGSSEPGANWILIDLKAPTILRGFRTMSVQRPDGNVAFSSAVRLQYTNDLTDVFKDYANPDGTAVEFRILEPTLSILNLPLPIEARYIRFRIQDYVGAPCLRMELMGCTRLDCVDINECSKNNGGCDQKCINSPGGFACGCNTGYQLYTSNGTAGYHIERSESGERDGDTYQRNKTCVPLMCPELEAPENGQLLSDKNDYHFGDVVRFQCHFGYIMSGSSAALCLSSGQWNASVPECNYAKCVSLPDDKLEGLTVARPDPESVLVPFRDNVTITCGSPGRQLRATASSGFRQCVYDPKPGLPDYWLSGMQPSCPRVDCYSPMPTPGAEYGQFVDTRYQSSFFFGCQNTFKLAGQTGRHDNVVRCGADGIWDFGDLRCEGPVCEDPGRPADGRQIARSYEQSSEVYFGCNRPGYILINPRPITCIREPECKVIKPLGLSSGRIPDSAINATSERPNYEAKNIRLNSATGWCGKQEAFTYVSVDLGQIYRVKAILVKGVVTNDIVGRPTEIRFFYKQAESENYVVYFPNFNLTMRDPGNYGELAMITLPKFVQARFVILGIVSYMDNACLKFELMGCEEPKQEPLLGYDYGYSPCVDNEPPIFQNCPQQPIVVRRDENGGVLPVNFTEPTAVDNSGSIARLEIKPQNFRTPSYIFKDTVVKYVAFDYDGNVAICEINITVPDVTPPLLQCPQSYVIELVDRQDSYTVNFNDTRKRIKTSDDTGDVRLQFSPESANIKIGNFENVTVTATDKYNNRAACHFQVSVKASPCVDWELQPPANGAINCLPGDRGIECIATCKPGFRFTDGEPLKTFSCETSRLWRPTSVVPDCVSENTEQAAYHVTASITYRANGAVAQSCLGQYQEVLAQHYGGLNQLLSQRCSAVNVNMNVTFVKSVPMLLEENVVKMDFILSILPAVRQPQLYDLCGSTLNLIFDLSVPYASAVIDDLLNIANIGNQCPPLRALKSQISRGFNCNVGEVLNMDTSDVPRCLHCPAGTYVSEGQNSCTYCPRGYYQNRDRQGTCLRCPAGTYTKEEGTKSQADCIPVCGYGTYSPTGLVPCLECPRNSFTAEPPTGGFKDCQACPAQSFTYQPAASNKDLCRAKCAPGTYSATGLAPCSPCPLHHYQGAAGAQSCNECPSNMRTDSPASKGREQCKPVVCGEGACQHGGLCVPMGHDIQCFCPAGFSGRRCEQDIDECASQPCYNGGQCKDLPQGYRCECPAGYSGINCQEEASDCGNDTCPARAMCKNEPGYKNVTCLCRSGYTGDQCDVTIDPCTANGNPCGNGASCQALEQGRYKCECVPGWEGIHCEQNINDCSENPCLLGANCTDLVNDFQCACPPGFTGKRCEQKIDLCLSEPCKHGTCVDRLFDHECVCHPGWTGSACDINIDDCENRPCANEGTCVDLVDGYSCNCEPGYTGKNCQHTIDDCASNPCQHGATCVDQLDGFSCKCRPGYVGLSCEAEIDECLSDPCNPVGTERCLDLDNKFECVCRDGFKGPLCATDIDDCEAQPCLNNGICRDRVGGFECGCEPGWSGMRCEQQVTTCGAQAPCQNDASCIDLFQDYFCVCPSGTDGKNCETAPERCIGDPCMHGGKCQDFGSGLNCSCPADYSGIGCQYEYDACEEHVCQNGATCVDNGAGYSCQCPPGFTGRNCEQDIVDCKDNSCPPGATCVDLTNGFYCQCPFNMTGDDCRKAIQVDYDLYFSDPSRSTAAQVVPFPTGEANSLTVAMWVQFAQKDDRGIFFTLYGVQSARMTQQRRMLLQAHSSGVQVSLFEDQPDAFLSFGEYTSVNDGQWHHVAVVWDGISGQLQLITEGLIASKMEYGAGGSLPGYLWAVLGLPQPYGLSNELAYSDSGFQGTITKAQVWARALDITSEIQKQVRDCRSEPVLYPGLILNWAGYEVTSGGVERNVPSLCGQRKCPVGYTGANCQQLVVDKEPPVVEHCPGDLWVIAKNGSAVVSWDEPHFSDNIGVTKIYERNGHRSGTTLLWGTYDITYIASDAAGNTASCSFKVSLLTDFCPALADPVGGSQVCKDWGAGGQFKVCEIACNAGLRFSEPVPEFYTCGAEGFWRPTREPSMPLVYPSCSPSKPAQRVFRIKMLFPSDVLCNKAGQAVLRQKVTNSVNGLNRDWNFCSYAIEGTRECKDIQIDVKCDHYRGTQNNRVRRQAKDGGVYVMEAELPVVNDPVVHTSTGERSTVKQLLEKLILEDDQFAVQEILPNTVPDPASLELGSEYACPVGQVVMIPDCVPCAIGTFYDSANKTCIACSRGTYQSEAGQLQCSKCPVIAGRPGVTAGPGARSAADCKERCPAGKYFDAETGLCRSCGHGFYQPNEGSFSCELCGLGQTTRSTEATSRKECRDECSSGQQLGADGRCEPCPRGTYRLQGVQPSCAACPLGRTTPKVGASSVEECTLPVCSAGTYLNATQNMCIECRKGYYQSESQQTSCLQCPPNHSTKITGATSKSECTNPCEHIAEGKPHCDVNAYCIMVPETSDFKCECKPGFNGTGMACTDVCDGFCENSGACVKDLKGTPSCRCVGSFTGPHCAERSEFAYIAGGIAGAVIFIIIIVLLIWMICVRSTKRRDPKKMLTPAIDQTGSQVNFYYGAHTPYAESIAPSHHSTYAHYYDDEEDGWEMPNFYNETYMKDGLHGGKMSTLARSNASLYGTKEDLYDRLKRHAYTGKKGTITIATLPLNLPY

SEQ ID NO: 19576 - DNA, 2711 bp, DROSOPHILA
gtatgttctacttatatgtattagcttattgttaactaatattgaaatccgattttaaggtatctcaacccgcccacgcatgttgcacgccctgaagagaggtgcctctgctattaaggcaaccataccgaagatcaaagatgtcaatattattgacaaatactcccgaatgatatttccgatcagttttcttgcgttcaatcttggctactggctgttttatattctggaatgatatatatgtataatgtgaacgagtaattaattcccctagcaacagaaccatgagatccaaatacgactttttataacctccataataaagattgacttcgccatagtatttgggcgtacctgaatcattagcacgacgcatttttatgcttctcctcccacccacaggtgtataaatgtataagtgtatcgaatgatggataaatgtaactattctgtttaatgatcatcgatacggaaatgagcaaatttaaaatataaacgtacgtgacacacccgaaatttccattgagaacgcactgattatcagtttctactgtttactactccgagtcgcttatagatagtcttacgtctagcgattctatatatatataatcctgcatccattgtcaatccgctccttcaattcaatcgaataaccaccaatgctcctcgagctctccgttagcactaatgtggcgaggactcaggctcactgggttcgaatccaccgtcgcacattggtcgatcacacgaaaacgctggccaaatatccaaaaatcaatattaagacctcaagtattttcggcagtagtatatattataataaataaaatgaatgaaaaactgcagaaagaaaacttgtataatttgccatgtagaacacactgcaccctaaatgctccattttcgtttctgtaggaatttacttattaagttatgtaaaatactgtcggaaaaatataaaaaaaaaaaaaaaaaactactgcacaaccggacatacccgaaccatggaataatggttcccggaattctcattttgctcctctgatgaagaagatgggtttgtcgcgatgtaatcagcaccgcctatgtaacttacaaattagtgatagtttacaataacatttaaaaacggaacgaactaataataataggtaaaactacacacctgctgtggactttggcaagttgactacatcgcgccgaaatgttgacatattttgggtgaatctaataaataagagtacatgattaatattaatgcaacatcagatggacctatgtaaataacacacgcacttttctttgtttttgctggaaacatttcgctcaattccgaccattagatcatcgaaccattgcgccattgtctgttgcttttcaattggttgagcgcagataattctgtccttcaacgatctaatacaataatacaaaaagacggcattaggtcaggttacatcgttagctgtgagttatccttaccggtaatagtcctcataaagcaatatgagaaccagtaatggacgtgacatcgaccactgatttcgacaatcctcttgcaaaacgttgttaagtaatgacgacatcatactctgcagtaactcagaattcatttcaacaacctgtgaagagataaataattaaatagagctccgcgttcatttcttttcatacaaacttttaaaaactgcacattttcttgatttaagctacggagctttttgtttggaaatgtggaaactgcaataaatttataaagaatacgtttcaaagacatacattgaacatgtagaacatgagcttacctttcatctggagctgtttaaagatgtacgaaacaatactatccaaaattgtgcagcaacttatataagtggcggagtctgaaattgaatatgtgttactaatatatttaaatgctaccttttactgtggacacacctaatgcggccagtcctttggtaagacttttcaaaatgtaaacgaatgcggctggctccaatgcagccaaataagaaacatgatcttgcgataaacaatttagtaagttgtagtaagctgttgataatttgggatattcctgcaattatacaaatacaaatagttttaaaacaaataaaccactttatcgaaaagtagttactcacaattaaatctctttgttctatggtgagaatcaacttggcgataatattgagtacactgtccaatgtatcgtctccgtacaatttgaatactccacaattgacatagttaccgccaagtgagttctttaatatcaaaaagcatatggcaattccctttagtctcatcgggtaaagtcgttcccttggaacttcctggtgcagaatgcgattaccgtatatacaaataagtttcgaggcctcgcggaataggagaatgcccatggggctggatacattgcctgccagtctttgggtgcggcaatgcaccagctcggcaaacaatttgagaattggtgtcgtaacggcaggatcgtgagcccacaggtccatcgcacgcaagagtatcggcaaatagtccgcataatatagccattcaaaaagcatggtatattgaatgcgggcgttgagcggcagtgccaatccacgaaggtctcgagccaaaccaataatgaccttcttagcctcttcattagaaaatatgttattgtccatcatcactgagccaagggactcgaattgatc

SEQ ID NO: 19577 - DNA, 445 bp, DROSOPHILA
ttaaatcaagaaaatgtgcagtttttaaaagttgttgaaatgaattctgagttactgcagagtatgatgtcgtcattacttaacaacgttttgcaagaggattgtcgaaatcagtggtcgatgtcacgtccattactggttctcatattgctttatgaggactattaccgatcgttgaaggacagaattatctgcgctcaaccaattgaaaagcaacagacaatggcgcaatggttcgatgatctaatggtcggaattgagcgaaatgtttccagcaaaaacaaagaaaaattcacccaaaatatgtcaacatttcggcgcgatgtagtcaacttgccaaagtccacagcattacataggcggtgctgattacatcgcgacaaacccatcttcttcatcagaggagcaaaatgagaattccgggaaccattattccatggttcgg

SEQ ID NO: 19578 - protein, 109 aa, DROSOPHILA
MNSELLQSMMSSLLNNVLQEDCRNQWSMSRPLLVLILLYEDYYRSLKDRIICAQPIEKQQTMAQWFDDLMVGIERNVSSKNKEKFTQNMSTFRRDVVNLPKSTALHRRC

SEQ ID NO: 19579 - DNA, 28098 bp, DROSOPHILA
ttggctacagttgatgtgtgtgtgtgtgtgtgtgggtggggcgatgtgggtgttgcatatatagctgcggtatttacaatcgaatcaaagttccctatataggtatgtatatagcgtatatacagtggctaatgcatagcgcttctgtttttttggggcatgtgtgcgggggttttgtcagtgtggtggtggttgctagtgctgcttgctgcatgctgcatgcaacatggaactcatgttgccgccgtcgttatccatggcttctaccttttcttttaccccagctcgtccacattcattttgccttttccttagatttataagcttagattcttattatcggatcacttgaagcaatttcttggcattcttttggtctttgtgtgtctctctgtctctggatttgtatgtgtttgtgtgtgtgtgtgtcagtgtctgtctgtgtgtgtgtttagttttgtagcagtgtgtgcgtgtgatgtcctgtgtatccttgttgttgggcagtagcagttgggggttctcgttttggaggggaaggcccgtgttcaattgatttatcatttcaatttgttcaccgctttttgctcgtttttttcttcctgaaaagagagatacaaaaaggatatcaataaatggcttagttttctcaatttattctcgtttaaataccgccaatttgcaaaattttttatttgttattgaataatagaatactgtgcgcgaaaggtaaatatattttattaaataacaaatattttcaaagttttaaattcattttcatgttctataatttccaaaactgtaatgtgctatttttctttttaataaagaaatggaaaataatacttattatttactgagcaattaataggttttaacttatttcaaggatttatatcatatacttctgcttggcaacaagacaccaaactaatcacttactaactaattaataataaatgcactttgcttacctttttttcttatacaattcaataaattattgcatttgatatgttggtccattgtttcattattcgttcctaaaaaaattcttgtatttcttggtattcaatttgcattctcattggttgtgttatttgccaacgatgtttacttggataatgctcgagttttctccatttcgatttttgggcgctcggttgggggtttagctctctctctcacactcactctctctcgctctctctctctctttctgattgatcgtaggaggtgggagcgggcttaagaatcgggggatatacatatatagttgaggagaaggtgtatataaatgttatagttctgtgtaatgctgtttttattattattagtattatttctggccgctgctggttgattactgagtgaaagacgtagagagaagtggtcatcgtcgtggttattgtggttgtcgttatcgctgtggttgcccttgtggttgtgatgatgatggtggtggtggtggtggtagtggtggttgtgggggtgttgctgccgttgcgaagaatactacatgtatgtacgaggatcaggagcaggaccaggatcgggatcggtatcggtatcggtttggatcggttcagaaccagtttccgatacagagaactacagataatagtcgcccagacaggccgatgtcgctgccgccgccgccgccgccgttcccaatgtcgcatgtgccgctcctgccgccgctgccgctgccgtgttaaccgccgccgctgccgtcataaacgactatcagtatccaaatcccgccgaaccgtggccagtcattgatggtgttacactactaactatacctaattgtgtggctgtattatttgattgtcagtgttgttgagcggcaaatttcatacgtttttgtttttgacgttgattgcagaaccagacgcgcaccacgtttttcttcaaatccagcttttcggcaatcgctgcgattttctcaccggatggcctcggctggacggcgaagtaggcttccagagaacgcttttcaggtgccgcaatggaagtcctttttcttgaaaaaagactcgatatagattactttagaagcggggccctaagctgcgggacgatcggtagtcggaagtcggatgtcggatgtcggtattcggtatcggtagatataatggtggtataatgatggtgctctgatactatgctcgatcaatgccaaatgtcctaatttttcgcgatatttgcgcgttaatgtgtggtctttggattggctggcgataccccataatcgttaatgaaaaataatgggcgactacataaatgaataggtattatgtaatcgcatttataaaaattaaaatttaaatcaagatataaaaaaaagaaaattatatttcagatgtttttcaatagattttaagcaattattgcaccaacttcaatgcaatccaaaaaaaaaaaaaaaatacgagagacagatggcgccacatgcgtcgtgttggtccttccgcggaagtaaacttcaacgtcagctggcgctacgtatccaactcaactactttattacgaacaaatgtacctgttaccgagatgcattatttattaattggccgtgccacatcattgataaataatttgtacacctaaattcgattatgggctatcgcatgtcacttgggccaccatttagagccgcatctctggctgtttttggtgtctggccaattagttcgcgctcagatgctggagctgggtgctctggactggggtatgggcatggtgggcatttctgagtggaaggggatggcggacatgtggatagatggacgaatggacggatgggagtggagaggagaggaactgggctacgctaccgcgtcaattaaaacactttctaccttttcttttcgcccgccggcaggacactgggcgcatccggatcgcgccgcttgtttttcgcctgcgcctcggcctcctcgagccacgcctgcaggatgggcttaagggcgatcatgttgttgtgggacagggtcaggctctcgaatcgacagatcgtgctctgcgacagcgctccgacgccaggtaacttgagattggccagggctttgcccacgtccgcctgcgtgacacctatcatttatcacgatagttgatttatgatcatttgtgattgaattagtcaataaacaggtgggcgagcaactaacccagcttgatgcgccgctgcttgaatcgctccgcaaacgcctccagctcgcgaggatcggtatctgtgtcgggatgcaggccagcggcagccactgccgccgtgataacaggatgatgtaccgccgagtgtccatgatgtcctgcgacccggatgatgaaagatgttagcaggccgcgtcaatcttatcgccttctcggaggtactgcatctcacttaccccccgtatggccacttaacgtgcccggatggtggtggctcatcatgtgattcatgctgtgataggaaccgtgcaggtgttggtgtgtgggcgttagcggcgactccgagatgggcgccagtgtggtcatcgagcccgtcggatccagcatgtccagttggtccatcgagtggtgcatctgtcgagaaaaaggattttcctaaatagtattgggatggaaacgaactcgattaaaacatttagcaacacaattatgtagatttaaaatagtttcagagcaaagcaaagacctacaaataattggggcattaacaaaattgactatgtatacatgatcttccaaaaagcctatatgaataatgaataccaagtcatcttgttcaacatcttcttagtaatctcacccaagataactttccaatgttagtatcattgtttttcttagtcatttaaagccccaagataaataaatacaaaacgggcatctgtgcatgtacccacttaaatggcatcatattaaacaccatcattaagctggtgagtcattatcatagtaatcaggacccaatttgtgaggtcttcctcactcacgccataagaaatgtatttaaagctacctctaattaaagtccttgctcgtcctccatccatcctgaagatagctgacaacccttttgctccagctgcacttgttactttcccggcgcggaaaggaggcgggaggggacgaaggatcccctttaattgaacgggaaatcaggcccacacacagatactcacgcacacacacagcgacacacgagcgagtggcagcgaaacgaagcgaaatggaacggatacggatatggatgcggatacggatgcggatgcgagggcgcagctcgcaactcttttgtctagccatcaaatatttatagaatcgctcaattatttatacaaatatgaatagcaactaaaaagctggaacagcgaggagctgccttatttcccaacccactcccatgttccctcgttctgtgttttgcctttgtgttgctttgttaagcatttaaactgattacagctgaaaagtatgctacagaacggatggccaaatagcccggatggcctctttctggctctttctaagtcgcgccccctccatcccaccgcacatccctcgctctttccgccctccagtggccatgccattttcattcggttggagggaccttttggtagggggaatctctgaattcggaggctcagcggactgggctgggctgggctgggtcactcatatttatttatctttttgtgaatgtggcgcagtcgggcgggtaaaactagcgcttagttctgctctcctatgtacagtcggcaaatatgccacgcccccaccgacgaatgccggaaaatggacacagttaagggaaatggaaaatgtgaacatcggacccctgcccaattatgtaaaactctaaaatgataaggagaggcctatggagaacaataagacccacactcacacacacacaaacgcacacacgcatgcatgtatattggtgtcccattgtatatgtgagaggtaaaaactatgtagatgctactacccccgccatggcccaaaagtcgtccgtgctccgaatacaatggcaaactcttcaattataaaccaatcccaaaattagtctgacggttattggtttgcacccttggcgctcgctctctcgctcgccagctgcccgtctctctcgcactcgtcggccggcagggcgcattgcctctctttcgcgcgcgatgctgccgtctctctcgtcgcagagagtacggaaccaccctgcgcgtaaacacacacaaagggcatgcaaaaacaaaaaaaagaaaaaccaaatcgaaggacccaaaaatcccaactaacgagggagggagagagagacggacatatagagagagagagagagagagagagagagagaaagggagagggcgaaagagcgagagagtgcgagattacttggccatggacccggacccgggtccaaaaacccgtagccgtagcgccgggagtcgaaagtggaaagtcgggaatagggattcccggagtcggacagcgggatgtgctgcattgtggttggctggggcttatgcaaaattcatgtgggcagtgccgatgtcgctgccagcgttaactttaccgttaacgttaacgccaccgtcaacgtcagcatcgaaggatatggccatggaatccgcccgcagagccacccacatcaccaacacaccctctgctggccatttcattaggcgcataatttgtaattaataaaattattcaaaggcgaccaaaggatgctaatctgtaacttaaagctgaagaaagacgtcagaaaaaaaaaacggaaaaatgcttactattaaagaaatgcacaagttcagttatattatgaacacaaaaattatatcattatgagcttgagtttaaagactttattttaatattaataatattaaaaccgaaatgattaacaaattatttaaatttagcctttgagttctagctaacaaaatgatttgatattaatgtataaatctgcacaaggttttgaaatattgtactataactaactcaaaaaatatataatttgaaatatataatattaaagtttgaaattttaacaaaggtttctaaatagtagatcaatatttgagtgatcaaaaaaaaaaaaagaaaaaaataaatatatttgaagattattacaatataatagaaaaaatgtgcctaatttctaattaataacttttaacattttttataaatcgcttatataaaaaaccaatgttttgtagatgaagagatacttaaatttcttccagtgcatacgaaacaatgaatcccagatacaaaactttagagccagagcgagatggcggagtgagtatgtatgtgtgtgtgtgtgtgtgcatgggtgtgtgggtgtggcatgccatatatctccacctctttttcgtccagaggacaaatcaaatgcaacaatagaaggcaatttgcagcaaaaaggatacaaataaatgcgagtagctaaccggaaaaagagaaaacaattgcactgctaccaaattgccaaatgttgtctgcattgatttcctttctactgcaacatgtacatatatatccgtgtatccatatagaaatatacacatatataggtatctgctctgcagcagcgacaaacaccgagcatctcacacacacatatccctttcgtgcgagtgtgtgtgtgtgcataaggacgccattttaagcaagaaatactcttggaaatgcaaagagagtccggatttggccagtaagttgaatattaaatttggtagcttagttggaataatgttaccacatttactggcatttaaaattaaagattagcttaaatagatatggtgtagtcaggataataatattatatttaacaaaagaacagattacctaatgaactataagaatctacatacatacgtcaatgttagatcttccattgttaaaatgtaatttaaatatattaaacaatacttcttataaacatattaaataataatttaaataaacaaatagggctatctatttatgaaataaaaataaataagagtactgaattgccgctgaacttttctctcctgacaatctgttcttctcacttgctcaaatttttctcttcgacttgggtcgtcaacttcatgatttattaacaaatttgcgaagaacatttatttatttgccgtttgttgataaacatgtgactttgttttctttttggtctcccttacgctctaccgccatctcgctcccaccctttgtatttcattgcccactttcttttctgattgtttacgcgctaatgacctcattatatatataatgtaatttgttgttgccacactgggttccttttctctattgttttttttttcatcttgttttgacataataaagcgtttttggcgcaatttgttgtatctttgtctctgtttttttgtttgtcgtctgtctgccagctcgctccctctctcttacgcccccatatcgcccactcattttacgtgtgcatgtgtgcatgtgtgtgcgtgtgctttgttaatttttaagcattgttaatataatatggcggtgacttctgtcaccgaacacgaacagatggaggtgaatctctttttcagggggatcacccacttttcactccgccggaattcgtagcacacttttcagggcttccacatttgggaaaggtgcttaaattaagagttggataaactagctgacaagattaattaggaaatcgaaaaaaaacaacaattagatgaaaacacttgaaattttaaatgtaagtttatttttgtaaaagtcgcatatggcgttattttgcattagctaagcataagctctgcgttcaaatctcagtgaacttacacatatcatacaatatgcaagaattggctagtggatacctctgaagacagttaggatccatggaggtatacgttgtagttgagccatttccctcgatccggttgactagagatgtatgtggatattatgatttcgaaccgatttcgtgtaggatattgtgaatgagtcgcgtgccgcgtgttacaatatataagaataaatctagaagcgtctacagatctcgctgtcctctacttcttgcgcttctcgacaggcttcaggatttggaaggagcacatgagtgtattgtccacggacatcatggcaccagcattgtcgaattcaccgcaatagttgggggcggaaaacaaagtgaccaattggcgcttggcaaagaactcgtaaccatcctcgacgacttgatgggcacgacagatcagatccagatcgtgcttttggaggaacttgaccacaacttcggcgccaaaggtgaaactaacgccacggtcgttctcgccccacccaatggtgtccttgtccggatcggaccacagcaggtcacagagtagtccctgatcgggaacatcggtgggacgcataatacgacggatctgctccatcgaggtaagatccggactcagtccgccgtggcagcaaaagatcttctcatccacaatggccacaactggcagacagttgaagcagtccgtgaatgtcttccacaacttgatggtatatctgcgcttgcactcgtcgtagaatccatagattctattaatgctggcgcactcgtgattgccgcgcaacaaaaagaagttctccgaatacttgatcttgtacgccaacagcaggcagatggtctccagcgactgcttgcccctgtccacgtaatcgcccaagaaaagatagttagcctccggcggatagccgccgtactcgaacagacgcaacagatcatagtactggccatggatatcgccgcagatcttgagcggcgcctccagctctaagagtatgggctgtgccagcagtatttcgcgcgacttgaggcacaggccccgtatctcaccctccgacagctggacattcttgccaggccgtgcgccacgcacctccaacagacgggaaattatgctctccaaattgagaacctccgccatggcctcggtcttgggggccgcggctgcgttgtccgggctggataggacaatcgtctgggacgccgttggggctgcttgtcagggactcaccctgagatcgcggctgtctggagaatgggactggatcctcggcggagctggtctatttgggtcacaaacttagcttcttgggtgcagcaaaatgtatgtcctgatgacgtgcactttttgtgatgatttgtgaatttttcgatttactcaataccaggtgctcaataccagaacataaccgaatggaattgcttcttctcgatatgtggcggtgaattgtttagcgttcagctttttttttcttttgattctttcacaaaatgcctaataaaaatgtaggacaaattctcgcttctagaaaaagtgaaaagaaaaaggtttgacagcttgattagctatatcgattgaaatcgattaccctaccttctctaagttccttctagtggtgtgcaaagtccagctgttgtaatctaaattctagaatctagacatttgacctctgcgtgctgtactagcagtcgtctttagatcgtgttttttttttttcgatttcgcttctccggaagttaatgaaaattgaggatctgatcggatacacatgtgctgttcactaaaacgcactttaatactctacattcgcgcttttgcggtatcttaaaaattttaaaaaaaattttgattccggaacggtgacctttatacttttcaaagactaaacgaatgacaaatcgacgacagacaagtcagtgactacatcgcattgttccagttcgtgtttcatggaaatgtgatggtatagtgatttctcagaaacttttacaatagaaaatatatatattatataaacgcatttatttgtattttcttcgcatgttctaggttttaaactaaaataaacgataccttaaccatccttataagctgtcttacatcccgcgtttgcagtactagaaaggtattatttaagttggtcacccctggaaaagtgtgccgaccctcgtctgaccctcgcccatttgttcatattatctctgattgagtggaaaacttgaagttgccgagtgccatttgctgtgcaccccggttttggtatattgtatatgagcttatttcgtcggatttcccggctagtgtggccactaattagctgcaatttgttggcgcaacttgaaaaatggcagtgtaaacagggtattttccagtgtcccaataatgaggcaataaccccgcatttttcacatacataccatatatataccatatatatatgtacacataagtatattacataaatagcgagctgttcgagctgattgaactgctttgtcggctgttggcgaagggctccactgtacagtgtgtatcgtgtgctggcgcaccgcaaagcaaacattcaaacattcaaacagcagcggcatcgtttattttggggaaacaaaggacctcattttcccccatttgtttgaccagcaaggcagcaaggacaacaaggacaacagggaccaacaacaagcggccaagttttataaatggcttggccattgttgtgcgcccgccgctgtttgttgaaattaattggtgttacacaaatgagtaattttcaatgtacataaatatttgcacaaattgcaatttgtgttgtgcggcgggggattgtcggtgagagggggagtaagggggcgcactcactttcgagtgctgttcaaatagccatttttattgtcaagcgctaataatttccacaatgaataatatgaacggcaagcatctgttattattccaaacaaatcaaaacaagtgcagtcgaaacgaaaccgtgtgggagtgggagtgggccaagactcttgagtgctgagccctgagcttctgagccagtgatattcagagtcctgcatcctgggcatcccaccctgcgctggcatcctggccacacacaaatcttcataaattgcaacggccggggcgacagttttgggaattgagacaaagtgcgagaagtgcctgtgtacaggggcgaaatgcgaaaaggggtcgccaaatgggaaaatgatacactttactttacttatttttacacatacacacacacgcacatacggaaaggacaccccgtcgcacacagacacaatcaaggagcaacaaattgccgcataaatgtggggtggttcgccacctaatagattttattttatttttatatccgccagacgcgcagccagcggccaacttttttcctacttgtcgttgttttatttatttattttttttttttttggcagggggttgcgattcatggccttacttacttttacttttcacatttttacctttttaccttcttttttttttttttgcctccgccttttcgatcacaagtaggtgtagtggttggatgagggggaggggagcgggtggttgaaggcagctagatttcacgggaattcccaggatattctgcgctgttcgaaggaacagcatcccacattcattgtctctaactaacattgaaaatttgccataaacttaagcatatttatagcaagcagttcaagtcacaggggctttttttatatttatgaatttattgaaattatcaagaatataattttttatgcaattaaaatatgacttttaagtttttcactattgtaatggaactagaactggaactaaaaccacaacaaaattaataaaatgagatgcatttgtaaatataaacaaatgacctttacatttttataaactcattataatggctgttatttcgagaacaattcagtgtttcctttacattcgataacgcagattgtcttgtaatttcccatgcctgtttttccacctcctttcaagtgtatcgactttccacagacgactcataaactttgtcgagcaacaaaaaacgtggcaatactcacgcatacactgcaataatttgcagggttaatggcaacatattgtcgctggctcatcatgcgtgtgagcggaaataatagcaatggaaaagcgtggaaaaccagcaagaccgcggagttttcccgcctccggcgaccacctgccaacgttttccgcccaccccagctttaatttttgctcgtaattttttacacattgcggtcccagcttaacggctgccctctgccgtctgttttccggcccgcccaactgggagacacatccaagtgggcggtgaaaattccgcccagccatacgcaaccacccttcttcacggcgattgcgttgccttctttcacatcacgcacacggcgatggaacaagtgcagcggctcaggtgaggagggaaaagcgaaaaaggggggtgggaaaacaccgggagaaaatctgcactacgttgtaatatattgtgtaatatatatatattattaaaattatatatgagcgctcaaaaaggcatagttttagtatagccaaggattggacaagattatatgaggcgtctttttaaattggggttttattaagttatcgattataatgattgaattgatttgaatttgtttattagaactatgaagttaggagatcagataatatatattaaacaaaatgaagtgcactcggtgtgcttttagaaaccatctctagaccaaaattaattgatttcagtgccagttgtgggcattttcttgcagtgcagagggaaagtggcaatcacacgctgcgtcgccagtctgtgcaataaaaacaacaacaaaaagcacaacgacacgctgcacacacacacaaacacacaggcataacacacaaggacacgagggattccacgtacgcccatgggtgtgggtggcggggggtggtaatagaaattacatacaaagtagcaggcgtgcgggaagtggagcggaggtggcacaggtttcctcaattcacccgtgtaattctcccctgtttttccctttttttttcgtcagcctgcacttcctctcaccgcacctcaccaaggcccctttccctttcttttttttttaggcggtgcgacattaatatgtagatgcattaagtacattatccggggttacaacctccggaaagcagcgagcagcaaccagatccggagtagcgcacgcagccagcatccagaacttgctggtgctacaaaggtatggtacagtggttggaaatatgttataaagatgggatatatatatcagatatattctgtctgctataagaagaagtctatgtataagacatactttagatatatccctatattttgtatatatattataaccatattttagtaagcgaatgtaactacacatttgaatatccatatgagcatatgaaatatgaaatctccttgatccttataaaatattccacaaatttcttaaactttcaatttttataacaaaacagcacttgttgttactgaagcatgtattgatttcgaaacagcgaattaacgcccgaaaatcactgattcagcccactgtgcgcagtggcatggtcacgagaagggggcaagggaaatattatgatttatttttattatggcgggtaaagtggtctttacaagcatcaaacagggccacgccaatcgcccacagacgcgccgagtaaaaaggcagttagttggtttaggccgaacaggatgcggagaataggtgggcggaggaggacatccaggagcaggacgaggaacgtcaggacaccaggagccggggtgtgccgagtggcaggagggtggcgcacaagttgttaaatggacgggtggatttgcacttgccgtgctgactgttatcttcatttttgctttcagttatattgcctgggaattcctgtgggagctgctttgggcacgggatcagggatcagggaacagggaatcccccttctcgtccgcctcctcctcctttttggctaaaacaaattgtatgcccggcacgggcataaaaacaagcggatcaaacagccgggcaggtggaatcgcaatggcaatggcatggcatggcctcatggtggtggttggatttcctaccatcttgttgccatcgccggcaacaggagccgcaaatcgaaaaagagtgttcacggattttccattctcgttgttttgaccgtagcccaagctcattgaaattgcattaatgttccgtttggcctgatggctgatagctgattgataacccctcgtcgagtgagcatccgaatcgaaaagcaggaacctgccaccccaaaagtttcattgttatataatggaaatctgcgtgtataatccgcccctgataagatgggcgtatgggataaactagttatggccattaatgcgatcaatttgctgctcacttcggtgtaaggaaataacagtcttattgaaaagcagtcggcaaaaaaatgggcaacatatttgccgcgaccaacgaagccctcgtcacagttgtaactgataattgccaagttctggtggtcctgggcgtttcgattcctacatctacatatgccatatattaccgggctcatccgcgtggggttgaaagtgcggggattgtgggtcaagtgatgcgttgatgtgcattttaagcaggttaacctgttaactgtcacaacccttttttttttttattatgttttgtctctctacccgggaccatccggatgtttggtgattgggcagggcagggggttcaacttagttagatccgatttatcaagtggcacgcaagtgtcgacagatgttaagttacatcttaagggactctgcactcggggaaacatcgaacccatatccttaagaagtagttctggtaccaatatacatacgttatttactacaagttataacttattcataggcaaaagtagatgcgtttccataaaatatgaatttaataagacataagctggattatccacctaagtcctgctttactatgtatcttaataagttatagaaatggtttatccaagttgattgtttgaaaagctttataaagtaaagcacttaaccgtctgattgtttaaactgtgcactcctttggcttttcgtccatagacagtgatccgattgtaatctgcaatttggccaatcattcgattagaactaaaagcggtttctcccgaagcgtgccattaaaaatgtatgagagtgcagggagaaagtgcaatttgcagtcgaagttctaatgcgccgttgcgtgtaattgtttgaaactattaactggcggcgaggacgaaaagggcgcggtggcacctggcgtatgagcaatgtccgtatccctgtccgtttcgtggcgacgttgtccttttctttttctctgcaattcccccctaaaccgaaaagtccccgtctttcgtgtcttcaattgtcttggccataaaaaagacgaacacatacaggtcctaaataattgatgaagaaaaggaaactaaataaataaataaaaggaaacatcggggggaaaagtggaggcttggcagatgggggagttggtaaattgtcactggatgacacaaagctttctgcacagcgcaaataataaaataaataaatgagaaaaaaaaacatgctcgattcgcagacagacattgaactttcacctaagcaaaaacaacggggacaacagcaacatgaccagtcggccactaaataaagttaatgcattaataatcataatttcttcaatatttcatgagttcattgtggctacgcttgtatattttttgcggactatcaggttggtcaacattaaatatggttacacatttaattaagtcaatcacacggaatcggtgataaatgacaaggtaatcgataagcggacaatgctgctgatgaccgcacgataagcaatatgcaataatcgataagtgggcaatttgaatgatttcctggttggggggccaaatgcccatcacttatttgcttagctccaattctttgttaacttttcagcgactagaaggtgcagttttccaagtgaagtcggaaaaaaccgttcaatgtatgctcaactatagaaaatgccttcggtttgatttgtaattaaagtttgttaagcaatttaaggatgttaaattgcggtgattatagaacttttaatataaatgggctaatttattgttgatttcagcgcaatattgggtttgcttttgcaatagaaataggagaatatattaacttgagtgttaaaacttagttctagttcttgcacatatagtgtatgtattaaggacttgtttttgatattttaattggtttttcttgaatgatttttttttgttttgaatagcgctctcttttcgagacctgaacacaagttcaaaatcctactcgaggaactgcaatcatggaggcaaacacgcatttcatcaacacccgaaatatgcgtttgtttggacttcagcgggtatcccccgaaggtccaccctaaagcagccaccctagttagcggtaagttgtttctaatgtgcacaaaagacaaatatttgctgttgtcgcctgtcgccgctggaaaaatagttgaagccagccggaaatggttgtggatatggaagttttggttagcgtgtggagtggcaatggtgagttaacgatatttacaaaacaatatgacgaccgcaggaggggaagggaattgaagtgaagggcgggcgggaatggagagtaaaaatcaaacaggtgcactaaatgaattcagtatgataaaccacttgtggttgaactccaggaactgggacctcggtcaggcgccccctcggtgtcctgcaagtatcctggccccgtgtatccctttgggcggtgcgtgcttggtaaaggactcaaagcgactctactcgattcatttcatatcgtttcgagggaaattgagccatatgttgcgaatactaatggacaggatatgaaccggcccggaagtatgtaagtgtaatttaaattgaattaagtgagcgagggttggttgggcatggcctggaaaatatggactaaccagatcggagcaaaagtttcggaccggaaaaatctgcgataaatgactgcaaagtgggcagctccgtaaccagaatcccgactccagcagcccgaatttcatcccagttgggcgctgaaattgataatggatattttgccgccgctgccgtaattgttacaaatgttctgacaacctgacaacaaacccgcccctttgcgagcatttcgagtttttatgatggatatgattattttaattagcattatatttactcatgtttacccttttgccgccgcctccccacataattggcttttcatatgctcgcaaaaaccgaattccaaattctgaaaaccgaaaaccagttggataaccagtagaattgctgttagttgtttgctgttagctgttagctgttttccttcctggctcgtaaattagtttaatttaatgagttttgtaatgctcctgctgctggggggggccttctgtcttctggcataacgattatgacacatgttaccagagtttctgacagcccacctctgcaattcactcctccatctcgaaagtttccacttgaacggtttgggggaggtgttccatgcgaaaggattttggaactggaagtgggtccagatggttttataagtagcactgagttaactacgtagctgccacaattagctggagttcgtaaactcgggctgacagaattttacctttgaaaccatctattttcaatggtaaaactggtggggaaagagcgacgagtgtccatctaatgaattatgcaccgatttactataactttggacctagaaataattcacaagaccaaatgcattaggagttcattgttctctcctatgcgtactatgtgaataatcttattattcttgtgtaagtaaatatttaaaaagtggagtaagtcatggaaatttgctctttacatttgcataagtttaactgaatcagaggtaaaactgctgaagctgtatggtatataatatttctgatttagaagtcagaggaaaatccccaattagatgtcgcaccaaagggacatttggttcatggaaagttcgtggatgtaaaggagtcgcaggatgaaatccacctccccgctgctgagaagaagttggagacaccacgaacacctggaagtgtatgcaaggatgcatcgcgacatgccggagcttctctaggtattggcaaatattaaacacgaattgtgccaaatgccgtcgacttgattggtcaactagcagtagcaattaaaaaattatcttcgatatgccaaatattggtgaacgttagcccaggtgttttccactaggttattcccacatggacaagtagctctccttcggggtcttcatatttcatgtgcgactgctgaccggcggttgggtgggtcggttgccaaacttgtttgcggtggacacaaggtgtccagtctcccacagaagggttacgtctaaactggacttggatgtcctttactttttccaaaggtacaatttcgaagagctttcttaaattggtttcttgaagcttgcttgcaaaattaagtgaattttcatactaatctttatactacaaattgatttctagtctataaattgaaatgctaatattttgcatcatccacttgctgttgcgattgttatttgagacttttgatttcttgtccttattaataagcccgtttagggcgaaaccctctggccggaaaagccaatttgttaacaatcgaatcgcagatcccgtgtgcgggaattatcgtacggacttctgtactggggtgttcccagttccaattccatcggagtgtgggtgattgatagagttggccggcacctgagaccgaaatcgaaactctcgagtgcgtcgcgtcgagtgggtttgccgaaaattaaggacagcacgcgctggcaattgggaatggttatgggttatgggttatgggctatgggctatgggctatgggctgcatgtgcagcatgtgctgtatgtgccctatgtgccttatgtgccaggagggactcgagtggattattttgcctacggacgattgccggcggttggatgggggtcacgaccacatcaaccaccaccgcggacggcggcgcgtggacagggcgcactttggtcatgctcgattgtgccgaaaacaagtggcaacttgcaacaggaacagtagccacagtagcaacctgagcaacatgcgacatgagcaccagccgaactatgaacaactagctgcaggctcggtggaaaaacactaaactggacagcaaaaaaaatagaatcgaggaaggaaggaaggaaaacaggttgctggtgtaatttgattacaatcaagttctaatagagcaacagcaaagcggcaaccaccacttgggccctaacccccttttttgggaaggaagaggcgagtactttcggaacgcccagttcgagttgaagtacaatacaattaacgacacgaatcatgatgtgcttacctggcaaacgaccgtcacgtggcacgttcccagaaggcttacacgtcacaattttaattttattaaagaaacatttcaaattaaccgcacacacacacacacacacacacaagcacagtgtacgtgtgtgcatgtatctgtagatagacatgcgtgtgaccatcgaaaacggaaattggagttctcggctgtcccaatgcgacagttccgtttccctttgccactttgccccttttccccttttcccctttcccccttgcccgctcttcatttccgattccgatttcgattccgtttccctgccattaataacccgcctcatcagggagtgactttcataatttgcagcattctagacattggctaataccccatgtccgacctgtacaaaaaccacaggaaggggcgtcttggttaagttcaatcaaccgtaggactaccacttccggcgcagaattggtctcgaatactttgcttttgaacaacagatagtcttagctgtcttggctaatcaaagccagaaacgaggggttttcacatggttctaataacttttaaagtgatctatggaagaaacattttaactaaatctatggtgtacttcaatgtaaattgaatttacatagtttttggttttaaaactaagactaaacaattgccccaaactaaatagcattttcgtagttggacttggactcacctgcaacggacgctggggaggcccactcatggagtgatgatggtacatgacgtcgtgcttaatttgggagggcatttggctatgtacatgctgggcttggtgcttctggatgtcgacggcggccagggcctccgctctgctgaggattccatcgttgatgcccgcgaagatatcaccctgtagtggagacaagatcgcagatcgtagtggtcagtaggttggaagttagcaggtttaggaatatatgcatataagggattgaggatgcagggatatacatgtatgtacgatatacagttggtccacaggcaagaacacaatcgaaacaataggtaatatatttatatgcttataaatatatatatataatatgtttatatagagaacaaatcacccaaatccaattcgaattttcggttaaacaaagacaaacttcgatgtcagatacacgttggcatacatatagatatactgagagatatatttataagtcggcgtcggcgagagagatcaaatatcgaatatcgaatatcaaatgtcgaatgtatatcaaaatgaatttcagaaaaggaaaatcaatcaagtcaagacaaacatggtttactggtttacttttgttgtgttttcaatattaacttacattctgacgtgctgaccacgaattgcataatagggaagcatcttctaacaaacgactctgaaaagacggaacaaacatcgatagtattgtgtatagattcaatttgccactgcagcaattatatgtgtttttttatttttttttgtttattgtgataagagaggcaaaagagtatctgcagatttctggttaacctgaaccttaaagcctttaaccagctggctttctatcgattttttttcggccattccccactagcgggtttttaaataaataatatcaaaagtttttcggttcccgtgcccgatggttcatcttcatgtcgccgccgtcgtcgtcgtcgtctttattattccagtcttatcgattttatattttatatatagatatatatatatatttgtatatatacatagacatgtatgtatgtgtatctgtgctatacatgtgcatgcagcaaactccttgtgtacacgaaactcgcacgaatttttcagttaatcaattatttagatgcgcacaaaacttcaaaacgccgcacgacgaaaacgaaagacgacaacaaagttgggggttttcgcagtgtgaatgagacggaacccacatggccaaaagccaaaggcatcgctcacgttttgcggcccattttcaggcgaaaggcgtaatgcgaaggaccagccagttacacagagagaaaaaggatctcacacaagttacaaatggaaatcgaaatagtttaaggccactgtaagcattctaggactagatgaattatactccgaataagaatttcaaagcggcaaggagaattaaattcgctaagttaaattaaattaaaaaccagaagtttaattaatattacttatattttaaaagttaacggttttgaaggatctttttaagttcgtactgcaacgttgacacataattttgttactctgacatgcaattcgaaaataaagtgttgtgaagtgcaatttatagcagtgtagtgccgtctctgcacccgtctccctcacaccgcagccggctgtctccttttggtccacgaaggaccgcaataaccgggcggcggccatcgtagaaatcaaaatgttgtgcattcccaatgatgtcttggcccattccttgaccatccaaacagccagccagccatccgaccatggttgcttacacttggttaaaaaggggcgtctttggagagggggcgtggcacttagggtggcagggaggtgggaagtgggtggtggtgtgcaaataatccgacagcgacagtttgtttgcacttgcaggtggacaggggcgccaaaaagggggtcgtgttaccttaatggccacatttacacgtgctcccattacaggatgccaaggaaatgacagacttctggggtcgagacacaaaggatcaggggagagcgaaaaagagaaagtagttggaattgcacagtagcaattatttgtgctaactcgatttttcatctgatatgcatggcaagtttaaaaatgtcgcgactaacaaagtctgttcaaaaacataaaaagaatcattttagaattcaattatgtcagcttacagttgtcaaaaatgtagctattaaagttctttaaaatttgtattcattagtacatttttaaaggggatatatttttcaaaggattgtgcatattccattttaataaattggaagttttcgagatatttccattggctagctttgaaactaggatttggatttagtatcataccaacacatttgaagttttttagaaccacctttcattgtattaaatttgtagtttaactcttttagtatatatgcactaaatatttatgacattgtttggaaatttccttcatttttcatggctcccaaaccgaaatccttgtttaagcccagtcaggacgaggcaatccggaacggaaagccctcctgaccagaattcgcaacagtttgttggccaataaattttggcaccgcaacgcagcagtgaattaatttatgaattaatatgcgcagtcattcatcaaatggtgctgtctctcttgccccctcattttagccacgacctaggccaggatcctggccaacggtggagcgagggagagggaagacgatggccaggacactgtcttgacctgctcacacacacacatacacacacacacatattctagcgtacacatggagaaaggggtggggtgttcgcactgcagcctgacacttgcacataaattctttattagtgtgaaaaattaatcaagtgaactgtttttttccctttcgtcctttctccctctctgtctcgcacttgtttgtttgtctcatttttctctgcacgtgtgtctcggtgtctttacgtgcatatatgtgtgtgtatgtgcgatgcatgggtgtgtgtgtgtgtgtggcttatataaataattttttgtttgttgttgtttatttttgtgggaatttaatattcatgatgtgtgtaaatagatacgcattgctgaatgcttaattttatcgattgcgctgcaaaacaaaccgccaaaaatactggagcaattaaatgcgtatgaatttagatactttaaaaccagcagcttttttaatggcagtaagaaagtttaaagattacatatatcttagtatatgaatgtgtattaataacgaatatcttaatattaactatttctgatatcagcagaattctaattattttaacaaagcatgcaaatgtgcatgtttaaagtataataatctactaataatattcctttagatttttcttaactttttggaatttatgcactttcaactgtagataactaatatgatataaaaaaaaaattatattgatattgagcagaaatatcattcaaagattatagatagttgaaaatcacttttttcttaggttttcaaagaactgacttacttatagttttccacccattttagccgagctgctaatccttcgatttcacatattttaactagaaaattcctgtgcttccgtattctttactccccgtttgatttcgccaataatttgtcaattgttttccaggtggtttcgttttaatgccgctgccatttaatgcagtttatgaatatttaaatcaaattaacgccgccgctgtccgtttagcgcgccagccaaacaattcaagttaaatgacaaatgcccaaagctcccctctcaatttccaaaacgagagatacaaaaaaaaaaccaaaaaaaaaaaaaaaacacccgcccctgaaaaacacacttctctggttcttttggtttataaacttcggtccaggggatcggcgacaaatttccatttaatggactgcaaggcgttaagtgtttttgtaaccagctaaaaaggtgcttcttcagccgcatgtgccaccctccttccccccggacgacgatattccccctgccttctcaccgactacttaatgcccagccaagggtagcatataaatcctataaatccgccgctttgatcattcaacttgctccgttggcagcttttcaaaaagccgaaaagtggctaacggccagttgaaggggcatgggctacaaatccgataagcaaatgtagttgttgtcccttaaagaaggaaatatacttgaagtgatttcctcgtttttttttttttttttttgccgtttaaagtgcttctgtgtcggattaatttaaggacttgccgcgcggggttgcaaaatggggtgggaaaaaagttattcacctgttcgggcgcaatcaacctgcctgttttttttttttttcaaactaattttcgagcattctttttcgcatttgcttatgcactttttatgccctagcaatgggtggtataactttggtggaaaacccagacacttttgcctccataaattgcctgccacttagtttttattggtgtttttcaagtttaattgaaatggaagagacgccttttttcaattttaaaattttcatatttttgtgaagtaactttatttcggggttatttgtattgctcacttcgtacctattttaatatttaattcataagattggttctgctataaatgcaattaaaaaagaattgctctaaaattgataggtaataaaaataaaataatatataattgaatatatggaatatatagaatcttatgttagcttgcatctttccatttgtatctttcgcgattatatatccttaatctgtaaactacgcattcatcaacgatgctataaccatatacactcagtcgtggtcgtttattttttgctcgtctttgttcttctaccccgggcttttacattttttatttgtctagctggtcagcagcgcatacaaatagttggtaaataattaatgcaaatgaatttcaaatcacttttcaaggttactgcacaacccttccgtttgggttcgcctcgtgggcaacgaaggacccacaaaatccgggaaacattcaggcgacattcacggcgtaattaagacgaatgctttgccggaaataatcgcgaacggaaaatgggaagtgcactacttgcagttggcatttccgtttcctgttctcttttcttatttttcttcgcttttcgcctttgcacctgtaatcctggacagcagactggcatcaataaacctgtctgagaactgtcagtaataaccatttaatgtctgcccatgttcccattcaatttttaactcaaagctcataaatgattcagcaggacactgggaaactccgagacgcctgccaaatactccgaattattcgttattaatgcattcagacgggaaaaacacggcatcctcaagctctatatatcgctcaacggagtgttggaagttcgttattccctttattcattcagctgccaaatgcaaatgaaagtatgaatggagtccatatttgcgggtcacaggaacacatactggttcttttaaaatgtgcaacttttccctttctatgatatttaaatggcaaacgaaggatctagctcctgtgaaaagtattttgcatatcggaaataggaaccggattataagggataacttataaatggtaatacttggaaaatctgtccttgtcatttcagaataacaatggttttatgttgtaatcgtagtcggatatacgaaatacttatcagtgaagtgaaacgtatttaaatgttgtataagttgatatacattttgatctctgattttagctataagaactcactttgaaagccaagttattaaaataaaaagcatgtacataaagtgttccactttgatgtagctcataggctataggatgacttgaagttctgtgatcgtagaagggttttgattacatcccacagcaaattcaatttgctttgcaatgactcggaggaactcaaatgaaatcgtactaatgtgaaaatcatacctcgagagaatcgcaggatgatgagatgtgaatctgtagaaggaaggatattctgtggtatagtaagtatcttctatgttgtcaatatatacttatttaagtgcttaacgtctttaaattacgcttgtgtgttcataaaaagcccaattatatttacaatatgtgagcaaattaatagagttagggcatcctaagatggcatcatttatgaatagtaaaaacgtatttatagaggttgtatctgcataataaatataaaaacatatgatttaattttattattaatgagttttaggatctggaaaagagggaaattgatacagactttctacaaaatataatatttaaagcatggactcatagccttaaactacatactaatattctcattgagattcaatcccaagaatatgaaagtttgtagtttccgataatttagggtaactcatagtgaaaccaattagatttgccaataagatcaagagaagtcaaaactggacagaaattatcctgagaattaaaggatgcgcccccaaaacattcttgggctcctatgcatcacatcgatggaatcgaatggattggtggttgggtgaggttctcccggcaagtgccgatggatacttacagatggatttggcatgcagcgacgcatttgctccgaacttcgataggagggactgtagcgtcctggaaaacaactgggcgctgacattttcattttatccgtcgtcgaatacatcgacattgtcatgcagccgccgacgaaatcctcctccagcttgaacgccctggaggcgtcgaaagtggttggcgagtaaattttgaagcacttactgggacagccttagcacgtgtcctgcatgcaggacatcaacaaatatcaaatgcactgggcccgctcaactgtgccctaaactatatttctttctacttatatattggctttgattcttcgatcgatcgtatgcactgcacttgtatttattctcttggcccgttggctagttcatcaaattgaatgggtatttttttttttttgtgaaacgcgacagaactgagaaaaaaatcacagtaaaaaaatgttgcccaagtagttaccgaatgccgtcggttgattatttgtaattttcttctctatttcttatttattttttgcttggcttttggactgctaatcgaattacgcgcactcgaaacgggttaaacggtttggcgtcggcgttcaaactgtttaccgtttgcgaagcggagctgttggcccgcgttttataccgacttccgtttcctgtttcttggacttgcaatttgattgcgtgatattactctgcttctgcttctgtaccgctcgaccgtaccgccgcgctaaatgggcatatatgtgtgtgtatttatttttgcagacgccttcaacaaactattttttcgaaattttcaaaaacgccagcgcacaggacacaggacacagatttcacaactagacaagcgcgcgtggtgttgtgataaagaattctatgatgagtttcgctaacttcagagtttattttcaatggggcggacgacatgttttcattatttatcagcgtgggcgtgtcctgcccgctgcctcaaaatggcagccgaattccttatataacgccagcgcgtgccctttgattggttgcccgatgggagcgggcagcgcagccggcgccttcgttcagctggaattgggcagcagtcggtgtgtctctacccggcgagtccttccaaacttgacgaagccaatgccagcgtcagtggtgcgacgtctgcgcactgccacattggctaccgctgggtgagagtgggtggtggtagtgggccgaactgggtagcaccacccccttaagagccggagccctggaaaagccga

SEQ ID NO: 19580 - DNA, 2059 bp, DROSOPHILA
agtgcatttgatatttgttgatgtcctgcatgcaggacacgtgctaaggctgtcccagtaagtgcttcaaaatttactcgccaaccactttcgacgcctccagggcgttcaagctggaggaggatttcgtcggcggctgcatgacaatgtcgatgtattcgacgacggataaaatgaaaatgtcagcgcccagttgttttccaggacgctacagtccctcctatcgaagttcggagcaaatgcgtcgctgcatgccaaatccatctattcacatctcatcatcctgcgattctctcgagagtcgtttgttagaagatgcttccctattatgcaattcgtggtcagcacgtcagaatggtgatatcttcgcgggcatcaacgatggaatcctcagcagagcggaggccctggccgccgtcgacatccagaagcaccaagcccagcatgtacatagccaaatgccctcccaaattaagcacgacgtcatgtaccatcatcactccatgagtgggcctccccagcgtccgttgcagatgcaccactcgatggaccaactggacatgctggatccgacgggctcgatgaccacactggcgcccatctcggagtcgccgctaacgcccacacaccaacacctgcacggttcctatcacagcatgaatcacatgatgagccaccaccatccgggcacgttaagtggccatacggggggacatcatggacactcggcggtacatcatcctgttatcacggcggcagtggctgccgctggcctgcatcccgacacagataccgatcctcgcgagctggaggcgtttgcggagcgattcaagcagcggcgcatcaagctgggtgtcacgcaggcggacgtgggcaaagccctggccaatctcaagttacctggcgtcggagcgctgtcgcagagcacgatctgtcgattcgagagcctgaccctgtcccacaacaacatgatcgcccttaagcccatcctgcaggcgtggctcgaggaggccgaggcgcaggcgaaaaacaagcggcgcgatccggatgcgcccagtgtcctgccggcgggcgaaaagaaaagaaaaaggacttccattgcggcacctgaaaagcgttctctggaagcctacttcgccgtccagccgaggccatccggtgagaaaatcgcagcgattgccgaaaagctggatttgaagaaaaacgtggtgcgcgtctggttctgcaatcaacgtcaaaaacaaaaacgtatagttagtagtgtaacaccatcaatgactggccacggttcggcgggatttggatactgatagtcgtttatgacggcagcggcggcggttaacacggcagcggcagcggcggcaggagcggcacatgcgacattgggaacggcggcggcggcggcggcagcgacatcggcctgtctgggcgactattatctgtagttctctgtatcggaaactggttctgaaccgatccaaaccgataccgataccgatcccgatcctggtcctgctcctgatcctcgtacatacatgtagtattcttcgcaacggcagcaacacccccacaaccaccactaccaccaccaccaccaccatcatcatcacaaccacaagggcaaccacagcgataacgacaaccacaataaccacgacgatgaccacttctctctacgtctttcactcagtaatcaaccagcagcggccagaaataatactaataataataaaaacagcattacacagaactataacatttatatacaccttctcctcaactatatatgtatatcccccgattcttaagcccgctcccacctcctacgatcaatcagaaagagagagagagagcgagagagagtgagtgtgagagagagagctaaacccccaaccgagcgcccaaaaatcgaaatggagaaaactcgagcattatccaagtaaacatcgttggcaaataacacaaccaatgagaatgcaaattgaataccaagaaatacaagaatttttttaggaacgaataatgaaacaatggaccaacatatcaaatgcaataattt

SEQ ID NO: 19581 - protein, 389 aa, DROSOPHILA
MTMSMYSTTDKMKMSAPSCFPGRYSPSYRSSEQMRRCMPNPSIHISSSCDSLESRLLEDASLLCNSWSARQNGDIFAGINDGILSRAEALAAVDIQKHQAQHVHSQMPSQIKHDVMYHHHSMSGPPQRPLQMHHSMDQLDMLDPTGSMTTLAPISESPLTPTHQHLHGSYHSMNHMMSHHHPGTLSGHTGGHHGHSAVHHPVITAAVAAAGLHPDTDTDPRELEAFAERFKQRRIKLGVTQADVGKALANLKLPGVGALSQSTICRFESLTLSHNNMIALKPILQAWLEEAEAQAKNKRRDPDAPSVLPAGEKKRKRTSIAAPEKRSLEAYFAVQPRPSGEKIAAIAEKLDLKKNVVRVWFCNQRQKQKRIVSSVTPSMTGHGSAGFGY

SEQ ID NO: 19582 - DNA, 4768 bp, DROSOPHILA
tacggcatttttcggccccaaagccagctgtttgtttgtcccaatacaatgtgagtctaccgttagtagaagctagagataagagcagagtgctctcagtataatccgaacttcgattgccagcttatcgttgccatttacccagagccgatctaatttagtcagcggaatgccactaagcgacattctctgcaaaatctgttgcatattcccaaagccaggctacaggcactttctacttgcagacgcaaacggaaacggaagccccagcggaacgcccagggcccagcgccgtcccacgcccgctcctgccatcgcgaacagcgtcttctatcccgatgtccgggatccgggagcggccaacaataatcacagcaccgtcaacggtgctgagcgccagcgtcgccaggtcaaagcactggaggagttcgcacgcaaccacgagcgctttcgcagggaactgatgccggatgtgtccgcttaccgcgagcgccagggtcagccgctcatccagttgtgatgtaggagtgggctgctccgacaaaaagccaatgtattacccgttttgtgctaaatcaaatacgtttcaaatgaactatgcttaatttccatacatgtttgtttcaataaacaaaactttagatataacaaatttcggcgatcatggcgcactcagttatgtgggcatactaataattgggttttttaggttatttgttagaattgaaggactaagttggttttaaagttaaacataatgttgggattactcaaatggataacttaaagaaacctaatttttggatgacaaagttctacatatgaaagaacaaaactttttttgtccaaatgaatagaccacatattaattgttatttagaacataatattttttaaaaattcgatagacacaaaacccagtgtgaacggcgaaaataatcgataactgctaagaaaacaaaaacatcgacgttggttgctttgtggaaacatcgataatcgcgagcagccatcgatacatgttccagctctgtaacctagcgttgttgtttgtaatttagctgtgaaaagtaattaagccgcacacagaactgtaagttcacccgctagataaatatatttgagtaaaagaacacaacccgaaatggttaaaagactgcaagaagtcagcaaacttatttgattcgttgaagccgtgaaatgtctctgtgtttgtaaagtgacgctaccattttaaaggtgaattttgcgccgggcattgtcttttctgtaacttcggcatggacttttttagtttgaaagccaaaactatgaacacaatgcgtagtttttcgggtatcaagaactcatttatcaaaggctaggaatattcactatatctgttggcgtcgcttgctgcggctttcattttgtttctgtgcaaaaaccaccacacaaacacagggtcacacagacgcgagcacagcaaacacacaccaccaagcggccgagagcggcttggttttggaccgtttatgcgaagctgagctcatgaaaaccggaattaccgttttgaaaattatgtttagttgatattttgaaacactatttccaaatatagaaatacataacgtaaaaacgtaacgtgtttttaaatttaatattacgacccttcctacttcgatttcacgtattcagcagttcatgaagattaaaacataaacacagtgcgcgctacgctctgctgcgtgtgaagtttggttccggttttcagggcttgaacttatcttctacattgctcccttccagccgccgagcagagagatccagaccagtccagtccacaatacaacccagtactagcgagaaaatgtcggccaagcgaaaggcaggtggcaatggagccggacccaacaagcggcgacccaaaaagaaggagtcggactacgaggacgagttcagcgacgagtccgacgacgatggcgtgcagcagcaggcagcggccgccaaccagatggaggttctcattccccacgacgacctcgacccgcctagcaagcttcccgaggacttgctggccacgctagagaagactccaggtcagatgctgatcgccggcatggtgacctgggacctgactggcaagcgggaccgcaagaacgtcacgaaggtgcggccgaatctgtacagcttccatcggttcacagaagagaaggtaagctattccgcacagtcgtggtccacttgatttctgagttcttttctttcgcagtaccgatatgtggccagcggacccagtgccgcacacaccattcttatcaacatggaccgcaaggcgctcggtttcgggcgtaatcccagcggccagctgggcctcagccaagacatcaagttggcggagaagcccaccattattccggccctcgaacagctgaacatagtgcaagctgctgtcggccggcaccacactctgtttctcactgacacgggaaccgtatacgcctgcggcgaaaacaagtccggccagtgcggtgtgggaaatacgcatgctaacatttattcgcccacgccaattaactaccgaggtccgccgatcattcgcatcggttgcggagctgagttctctgttattctggacattaaaggtagcctgcacacatttgggctgccggagtacggtcagttgggacacaatactgacgccaagtactttgtcaacgccaacaaattgtcattccatttcgagacgtcgcccaaaaaggtcgttttgtacatagagaagagcaaggagggtcatgtaacgccagtcgatggcgtgcagatagttgactttgcttgcggcaataatcacacggtatgtggataatctccattccccacttatttcaagtctaaactacatttttctcttcaggtcgccatcgactccaagaagcgcgtttatagctggggctttggcggtttcgggcgtctcggacacgcagagcccaaggacgaaatggtgccgcgtttaatgaagtttttcgatactcagggtcggggtgggcgcagcgtcttttgcggctccactttcagtctgatcgtcaacgagctgggcctgctgtttttgttcggacagaataagaagacgggcgaggcaaatatgtaccccaagccagtgcaggatctttccggctggaacattaccgacattggctgtgccaatacatcgattatgatttcggccgacgacacactgatcgcttggggcgcatcgcccacgtttggcgagctgggcattggggagttccagaagtcgtcgacggtgcccaaggaggtgccaaagttggacaacattaaaatacctcaagtgactatgggttactcgcacacggtgttgcttgtggacaccacccatgaggccaccaagcaaaagtacgagaagatgcccgagtacactatcgatgattaggtgattagatggtgtgcggctttccaagtgctgctgcaaacacgtttaccgctgccaacaacaatactgctccatgtaggaaattctcagaactgatcatcgaaactctgctgctacttatcgaaagtgaaactaaacacaaaaatccagcaaaatgtatgctataagttaaaagattattattacgctaaactcgctatctacatactatacgataatctcagaaaacggaaaaaaaaagttgattatgtttccaaactctaatttattcttgtaactgatactattccatcctgatcctgttccccttttataatttattgccgcccacctttaggcttaaaaagatgcataaaaagcatgattacccatttttaatttttaatttgtaatttaaacgtaacaagttacagtattctgcattcatttcgaacagagtgagcaaaagcaaccacaaaactacaaaacacgtaaattaacgaactaagcgcataggttacatataaaaagtataccatggaaaaatccaataccagttgcaactattaatagtacatcatgcattttaatcttatacaaaggaatatttaaataaagagaatgttagtatttagactgcactcgtttatcactggcttttcactgaatggtaaacattaaagctacttatagctggcacacatatttcctatcgagcaggaaactttatggaggtttgactgtagagcggcgaatctaagaacaaattggaatcaaggattagccgcactggggtagctgtaggtcagtccgccaagggatgtttggcggtataccccgatttctgacctgtgccgactgagttcccaggcccagtcccagtcccagccttgagtcctcagtcctgatgtcctgccgattgaaagcgaaagtcagagtgcggaaagctccggcgcaaagctctctctctcactctctcgccgagtctctctgctctctcgcgcgcgaggactcttgacttcggagtgcgactttgcggccggagctccggcggatttttccctgacacagtcttccgccgtggtcctgtcgagtaatgtgcgccgctgaggaacaatccctgcacgtcgcgccttgagtttcattttacctttttttcgcccccaccccacccgacactcatacatacaaacaccgaccgcacactcgcacacagacacacacacacacgcgcacatttgacaatatcaacaaaatagttcgaggagtttttaaagcgttttttacaagtgtacggcgattcattctgcacacgaaatacatatttgctaaattaaatatattgaaaaggcggcacag

SEQ ID NO: 19583 - DNA, 1895 bp, DROSOPHILA
cgcgagcagccatcgatacatgttccagctctgtaacctagcgttgttgtttgtaatttagctgtgaaaagtaattaagccgcacacagaactatgtcggccaagcgaaaggcaggtggcaatggagccggacccaacaagcggcgacccaaaaagaaggagtcggactacgaggacgagttcagcgacgagtccgacgacgatggcgtgcagcagcaggcagcggccgccaaccagatggaggttctcattccccacgacgacctcgacccgcctagcaagcttcccgaggacttgctggccacgctagagaagactccaggtcagatgctgatcgccggcatggtgacctgggacctgactggcaagcgggaccgcaagaacgtcacgaaggtgcggccgaatctgtacagcttccatcggttcacagaagagaagtaccgatatgtggccagcggacccagtgccgcacacaccattcttatcaacatggaccgcaaggcgctcggtttcgggcgtaatcccagcggccagctgggcctcagccaagacatcaagttggcggagaagcccaccattattccggccctcgaacagctgaacatagtgcaagctgctgtcggccggcaccacactctgtttctcactgacacgggaaccgtatacgcctgcggcgaaaacaagtccggccagtgcggtgtgggaaatacgcatgctaacatttattcgcccacgccaattaactaccgaggtccgccgatcattcgcatcggttgcggagctgagttctctgttattctggacattaaaggtagcctgcacacatttgggctgccggagtacggtcagttgggacacaatactgacgccaagtactttgtcaacgccaacaaattgtcattccatttcgagacgtcgcccaaaaaggtcgttttgtacatagagaagagcaaggagggtcatgtaacgccagtcgatggcgtgcagatagttgactttgcttgcggcaataatcacacggtcgccatcgactccaagaagcgcgtttatagctggggctttggcggtttcgggcgtctcggacacgcagagcccaaggacgaaatggtgccgcgtttaatgaagtttttcgatactcagggtcggggtgggcgcagcgtcttttgcggctccactttcagtctgatcgtcaacgagctgggcctgctgtttttgttcggacagaataagaagacgggcgaggcaaatatgtaccccaagccagtgcaggatctttccggctggaacattaccgacattggctgtgccaatacatcgattatgatttcggccgacgacacactgatcgcttggggcgcatcgcccacgtttggcgagctgggcattggggagttccagaagtcgtcgacggtgcccaaggaggtgccaaagttggacaacattaaaatacctcaagtgactatgggttactcgcacacggtgttgcttgtggacaccacccatgaggccaccaagcaaaagtacgagaagatgcccgagtacactatcgatgattaggtgattagatggtgtgcggctttccaagtgctgctgcaaacacgtttaccgctgccaacaacaatactgctccatgtaggaaattctcagaactgatcatcgaaactctgctgctacttatcgaaagtgaaactaaacacaaaaatccagcaaaatgtatgctataagttaaaagattattattacgctaaactcgctatctacatactatacgataatctcagaaaacggaaaaaaaaagttgattatgtttccaaactctaatttattcttgtaactgatactattccatcctgatcctgttccccttttataatttattgccgcccacctttagg

SEQ ID NO: 19584 - protein, 487 aa, DROSOPHILA
MSAKRKAGGNGAGPNKRRPKKKESDYEDEFSDESDDDGVQQQAAAANQMEVLIPHDDLDPPSKLPEDLLATLEKTPGQMLIAGMVTWDLTGKRDRKNVTKVRPNLYSFHRFTEEKYRYVASGPSAAHTILINMDRKALGFGRNPSGQLGLSQDIKLAEKPTIIPALEQLNIVQAAVGRHHTLFLTDTGTVYACGENKSGQCGVGNTHANIYSPTPINYRGPPIIRIGCGAEFSVILDIKGSLHTFGLPEYGQLGHNTDAKYFVNANKLSFHFETSPKKVVLYIEKSKEGHVTPVDGVQIVDFACGNNHTVAIDSKKRVYSWGFGGFGRLGHAEPKDEMVPRLMKFFDTQGRGGRSVFCGSTFSLIVNELGLLFLFGQNKKTGEANMYPKPVQDLSGWNITDIGCANTSIMISADDTLIAWGASPTFGELGIGEFQKSSTVPKEVPKLDNIKIPQVTMGYSHTVLLVDTTHEATKQKYEKMPEYTIDD

SEQ ID NO: 19585 - DNA, 3790 bp, DROSOPHILA
gccaaacttttgtacatgctccgctgcgagcgactctctccttactccacctggtttttcgttcaatccttggagcatcttgtttagagccatctgaagcagcagctgctattaccgccttggaattagtggctataaaccttaagctaactttaaataaccatcgttttgtactttacaaatcgtcatcgaaaacagagaatctatgaaaatactataaatatgctatctagtacttccattcattgttttactaactttttcgattgtcgggtggcctatttaatactctgcagatgtggaaatatatgtgaatgctggactaagtcggcttaatacttaccgatttaataatcagcatcccaacttatcggttactataattattatatcagacttgccatctggcttcaatgacttggtcgatcagtgttgcattaataattcataagtggatatttaaatgacttgaaatcatggtgttgcataatgctgacacggcaaaatgtgggaaccgaatggttcccatgttctaagcatagaactttacagcagcaaatcagtcgatcaccgttcatataagcacaaagtacaggaattcctcgcaatgctttacaaatctctgctgttttgcttggcggcggttttgttcattccggcgcattccgatgccaaggagtatgtccatcatacatcattaagcaatcactataataggcacttattttcagatatcagttcatccccgctcgatgcgaggagcagcctggagtgggtcaacagattggcggtcccttaagcatatgcagctttccaccagactatgcgaaaccggattcagaggacatacaggccgtgattaaacacattaagagcttgaaattgaattgagtcacacaaaaattaggcttattgaaacgtttagagaactatacactttataggcatcaagtcgcgctctggttaatgaaatcaataaaattagctataactttgtatcttaattgctgacgcgctttgcatgcagttgcatacgtttctcgatctcgggccggaagtgacgaatgaggccctggactggccaggcggcaccatcaccaagcgcacaaatagtgtgtccctcaatttgtttggaaatctcccacagcatatcgatctcagcgggctgggcgtcacccttaacaaatctacaccgagaatggagatagacagttaaatttgttttaattacatgtaaattgcagacttaccgagtcatgattttgttcatccaaccgattccctctcggcatggcgtgcactggccacagctctcatgcttatagaatgaaattagcctggcaatagcctttatcacatccgtcgacttgtccattacgatgatagccgcagtacccagcgaagtctgagcggcaattaggccatcgaagtccatgataacatcgtcgcagacatttttgggtatgatgggggtggaagagccgccgggaatgacgcctagcagattatcccatccaccagtgacgcctccgcagtggcgctcaatcaactccttgagtgggatggacatttcctcctccacagtgcagggcctgttgacatgtcccgaaatgttgaagagcttggtgcccgagttacgggtgcgaccgaagctggcgaaccatacaccgccacgacggcaaatggttggtgcaacggccacggtctccacattggtaactgtggttgggcaaccgaacacacccacatcagctgggaatggcggcttcaagcgtggctttccctgctttccttccagcgattcgatcagagcggtctcctcgccgcaaatgtaagctccagcgccgcggtgcatgaagacgtcgaagtcgtagcctgttccgcacgcattctttccaatcagaccagcctggtaggcctcggcaatggccagttgcatgttggaagcctcgttgtagaactcgccacgaatgtagatgtaggcagcctgggcgcccatggcgcgtccggcaatcagacagccctccaccagcttgtgtggatcgtggcgcatgatctcgcgatccttgcaggtgccaggctctcctgcaaaggaataccaaaatcaaatattggtcttggaacgcacggacaattcctcaccctcatcggcattcaccaccaagtacttggggcgtccatctccgggcttgttcatgaaggaccacttcataccgctggggaagccagctcctccacgtccgcgcaggccggacgtcttgatctcgttaacgatccagtctgcccccttcagcacaatctccttggttttgtaccagtcgccgcgcttcaaagctcccttcagcctccagtcatgtcgtccatagaggttggtgaagatgcgatcttcgtccgccagcggaccgaatttggtcttcgtctgtggcggaggagtgcccggaggtggggcctgggtgctctggaagcgctgcacatgcaggctggccggcaaagtcgcaactgcaagacacattcagagtagatcaataaattgcgcagaacactggacacttttgttttgctttgcgcaaaaattacataatttgatggcatggaaattgtttgtttttaaggcatggggagcttatggcaatggcatgatccttacgaaacaagctaatgacactgttagaaaactggtttatggttaggtggcgtttatttaccaatctgcggctttgttaacaaattaaatcgcacaattgcagccattttcgggacaactgactgacagctgaaatgtgacgtttgtacgcagcgctgccagatggtccgaataattaatagtgcagattaatcaggggctttcgagcacgtaatcagctgtaattaataaattgtttcattttaaacaatgaattaaaaatgtcttacttattaaacacaacggaaaccattaaaaccattttaaaatgttttgagccaatgtgatgtttctttcacaactaagcagccctggtgtaaacggggctcaagttcaaagccaaaatcaaagcaacagtaaatacgtccacactgtatactctactatttgtttagttagaaaaatggcccataagcagagcacgaacaatgagacatccaatggctcgacaactgaaataattgacgaaaccgatgcccgtgctcaattggaatcgggccggaccacacccactcttctgttgcgcctcgaacatccgcggaatgaacgccgggtggcctttcacgctgggatcatcgacaacgagcatttgaatcgcaagaagtccaaatgtaagcattgattgtttcatcgaaggaccagactgatttcctcccatttcaggctgctgcatttacaaaaaacctctcgcgttcggcgagagctcctctgaggatgacgaagactgtgagcactgctttggacatccggaaaagcgtcagagaaacgcaaaacacaatcacaatcacggggacaaaccatgcacggaggcgtcgcatccggaaggaccttcgacatcaacgcaggccgcgcacatcagtcaaccgccagccgagcctgttgaatcgaagaccgatccaaaaccacctaccccaggtgttgactttgagcagacgggcagctcgtagaatgtatatatataattataaacgttaacaacatggaaccaactagcaagcactcagatctacaaagacggtgtttttaggcagtaagaaccacttggggatttgaaatcgtatgcagtcattagtttttcggcttcaactcaaaggattcgctgacgtt

SEQ ID NO: 19586 - DNA, 1464 bp, DROSOPHILA
caaacgtcacatttcagctgtcagtcagttgtcccgaaaatggctgcaattgtgcgatttaatttgttaacaaagccgcagattgttgcgactttgccggccagcctgcatgtgcagcgcttccagagcacccaggccccacctccgggcactcctccgccacagacgaagaccaaattcggtccgctggcggacgaagatcgcatcttcaccaacctctatggacgacatgactggaggctgaagggagctttgaagcgcggcgactggtacaaaaccaaggagattgtgctgaagggggcagactggatcgttaacgagatcaagacgtccggcctgcgcggacgtggaggagctggcttccccagcggtatgaagtggtccttcatgaacaagcccggagatggacgccccaagtacttggtggtgaatgccgatgagggagagcctggcacctgcaaggatcgcgagatcatgcgccacgatccacacaagctggtggagggctgtctgattgccggacgcgccatgggcgcccaggctgcctacatctacattcgtggcgagttctacaacgaggcttccaacatgcaactggccattgccgaggcctaccaggctggtctgattggaaagaatgcgtgcggaacaggctacgacttcgacgtcttcatgcaccgcggcgctggagcttacatttgcggcgaggagaccgctctgatcgaatcgctggaaggaaagcagggaaagccacgcttgaagccgccattcccagctgatgtgggtgtgttcggttgcccaaccacagttaccaatgtggagaccgtggccgttgcaccaaccatttgccgtcgtggcggtgtatggttcgccagcttcggtcgcacccgtaactcgggcaccaagctcttcaacatttcgggacatgtcaacaggccctgcactgtggaggaggaaatgtccatcccactcaaggagttgattgagcgccactgcggaggcgtcactggtggatgggataatctgctaggcgtcattcccggcggctcttccacccccatcatacccaaaaatgtctgcgacgatgttatcatggacttcgatggcctaattgccgctcagacttcgctgggtactgcggctatcatcgtaatggacaagtcgacggatgtgataaaggctattgccaggctaatttcattctataagcatgagagctgtggccagtgcacgccatgccgagagggaatcggttggatgaacaaaatcatgactcgatttgttaagggtgacgcccagcccgctgagatcgatatgctgtgggagatttccaaacaaattgagggacacactatttgtgcgcttggtgatggtgccgcctggccagtccagggcctcattcgtcacttccggcccgagatcgagaaacgtatgcaactgcatgcaaagcgcgtcagcaattaa

SEQ ID NO: 19587 - protein, 474 aa, DROSOPHILA
MAAIVRFNLLTKPQIVATLPASLHVQRFQSTQAPPPGTPPPQTKTKFGPLADEDRIFTNLYGRHDWRLKGALKRGDWYKTKEIVLKGADWIVNEIKTSGLRGRGGAGFPSGMKWSFMNKPGDGRPKYLVVNADEGEPGTCKDREIMRHDPHKLVEGCLIAGRAMGAQAAYIYIRGEFYNEASNMQLAIAEAYQAGLIGKNACGTGYDFDVFMHRGAGAYICGEETALIESLEGKQGKPRLKPPFPADVGVFGCPTTVTNVETVAVAPTICRRGGVWFASFGRTRNSGTKLFNISGHVNRPCTVEEEMSIPLKELIERHCGGVTGGWDNLLGVIPGGSSTPIIPKNVCDDVIMDFDGLIAAQTSLGTAAIIVMDKSTDVIKAIARLISFYKHESCGQCTPCREGIGWMNKIMTRFVKGDAQPAEIDMLWEISKQIEGHTICALGDGAAWPVQGLIRHFRPEIEKRMQLHAKRVSN
